United States Patent Application Publication US 2024/0301345 A1 - sequence listing, part 13

SEQ ID NO: 2089 - DNA, 38528 bp, Unknown
  R51_24m  MAG No. k141_796
cctgactaaaaatcaggcagcgagagcgaactcagtgcggttagatttagcacttattcttttgccggggtcatccacgagcggacccggcgttctcggcacgcttccctgcagcgaacaggtcaccgtcgaaaccgatcgcccccaatcttgagttatcaagcttccggcttttcggccggacttttcagcatacaccctatggcgctactcgcgcaaatcgccggcagcgaacatcgccccggcattgacgggaccaacgttgtcagcaggaccaacggagcgaacgccgccccggaaccaacggaaccaactgaatcgccgtcacttgatgatgggcttctgggatgcggaaacatcaatctgatgtttgccggcaaagccagccgtgccagcggtgatgttcttgtcgatttcctcgacttccgccagcttcagcttcagttgcgaggagtctccccaaatgattacgcggtcaccgtcgttaagcgtggtggtcaccgaatcctgcgtctcagcggtgaccttggtaatggacttacgcatcgattccggcaatgcgcccagaatcgccagcgcctccttcaccgaacggttcttgagactggcgtctatatccttgacctcgatcaccgggatgccatccacgttggcgttcttcaccgagttcaacacacgcgcctgggaatccaccgcggtcagggtatcgcctcttttcagcatggccgcaggccgttgcgccttgacttccacgctcatcgacttggggaactgtttggagaccttggcctcgctgacgccgggaatggacttgagttgctctgtgacctcatgggtggagaccaggaacaacgactttccagcctgcttatcggcgatggcatggatggtctgcgcgctcacccattcgttggcaccggatacgccgatctcgctggtttccagacgaaacaccgacgagaagagcagcagccacgttagccccgtcactacagccacgctgacgacagcaatcaacacgcgtaacgcgacgacacgtacgttcgcacgcttgcgttctttggcgcgttcggtgaaattcaccactttcggacgtgatacgactcctagggagccggtggtctggtgcagcgtttcggcaacgtaatcctcgctgtgcagccgtcgtgcatcgacgaaggcaccggcctggcccttggctaccgtcacatcgtcgatgatctccggctcgttgatctcatgcccggaagacacggaccggggagcgcgagacttcgacgagtgacccgtgtttccgcgtgaaccgatggtgcgcggcttgcggggacttccggacgaacgacgtgagccgttgtcattgcccccggatctgaccgtgcgcccggacatcactcgcagctttcccgatgggcctcaagtgcggtgagcagcacctgatccatgtcggtgatgtcgcccgcgcccacggtgaagatcacgtcgccgtggtgggcgcgcatggccatcatcttggcggccaggcacatatcctcgaccggctgaatccacgtgcctgcggaagcatccttgagtcccgcagccgcgtccacgatggtggaggggctgatgtccgggaaatcggtctgcttttcacgggccgggaagatgccggtgataatgacgtcatcggctttggccaaggattcggcgaactggtgcgcgaagaacttggtgcgggagaacaggtgtggctggaagatcacacgaatggtcgaatcggggtaccggcgtcgggccgcatccagcagggccgcgatttcggtgggatggtgggcgtaatcgtccactacagcgacctgcttgaccgtgccgcgcacctggaagcggcgtgccgcaccgaggaatgtgccggccgccttggccgcgtctgcggggctcacgcccagcagcacggcagcgctgatggcggcggccgcattgcgcgcattgtgcacgccaggaaccttcagggcaacgctctgagacaccggctcccccgccgtcaccgcggccggcagatgcagggtgagctgttcgacgccgctgcctgcggtctcgctttccgaagcgatccagacatacgcggcaccgcccaaatcgggcagggattcacgcgcggtagtgccgtaggcaacggtatgggatttcacgtcggcgggcatggcctccagcacggcaagtccgtcggggtcgtcgatactgatgatcacgtgaccggtggcccggccggcgtgggcaacgaacgcggcacggtagtgggcttcgtcgccgtaatggtcgagatgatcggcttcacagttggtgataatggcgatggtcggatggtatttggcgaagctgccgtccgattcgtcggcttcggccaccagaatatcgcctttgcccgcgtgtccaccgtccagcgtggtgccgtccgggccttggataaagccgccgatggcgtagcttggatcagcaccggcgttcaccagaatgtgggacagcatggagctggtggtggttttgccatgcgctccggccacggtgacggctcgtttgccgttcatgagcagagcgaggatgtcactgcgatgcacaatgcgcttgcctgccgcgtgcgctgcgacgatttccggattgtccggtttgatggcgctggagtagaccacggtctcggcctgggcgacattttcggctcgctgcccgaattcaacggtgatgcccagcgtttcaagtcggtcggttttggcgctgtgtgcgcgatcggagccgtccaccgcgactccttcggcgtgcagcatttcggccagaacgctcataccggcgccgccgataccgatgaaatgggtggcgccgagatccgcggggcgggccgcagcatcgaacgaggcatacgtggggtcaagcacgatgggctgatcttgagacaattcaaaactcctttggggattccagcaccctatattatgaccgtatctcgtgttgcgggacgggattggtctgtatcgcgcacgggatgatatctgaatactatttggatggttcggctaattgcagaacgtgccgggccatgatttcggcagcgtttctgatgccgtattcccatgccttgcggccgaattcggcaagtcgttcgtgatcggcgagcagatcgggcacatgctcatgcacccactgcggggtcaggtccttgtctgcgaccagaaggccgccgccggcgttcaccactggctcggcattgaaacgctgctcgccgttgccgattggcagcggcacgtaaatggccggcagacccagtgcagccagctcggataccgatccggctccggcgcggcaaatcaccaagtcggcacaggcgaaggccagatcgattcgttccagatattcggcggtatggtagtcaccttgtccggccgattcggggccgatgccggtaagcacgtccgcgccggccgaggccgtgaccagttcgcgtacttcgctgattttgcctcgcccggtcaagtggatgatttgtgcgtgggccaacaggtctgcggcggaggaggcgatggcgcggttcaggctttgcgctcccagcgatccgccagtgaccagcaccagcggacggttcggatcgacgccaagctgcgcggccgattcacggcgtacggcggcacgatcgtcaccgatgcgtttggtcagggaggcgatggtcgggcgcaacggcagaccgacacgctcgacgtcggctccggcacgcggtttgagaccggtgccttcgtacacggtaccgatgaaatcggcccaacgagcgcccagtttattggccatgccggcacgcgcattctgctcatggatggcaatcggaatgcccatcttgtgtgcggtggcgtagacgggggcggaagcatacccgccgaatccggccacgacatccgcatgccgcgtttcaagaatggagcgcaccttggcggtttctcgcttccattttgccgggaagcgaagcatgtacaggtcagggcgacgcgggaacggcactttttcgatggtgtcgagctcgtagccggcctcaggcaccaaatccttctccaaacccaccgcagtgccgatgacggtgacctgtgccgtgggttcgatgtcgcgaatcgccccggcgaccgcgagcagcggattgacatgtccggcggtaccgccgccagcaagaacgatatgtggtgtgccttgattcatgattaccgagtctacttacgcgctctgacgcgactgttttatctgcggttgagaacgcataagtcccacaaccagtccggccgccgtcaagcacatgatcattgatgagccacctgcggagacgaacggcataggcacgcccaataccgggaacacacccacgaccacgccgatgttgaccatggcctggcccacgatccaaatggtgacgcacatcagcaccatggcaacataacgatcggtgacctgcaatgcgatgacgatcatgcaccaggcgagaatcgcgaagaacagcaatacgatggcgcaaccgacgaatccggtctcctcgccgatgatcgcgaaaatgaaatcgttatgggcggccggcaggtaattccatttctcacgcgaattgccgatgcccaatcccagaaagcctccggaggcgatggcgtacttggcgtgaatggactggtagcatacgctctgcgcgtcagcggccgagcaatcaccatatgtggccagaatacgacgcatgcggttcgggctggaaaccgccaatgcaccgaccataaccaccgcgcccaatacgccgattcccatccatttgccggggaatccgacgatcaggaaggccacgcctccgatggagaccagaatcatggccgtgccgaggtccttgccgcccatcaccagcgccacgcctatcgcatacaacaccaacggcgcggcatatgctttgattcccttcttgtggtacatcttgctgcaggcatgcaacgacgagggcagccatatgcacatcgcgaacttcatgaattcggccggctggatagtggtgaagccgaggttcagccaacctttgttgccgtagacgtcgatacccagcggagtaaaggtcagcgcctgcaacaggcaggcacccaccacaaagaacacgccggtccgtttccagaacgtcaccggcatcgtcaatgccacgaagcccagcaccaagccgatcaggcaaaacgcgccctggttcagaagctgaaggaacggcgacttgcccagtgcggccatggtgaccgtggagctggagaacaccatgatcaggccgaagcatgtcagccccaccacggccatgcggaatccgtggtagcaccatagcgggttgagcaagcttcgccaacccgtgtagtcggtgatctcgagtgcgggcctgtcaggggctctgtatgccttacgcttatgggtatcagtggaggccatgcacctcgctccacgtcttggctgcggcggcgaatcgattgcctcgatccgcataggacttgaactggtccatggaggcgcaggccggagccataagcacgatgtcgccggcggcggcatacgtgccgcaggcttcgacggcacgatccatgacggtatcgttgtcttcgggatcgatgatggtcaccgggatgtccggagcttggctggcaaacgcttcgaccatcggctgctggtctttgccgatgatgacggccgctttgatggtatgtgcctggtccttgaccaggtcctcgaatcgactgcccttggccagacctccggcaatccagatcacagacttggccgggaagctggacagcgaggcgcgtgccgcatgaccgttggtggctttggaatcgtccacgaaacgaacggagccgccctcgactgcggcctcagccacggtttcgatgcgatggccgcccggcttgaacgaggtaagcgccttcaacgcggtatctcgatcagcgccaagtcccagcaccaacgccaatgccgtcaatgcatcggccaccagatgcgggtacagtgagccgtccggctctgccagatgcgtgaaatcggtgatggcggccagtctgaccggctcccccactgcgccgccggccacgccgctcctgtccacgatccagccatcttcaatgccgatctgaccggcctggggggcctcgagcgtgaatcccaccttgcggcatccttcggcggtttgggcctcggccgccagttcgctgactttggcgtcctgcgcattgtagacgatggcgcgtttggcgttgtggaacaccttggatttgtcggcggcgtaattctcgcgcccgccatgccagtcgaggtgatcgtcggcgatattggtgatcgccgcgcagtcaagtgccagcgaatcggtgaagtgcaattggaaggagctcagttccacgcacagtacgtcgtgctgaggattggtggcgcaacgagacaggctcatgctcatgtctccggaggcgatattaccggcggtcggcgcgtcgagtccgcaggcggtgagcatttccgaggtcatctcggtggtggaggttttgccgttggtgccggtgatgccgatccatggagccggagtaccggtgcgctcgttattcacacgcagctgccatgcgaattccacctcgctcatcacggggatgccacggcgttgggcttccagcacgaacggggtgcgggggttgaacaccggggacgacatgacgtagtccacatggtcccagtccacgtcatcaaaggagcggagaccggcctcgggcttcctctcgtcgacgccaatcacgtgggcgccgcattccctcaatacctccgccaacgaggtgccggacacacccagtccagcgatcaccactgtcttatccgctacttgcattgttcctcctgatataggaattccgtgggtgagcataatcccacccagatttccgctagctgaacagcaggccggagcgggtgacccagtcgccgtagaaaatcgtcagggcgagcagcacgaagatgagttcgatcatccagaaccgcaccaccaccttggtttcggtccaacccttcagttcgaaatgatggtggatcggtgccatcttgaatacacgtttgtgggtcatcttgaagtacccgacctggatgacgtcgctcatggcttccatgacgtacagtccacccagaaccaccgccaggaattcggtgtgcgtggcgatggacagggctgcgaacaggccgcccaaggccagggacccggtatcacccatgaaaatcgatgcggggttcgagttgtaccacaggaagccgaagcaggcgacggccgcgcatacggcgatgacggtcagatcgagaggatcggacacggcataggaatatccgccatggctgccgcccttgatgtggtagctttcccagaatgcgatgatgccaaaaccggtgaaggcgatcatcgacgaacctgccgccagaccgtcaagcccatccgtcagattcactgcgttggtccatgcggtcatcaggaagttcacccagatgacgaacaggatgatggttacggcacggccggcgaagtcgaagttgaagaacggctgttcgatgaagctgatgcccgcctgcgcactggggaatcccgatttggtgggaatcagcagcgcaagtaccgcgtagatggtggcgaagatgaactggccgatgaacttgccgcccaccgataggccttcgttctgcttcttacgcaccttggcgaagtcgtcgataaagcccagcagacccatcgacagcatggcgaacagtacgagcaccgcggaccaggagggcacgtcgcccgaacgcaggtatcggtacagtgcggaggatgcccaaccgagcagaatcgcgaagttgatgaccacgccgcccaacgtgggggtgccgcgcttgaccagatgcgactgcggcccatcctggcggatgtactggccatagtgcagcttgtggaccagccgaatcagcagcggggtgccgactaaggtgacgatgagcgacaccagcattccaatgatcagagcaatcacgtgcagcttctctttcttgtcggtttcttggggtggttatcgggtcagttctttgcccagcgttcagccaaagcgctcaggcctgacgcgtgcgatcccttgagcagtaccacagcgtcggaatggttgcgcgccaagtcgatgaccagctgttcggccgcatcgatgtcgtgtacgcaatccaccgacgcggattggctctgacgggcaccgtccgccagagcctgtgccagtgcatcgagatgttggtcttgggcggaaccgaccgcgatgatcgcgtcgatgcccaattcggccgcatacgtgccgatagaggtgtgcaatgccgtctcatcggcgccgagttccagcatggcacccagcagcgccacgcggaacggatccttgccgtcatttgagttccaagccttcaacccgttcaggccggctttcatggagtcgggattggcattaaaggaatcatcgatcagtgtgaaggaaatcccctcgcgattcaccgtggacaatgccatgcgatgagggctgatggtgtgctgcgaggccagaatccgcgccaccgtttcgggtgccataccgtaacgcatcgccacggttgcggcggccaacgcgttcatcacgttgtgacgtccaggaatgcccagatgcaccggcgtatggttgccgtccgcatcgaccaacgtgaattcagcatgatcggaccggtcggcagtgacatcaatggcccgcacctcgggctcctgcgacgatcccaagccgaaccacagcacatcgccgctggccaagccggccatgggaaccacgtgttcgtcatcggcgttcagtaccgcggtgcctccgggaagcagtccctgcacgatttcgcttttcgcctgtgcgatgcgttcgcgggagccgaattctccaaggtgagcgacgccgaccttcaatacgattgccgtgttcggcggtgcgatacgggtcagtcgcgcgatttcgccgatatggctggcacccatctcagccacgaagaaccgggtgtgctcatcgacccgcaacgcagtgagcggcaggccgatctcattgttgaacgatcccaccggagccacggtcgggcctacggtggcaagcagggaggagagcagatccttggtggtggtcttgcccaccgaaccggtcaatccgatgatgtcgaagtcgccgtccagctcgcggcggcgaacgatgttgtgtcgggcgagctcgccaagggcgtcgaccgtgtctttcactacgatctgcggcaggccatcggactccacctcatggtcgacgatggacaccgtggctccctgttcggcggttttcgccacaaagtcatgcccatcgacacgctcgcctcggatggccacaaacaccgatccggggccggcctgccgcgagtcgctgaccgtattggtggctcgagactcggaatcggcgtctccgatcaatcgaccatcgacggccttggcgatctcctccacactcatcggaaccatggtgtttcaaactcctttacgattacgcttcgtcccgcatccacggacttaattgagattgttggccacatgcagggcactgcgtatgttgtttttcctcacgccggcggccagtaccatggcgatggccaaggacatgtgcccgagtcggacgcggtcgtacattgccggtgaatccgcagccatttcatccgattcgggtgtcgacgaggtcatggacatgtcatgttccgcaacgaatgcgtagcgtgtcttcaattcgtccaagcttgcgcttgcgttgacatcttccgtgcccagcacatccacgttcaccgattccaacgcatgctcggccaatgtgcggtcatccatggcgatgatcacggccgccacaccgtcttcggcgcacacggacagcgcgcgctgcatatcgaggatgcccagaggatagttcaggttcatggtacgtgtcatcgacgtggacccggatgcggtgattaccgccaccggattgcccagcatgtgcaggaattcggagagctgggacacgcctgcgtcaacggcctgctcatccgcaccggtcaccgcgaacaccgccatggcgttggatggtccgccggccaggccgctggccagatcgccgagtacgcgatcgtcgaaatcgccgtagagcaacggtatatcggcattggcgatctgtcctttggacgcgcgtggcagcaacgccgcataggcacctgcctgtgcggcatgcagcacatcgggttcctgctcatgcgtgcagatgaacagcgagccgggaataacggtatccacggcatcgctgagtgaggtaatggtgacattggtggcgaagggtggatcgacttcaaaaccgtaccgttcgaccagcattcccaaggtcacccgctgggcgatggattcgctcactgcactcatgggctatcgcctttctcccctgatccttaccacgtgactggaatagcattttttcgtggactggagacaggcacctcgtatttctgcataaggaactcacaaatctgtgcggaaacagggccggccgtcagaccgccgaacacaccattcggatccttcagcaccacggtgaccgcatagcgcgggttgtccgcgggaatcaccacggaataatcggagataatggacgagagcgcgccatccgaaccctgcacctctgcggtaccggacttggcggccatgcggtaaccatcgaccttgacgaacttgttgtagctctccgccactgattccatcgcattcatcatgtccgatgcgaccttttcatccaccacgcgggtggcttcgcccttcttggtctcagtggtcttgccattggcatcggtggttgatctgatgatcgactgctgctgcttgacgcccttgttcgcgatggtggccaccacgttgttgagctgcagggcgttgacggtgtagccctgaccaaacaggatggtgttgcgcgtacgcagatcccatgccgaagggctggtgagcagaccgctcgattcaccgggcaggttcagtccggtcggttgtccgatgccgaatttggtcaggtactcgtagcgttgctcatccggatagttctccccggccataatcatgccgacgttcgatgagttctgcagaataccggcgagcgtccagcgctcagtgccatggtcgaatgagtccttgtaggtctggcccttctgtgtgatgtggtccgggaccgacaattgatcgctcatcttatgcagtcccgtctgcagatagccggacatggagatgaccttgcccaccgaaccaggctcgaaggtttcggacacggcccgagacgggctcatcttcgccgcatcggtaccagcctgtacttcatcgctatcggccagtgcgagaatctccccgctctggacatcctgcaccacggcgatcgcccacgctgcaccatacttggattcggcctccttcaaggcctttttgacataccattgcacatcacggtcaatggtcagggtgacatcgtcgccatttttggccgccaccgattcggtcatggtgccgggaatctcttcgccgccattaccacgctggtaggtttcatggccatcggttccggtaagcgtcttgttctcgacctgctcgatgccggcgacgccatcgccgttgtcgttcacgccgccaagcagcgcgcccatgagatcgccatccgcatacagtctttcactgctcagctcaccccagacaataccgcccaggtgcaacgcctcgatgctgcgcttgacccgtggggtcacgtctttcttcagaatcacatactgcccggtaccggacagatcagcgcccagttccatggcgttcatatccaggactttggccagcagtcggcccacggccgccgctccggtagcacccacgggtttgccgtcaatttcgtggcagtaatcacgggtgttgtcattgcaagtaatcggctcgaactcctgtgcagcctccggattggcgacgatagtataacgctccacgctttgagcgagcacggagccgttggcgtcgaggatacgcccacgcttggcgctcaacgtcacggtcagggtgcggttagccgtggccgcttgtgcggtttgacggccgccgatgagctgggtggaggccagctgaatcacgcatgccgacgccaccaacgccaatgcggcgccgatggcaatgcatttgaacgcgaaggtcttgaccttggcgaactctacgatgcgacgaatggtgttcactgggttccgcctttgttggactggtatccgcttaagtcgatggacactgatccttgctgcgggaccatgcccatgtcgctggccttgtcgggcaggttcgcgactaattgatcgagtttggcctgatcgtcttcgacatcttgggtaagtctgttgatattggtttcgatctgtgccgcctcaaacgagttctgcaccatctgggtacgcaacatcagcgcgccgaacaaggtgccgacgaggaagatcactgcgatggccacgtgcaccagcggtgcgcttcttgttctggtccattcgatgacccgtccgacgacattgccccgctcgtctccacgcgggttggagaccacccgcagctcaggtcgggaggaggactgatgcttggtgtgcggtcggttcgaggccggagccgcgttcgatcgaatgttacgtgcggttgccatatgccgttatcccctccttgtacgaattcgcgctgtgtttttggctctgcccggagacgcggagccttgtatcttgacgtcattcaggccctgcgcggtttgcgtaaagcgtttcctccatcgtgacggaatctcacggctgacttccaccgcccgcaaccgcaccgaagccgatctcgggttggctgcgatttcatgttcgtcggccttgatggcacctcgcgtgagatccgtgaaaaacggttgggcatccggcggtatgacaggcagaccagccggaacatccactcgcagcccttgtgccatgaacgatttgacggttttgtcttcgagcgaatgataggactccaccaccagtcgtcccccgacatgcagtcggttcgcggcttgcggcaatgtggaggcgagcttgtccaattcgccgttgacttcaatgcgcaacgcctggaagacgcgtttggcgggattgcccgccgggcggtgggcttgcggcaccacttcatcgaccagacggttgagctgtgcggtggtggtaaacggctccttgtctcgacgtgccacgatggcgcgggcgatctgacgcgagaaacgctcttcaccgtattccttgaatatacggaccagttccgccgcatcataggtggcaagaatccgttcggccgtcaacggctggctgacgtccatgcgcatatccagcggcgcatcatgcgaataggagaagccacgatcggtttcgtcgatctgcaggctggataatcccagatccatgaatacggcgtccacacgttctatgcctcggtccgtcaacacctgatcgagctgatcgaaggcggcatgcaccgggatgaatcgatcggcgagcccctcccgttccatgcgttcggtggccagccccagcgcttcactgtcacggtcaatgccgatgagccgagcctgcggcgcggctttgaggaaggcgatggaatggccggcaaggcccagggtgcaatccgctgcgatggcgttctcatgttccagggcaggcgccatcaggttcacgcaatcgtccagcaataccggcagatgaatattcgccacatcaaccatcagaattccacctccggcaacacatcgtcagcaatatcggaatatccctcttccttctcggcgaggtaggactcccacgtgtccttattccacagttcggcacgggtgccaacgccgatcaccacgacgtcggaacccagattggcgtaatcgcgcagcatctgcggcaccagcacgcggccctgcttgtccggctgctgatcgacggcaccggaaaggaacacacgcaggtattcgcgggcggctttgtttcccaccgacacacgctgaatctgcgaggcgatacggcgaaattcatcgaacggcagcaggtacacgcaccgttcctggcctcgggccatgaccaggccctgccccagctgggagcggaatttggccgggagcgccatacggcctttggcgtcgatcttcggcgtatatgtgccgagaagcagcggcggcagaccagccatgagatcagccatagtggtggagccttgtgcgttggcatcagcgtcgcgaatcgtctgatcggcaaccatggctccacctccttcatcgttacgtgggatacacttcggccaactggttcaccactctaccccacgattccccatttctccccactcatgcacgatttgctcacccttttagggcaattaccgatggattgcgcgtgtcggccacgactgtcgcacgaatgggcgctccgcacatccaatccacgttgcgcactccaccgaccgagcagcatggcgaattcacgctgaattcacctattccgggttgtccgcatcactgacgtagggggtgtgcggtaaatttgaatgccttgagttttttctgccccacggaaatggaacgaagagaacagcatgtcgagttacgcctcccagctgcatgaggagcagcaggccgtcgatcgcgcctatggacgattggatgatctgcgagccgaaatgtggcaacgcctggacaccgtacgcgccgccggctcccacggatcccccacgcaacgcagcgaacgagactcctttgccacaatgtacgaaaaccgcctcacgcaattgcgcagcgttgaggatcggctggtgtttggtcgtctcgacgccaagaacggcgaccgtcattacatcggccgcatcggcctgtcgagcccggaccatgagccgattctgaccgactggcgtgccgaagccgcacgtcctttctatgaggcgaccccctccaatcacggcgacatcgtgatgcgcaggcatatcaccttgagtttccgcgaagtcgtgggcgttgaggatgaggtgctcgacgtgcattccgaccaagtcggccaggcgtcttccgccggcacgttgaccggcgagggtgcgctgctggcttcgctgagctcacgccgcaccggcaagatgaccgatatcgtggccaccattcaggccgagcaggaccgcatcatccgctccgacatgaatcgtgccgtggtggtgcagggcggtcccggcaccggcaagacggccgtggcgctccatcgcgccgcctacctgctgtacacgcaccggcgcacgctggaacgttccggcgtgctggttgttggccccagctcggcgttcctgcgctacatcgatcaggtgctgccctccttgggcgagaccggcgtggtctcacgcaccatcagcgatctgattcccggcatcaccgccacggcggtcgactccccttatgcagccaagctcaagggcgatcgacgcatgacctccgtagtggccaatgccatcgccgcgcgcgtgcgtgttcccgctgttctgccgacagtaaccattagcggcattcaggtaccaatgctggccactgatatcgagcaggcgcaggcggacgcgaagcgcacccggcaacctcataacaaggcccgcgagacctttatccgttcgatgctgaccagcatgcagaaccgttatgccgaacagcttgattacacgccggatcaggcggagctgaaccgcgcgatgtcgttgctgcgtatgaacgagcaggtgcgcaagaccctgaacctgtgctggctgccgatgaccgccccatggctcatcgatcagctgttcgcccatcccgaacgtctgaagtctctggctggttggctgaccgacaacgacatcgcggcacttgcccgccccaagggctccccgctgacccgctccgatattccgctgctcgacgaagcgatggatatgctgggccccgatcccaagacggtggcccgccaatccgccgccgacgcacgtcgtgccgccgaagagcagtatgccaaagacacgctggccgcgaccggtctgggtggaggcatcgtctccagtcagatgctgctcgaccagatgaacggggacgacgccgagctgaccgcgcagcgggccgcggccgaccgtgaatggacctacgggcacatcgtggtcgacgaagcgcaggaactgaccgccatggactggcgtatgttgatccgccgttgcccctcccgctcgttcaccatcgtgggcgatgtggcgcagacctcggcgctgggtggcacccgacgctggagcaaatcgatgaaccgcctgttcggcgaaagccactgggatctgaacgagttgaccatcaactaccgtaatccgcaggaagtttccgaactcgcctcacgatttgccgagaaggaaggcctctacatctccacggtcaatgcggtgcgcaccatccccgattcggtgtcccgcaatgtggtgcccgacatgtcgtccttgctggaaacgacggccgagcaggcggcgcagcttgccgaacaattcgtttcggcagacggcaccggccgcatcgccgtcatctgtccggatgatctcatcgccccggtgcgcgacgccgtgcgccgcaaactggccgccgttcttgacccggccgaatacgcaaggctcatcgagcagcccgaatgggatgagcaaatcagcgtctgcggcaccgaaacggtcaagggtctggagttcgatgccgtcgtggtggtcgagcccggtctcatcgaggatgacgcgccgagccgcctggtcgccgcctcggacctgtacgtggcaatgaccaggccgacccagaaactggttatagttcggacaagaacggacgaaaagtccctgaacatctaaggtatgaagcatgcccaaagcactgttattggaaaacattcaccccgacgcggccaaatcgctgcgtgatcacggtttcgaagtcgagaccatgaagggagccctgagcgaggacgaactcatcgacgcgctggatggcgtggacttggtgggcgtacgctccaagaccaacgtcacagcccgcgtgctggatgcgcgtcctacgctaagcgccatcggctgcttctgcatcggcaccaatcaggtcgatctggcacatgccggcaagcgtggcatcgccgtgttcaacgccccctactccaacacccgttccgtggtggaattggtgatttgcgacatcatctgcttgatgcgccgcattcccgcacacacgcatcacatcaagcatggcctgtgggacaagtccgcttccggctcgcatgaagtgcgcggcaagacccttggcatcatcggctacggcaacatcggctcccagctgtcggtactggccgaggccctcggcatgcgcgtggtgttctacgacattgaggagaaactggcactgggcaacgcccaccgttgcgataccctcaacgaactgctggaacagtccgatgccgtgaccctgcacgtggatggccgcaagtcgaacaccggcttcttcggcgaagaccaattcgcccacatgaagcaggacgcgattttcattaacctttcgcgcggtttcgtcgccgatctgggagctctgaagcagcacctcgattccggccatctgtctggcgcggcggtcgacgtgttccccgttgagccgaagaagagcggagatccgttcgagacctcactggccaacgaagacaatatgattctgactcctcatattggcggctccaccttggaggctcaggaatccatcggccatttcgtctctcagcgtcttgaggattactggttcaagggttctacctcattgtccgtgaacctaccgcagatcaacctaggtgaacgcaagggcgtgtgccgtatcgcccatctgcacgacaatcttcctggtgtgctggctcatgtcaatcgcgtgctcggcgaagagaacatcaacgtttccttccagtcgttggccaccgaaggcgaacttggctatgtggtcaccgacgtggctcagaagcccagcgccgccacgcttgaagcactacgcaacatcgagggcaccgttcgcatgcgtgtcatcagctgacgcagctcatcctcgattgatatgaaagagacccgtcgctgacgggtctctttcataagtgcagggcttcatgattggttcgcaccatggtttgcgaatcactcgcatatcacggtgcatggcattcgcatattattcacgcaaaccatcaatggcgctttggaaatcctccagacctgcaaagttctgatacacactcgcgaatcgaaggtacgccaccacatccaagtcacgcaacggtttcaggatggctttgcccacttcatctgaggtgacttcggcaaggcctcgggagcgaagatcctcttcgactttctgtcccagcagcttcagatcctcttctctgaccggccgcccctggcaggctttacgtacgccggaaatcactttgtctctgctgaatggctccacgccacccgaacgtttagtgaccagcagcatactggtttccaccgtggtaaaacgcttgttgcatttcgggcatacgcgacgccgacggatggaatgaccgtcatcgctaatgcgcgtatcaataactttggtgtcggggttctggcaaaaagggcaatgcatgctctccagaataacgtgtacgggcggaaaaaccatgccgctcgggtttcatttactcaaccggaacaataatgcgctgcccggcctgcaatgttccggactcgagattgttcagcgtaatcagctcatccactgtttccgatacatcatggccagcaggtgtaatagccgaagcatatgaccagagcgtatcccccggccgcacgatatagctggtcacctgcgtggcacccgtatctgattgggcccgctgagcggtaagcgcgccgaaaccacaccaggccagcgccaaggcgatcatcactgcgataatccgcccacgcacattccggcgggacgttccagcatgctgcatagctacacgtgcgctacgggccggggccatcaccattgaaccagtcatcacgaccacctctctcgaacagatgttctatcgaacaactgttcttataatggcacaaatgttcgacatggtcaagtcgaagctcgaacagatgtttgatttcacacgaacaacacgttatgctggtgacataacgaaaggagccctgacgtgagcaccattcccctctcccccaagcagaagccggacgagtccaccctgaccgaccgccagcgcaaagtgttggacgccattcgcacgcatatcgacgaacaaggctttgctccctctttccgggagatcggaaatgccgccgggctcaaaagtccgtcttcggtcaagcatcagctacaagttttggaagacaagggcttcattcgcatgaacgcgaacaagggtcgcgccatcgaggtgatggcaggatccgccccgaatgccgaaaagccatcacaagccagcgaagaggcaaccagcgccagcaatgtggcggagatataccaattccccgccgaagccattgccgaatcacatgacgtaccgctcgttggccgtattgccgccggcgtgccgattaccgccgaacagcatgtggacgacgtcatgcgtctgcctgaacggctgaccggctccggcaccctgttcatgctggaagtccacggtgattccatggtggatgccgctatctgcgatggcgactatgtggtggtgcgcgaacagaattccgccgtcaacggagatatcgtcgccgctctgttggatgacgaggccacggtgaagaccttccgcaaggaaaacggccatgtctggctgatgccgcacaaccccgcatactcgcccatcgacggcacacatgccacgattatgggcaaggtggtcaccgtactgcgcaaattatagcctgttcgccaccagctgatcagcgtgcgctgaatcgcgctggtcgtgctatagtcgcacactgcttacgaaaccccggcctcgcgccggggtttcgtcgtattcagaccatatcgcaaatggtattgagaagcggtttcaactcgatagagcgaaggagtacacatggcccatacccatacacccgcaccatccacatccgtaaaccctgccgcgcaccagcgcaggctgattgccacgttgaccgtcactggttcggtcttcctcatcgaagtggtgtcggccgtcttaaccggctcactggccctgctggtggatgccggtcatatgctcaccgacatgtccgtgctggtggcatccacaatcaccgccatactgatgcgccgcaagcccaacaacactcgtacttggggctgggccaggcttgaggtgctcaccgctgccgcgggcgccgtagtattgcttatcgtcggcatctatgcgttggtagaggccggcatgcgtctgttcggcggctccaaagcggaaatcgacgatatcggcttgctgctgttcgtaggcattctgggtcttgtcgcaaatatcatctcgatcttcatccttgcctcgcagcgcgaagacaacatgaacatgaaggccgcgttcctcgaggtaatgaacgacgcacttggctcggtgtctgtggtggcctctgccctggtaatgatctccaccggatggaatggcttcgacgccgtggccggtgccgtcatcgcactgatgatgattccgcgcgccatcaagctgctgcacaacgcggtcaaggtgctgctggaggaaacaccggatggtcttgatctcgataaggtacgcgagcatctggaagacgtgccgcatgtgcttgccgtgcatgacctccatgccagcacggtgtccaccgacatgccgattcttatggcccacgtggtagtcgacaaagacctcaccatggaagatgccgccacaatcctcacccaactgcaggattgcctgcgcgagcacttcccggtctcggtcccccacaccaccttccagcttgagcccgagggctatagctccccctcctccaacgaattccacgaataaaaaatgctccctctggaagcattcagcagggtataaaaaaaaatcgctgtacgtgtgcgatttttcgtgccgcacaaggtgaaggcctacaaaggtagttcgaaccttgtgcggtgtgaaaggcgctccgtacagcgattttttatcagaagccgaactgggcggcggtttccttcagcgtctcggcggagcgcttcagagcggcgagctccttgtcggagaccggggtgttgatggtgttgttgacgccctgacggttgaggagggtcggcacggacatgcagatgtcggagatgccgtggaagtccttgagcatggagctcacgggcaggatgcggttggtgtcgtgcaggacggcttcgatgatgtcgacgccggacatgccgatggcgtagttggtggcacccttaccgttgatgatcttgtaagcggcgttcttgacttcctggtggatctcctcgcgcttggcggcgtcgagcggatcgtggccgggcagcggggtccagtcgcacatggggacaccaccgatggtggcggactcccacagcgggacttcggagtcgccgtgctcgccggcgatgtaggcgtgcacgttcttgacgttgacgccggtctgctgggcaatcaggaagcgcagacgagcggagtccaggttggtgccggaaccgaagacctggttctcgggcagaccggtgagcttctgagccacgtgggtagcgatgtcgaccgggttggtgatgagcatgtagatggcgttcggagccaccttgaccaagttcggcatgatggccttgaggatgttgacggtagcgccaacgagctcaagacgagactgacccggcttctgacgcggaccagcggtgatgacgaccatgtcggcgtcgcggcagatctcaggatcgtcggaaccgtcgatggacacggtcgggtagaagctggagccgtgctgcatgtcgagcacttcggcttccacgcgctccttggcgatgtcttcaagcacgatctcgcgagcgacgccacgctgggcagcggcgaaggcgagggtggagccaacggcaccggcaccaataacagcaagcttcgtgggcttaacggtagtttccgccatgatggatgaacctctcttcaaaggcggtctgctgatgaatggcaggccttgtaactaacggttttcactctataaacccgctaagacgttttgctaccagcacaccaccctgtctgataacggtatggtaatgtttccaacggttgttagcgctcacaaacaaactgtgatgtttatcacgttaatcaatggactgttcgaccacctgagcggcaagatgggcgtcgacgtccgcttcaagctgtatgccatcatcgcggtactccaccttgtccaccttgccgtattcgcgtacacgagagatcagggagccagcggtatacggcagcagagcgttgacatgcacatgcgggaccggcagcagactttcgaccgcggtacgcagctcgtccaatccctcaccggtataggcggagacgatgaacgcatccggctgcagtgcggcgagtcgttcacgtgtcgcctcgtccgcctgatcggccttgttgaatacgagaatacgcggaatcgaggccgtgccttcgatgtccgccaacacgtcattgaccgcgtcgacctgagagaacgggtcagggtgggagccatcgaccacgtgcaggatcacgtcggcctcggccacctcttccagggtggatttgaacgcctcgatcagctgggtgggcaggcggcgcacgaagccgaccgtgtccacgtaggcgtaagcgcgtccgtcgcgggttttggcgcggcgcacggccgtgtccaatgtggcgaacagcgcattttccaccagttcggccgaaccggtcagacggttggtcaacgaggatttgccggcgttcgtgtagccgaccacggccactgtgggcaggccgaagcgacggcgtgaaccgcgcttgacctcacgtgccggggccatctcacgaatctgacggcgcagtctggcgatacgcgtgcgaattacacgacggtccatttcgattttggtctcgcccgggcctcgcgatccgatgcccgcatccgcgcctgccgcgcgaccgccggcctgacgggacagcgaaccaccccaaccacgcagtcggggcagcatgtattcgagctgcgccaactccacctgcgccttaccttcacgcgaggtggcgtgctgggcgaagatgtccagaatcaccgcggtgcgatccaccaccttgactttggctgcgtcctccaatgcacggcgctgtgacggcggcaggtcgtcgtccacgataatcgtatcggcttcctcacgcgccacgatgtcggcaatctccttggctttgccggaaccaacgtacgtggctgcatccggcttggagcgatgctgcagcaaaccatcgcataccaccgcaccggcggtttcggcgagcgccgccaactccctcaacgattcctcggccttggcttgcgtggtgacggcggacgaccagacgccgacgagcaccacacgttccagtcgcaccttgcggtattcgacttcggtgacgtcctgcagctcgccgagaccggcgacatgcttgagctcgttgcgagcctcgcgctcctcccattcctggttggcgtcctcgtgccagccggtcacgcgctggctgtcgtcgagcagcacttcggactgcccggccagcacaccttcaggggtaacgtcgttgttgccgcggtcgatgtcggtgtactgggtgttgtcggtcaagtgcgcctcgtttggttggaatggttcacgattcttctatggtcctttattatcatcacatgaggtgacatgctggcatagatcggcacgtaccggcataggccggctgatacaggtcggcatacgagagcggcgaatcccgcagaaatggagcgaccatggcagaacagtatttctctgcggaacccgcgtcgaaagatgtgcgccgcacattgaacgtaacgttgcgcggccatgaggcgaccgctcaggtgtcgaacggcgtgttctccggctcgcgcgtggacctcggtacatcggtattgctgaagcatgcgcccgagccgccgcttaccggcgatttcctggatttgggctgcggctggggccctatcgccctgacattggcgtttgagtcgcccgaagcgaacgtgtgggcggtggatgtcaacgagcgcgcgctggacctgacccatgccaacgcacaggcgaacggccgcacgaacattcatgcggctcaggtggacgagtccagcactcccctgcccgccgagaaccagccggcgttctgcgagacggtgccgggcgacctcacgtttgatgcgatttggtcgaatccaccgattcgagtcggcaaggaagcgctgcatacattgcttatggcttggctgccgaagctcaaggtgggcggcgccgcctatctcgtagtgcagaagaatctcggctccgattcgctgatcccctggctggacgatgcgctcggcgaggggttcactgcgagcaaatacgcgagctccaagggcttccgtatcattgaagtccgtcatgaaatatgagtatcctgcagaacttcccgtatctgccgcgcgtgatgagatagccagcgcggtcaaacgttcccaagtcgttattgtgtccggccagaccggttcgggcaaaaccacacagctgccgaagatcctgcttgagcttggccgtggcacgcacggcaagcagatcgtgcacacccagcctcgccgtatcgccgcgcgcacggtggccgaacgtatcgcctcggagatgggcgtgaagctcggtgacgaggtcggctatcaggtacgtttcaccgacgaaagctcgcccagcacgcgattgagagtcgtgaccgacggtattctgctcgcccagatccagcgcgatccgaaactcacccaatacgatacgatcatcatcgacgaggcgcatgagcgcagtcttaacatcgactttctgctcggctatctgacggcactgctgcctcagcgccgcgatctgaagctcatcatcacctccgcgaccatcgattcggtcaagttccaggagcatttcgagcacgccttgcatgagaaggtgccggtaatcgaggtttccggccgcaccttccccgtgcaggtggtctatgagccgcttggcaccgcgcccgcgttgatgcgcgaagtgccgggattcgcggtgggcgcccgccccggcgacgccgattacgacgagctggccagcgccatcgcggaatccgattccgaccggccccgcggccggtccggcgactcctatgccgatgacggcatcaccgatatgcccacggccgtggctcgagcctgcgccgaactggtgatccactcctcccatgagcgcggtccccgcgatattctggtcttcgcttccggcgagcgcgacatccacgagttcgaggccgcactgcggcatcattacggtccgcgcgccgacgacatgcgccgaccggacgccatcgagatcatgccgctgttcgcgcgattgtccgccgccgaccagcacaaggtgttcgaatcgcatttgcatcagcgcatcgtcatcgccaccaatgtggctgagacctcgctgaccgtgcccggtatccgctacgtggtggaccccggttccgcccgtatctcccggtattcgaagaccgcaaaggtccagcgtctgccgatcgagccgatcagccaggccagtgccgaccagaggtccggccgatgcggccgcgtggccgacggcatcgcgatccgcctgtattcgcgtgaggattacgagacccgaccgcgcttcaccgagccggaaatcctgcgtacctcgctgggtgccgtggtgcttcacatgctgtcggtgggcgtggcccgcacggccgaggacgtcacgaacttcgggttcatcgatccgccggatatgaaggccgtgtcggacggtttcaatgagctcaccgagctcaaggccatcggccgaaagcgcggcgaggtgacgctcacccataccggccgtcagctggcgcgcatccccatcgacgtgcgtctgggacgtatggttatcgaggccgcgaaaaccggttcgccgaatcttctggcccaggtgctcgtggtcgtggcgttcctgagcttgcaggacccacgtgaacgcccggacgacaagcgtgaggatgccgaccgtatccacaaccgatatgcggatgagacttccgatttcctgacggccctgaacatctgggatcgcgtgttccaagcggacggcgacccgagcaacaacgcgctgcgccgtatctgcaaaaccgagtatctcagctggctgaggatacgccagtggaaagatctcgtctcccagctacgccagatgtgcaaggagctgaagttcaaggtcggcgacccgttgcccgcctcccgcccaggcttggagattcgccagctgccgttgaatcagcaggccgcgcattcgctgtgctgctcgtgggatgcggatggcatccacaagtcgatgctcgccggattgctgtcgatgatgggcatgcaggtggtgcgtgagcccaaggcctccgatttcgcggggctgaccggtgcggcgcgcgcccgtgcgatgaaacgcgcccagaagcagtcgaagaacgattatcagggcgcgcgcggcacccgtttcgccctgttccccgcctccgccgtggccaagaagaccccgtcatgggtgatgagcaccgaactggtggagacctctcgcctgtgggcccgctattcggcggccatcgacccggcgtgggccgaaccgttggccggccaattgacccgcaccacgtatgcggagccgcactggtcgggttcgcgtggctcggctgtggccaccgcgcgcgtgctgctgtatggtctgccgatcgtacaggaccgtgccgtgcagtggggacgcatcaatccgcttgaggcgcgcgacttcctgattcgccagggtctggtcgagggcgatattcagcagcgcttcagttacgacgactttgtgggcaaaaaccgtgacattctcgaggatgccgccgatgacgcgagccgcacccgccagctggcggacaccgtgtccgacgaggatctgttcgacttctacaacgcggtcattcccaacgatgtgaccagcgtggccgatctggcgaaatggtggaagtccgagcatgaccgtcagccgaatctgcttgatttcgacccggccaaggtggagcgtctggcatccagcgattcggtgagtctggacgattaccccgaccattggcatacgaccggatcggacggccaacccatcgacctgcgtttgagctacgtatacgatccggccgacccggccgacggcgtcaccgtgcatgtgccgttgaaggcgctctcgcgtatcacgcccgaccagttcacatggaatgtgccgggcctgttggatgagctgattctgtcgatgatcaaggcgctgcccaagcagctgcgcgtccagttcgtgccggctccggatgccgcgcgtgcgattcgtgactggatcgacgagcattacccggatctgccgggctcgggctcgcagcagaagccgaatctgccgccggtggatgaggatggcacgaccgttggctggcctgatttggcacatgtgttcaccaaggcggccatcgccaccaagggtgcgcagattcatcccgaagtgttggggccggaactggtcgagcgtctttccccgtatctcagggtcacgttctcggtggagcagcaactgccggccggcaagcaccctcgtggacgccggcatgcgcgcggccccgtcaaggtgctgggtgtgtccaaggatctgaaggcgctgcaacgcaagttcgccgcgcaggcggaggcgtcggcccgtcaaatggtcaagaagcaggccgatcaggctggagaacagggcaagctggtcagtcaggcgaacctgttgcataaggcgggtgccaccaccgagtcccgggccacgatgctctggcgtggcgcattggatgcgctgcggttgccggccgaacgcatttcgtcgcgctggctgggtaccgaggcgttgatgctggcttctgctccgtacaagttcaccaaggatctggtcgaagacctgcagctggccacggtcaaacggctgatgccgaatgtcgacaggctctcggacgatgaggcgttggccaatgcggtgctcgatgtgcgcgaagtgtacgaggacaccgtctatcaggtggcgcatgacgtgatcgccgtgctcaaggcttatgccgaagtcgacaaggccactggcggcaaggccgatctgccgatgctttcggtgctgcagtcggtgcgcgagcacatcgccacgctggtgttccccggattcgtcggcgccgctcccccggacgcgctggcgaacatctcccgatacctgcaggccgatctcatgcgcctggccaaggcgaagaccgacaagaaccgcgacgtgcgatgggcgtgggaggccgacgaggcccgcacgctggtcgacaaggcgatggccaaggccaaggcggagccggccggcccccgccacgagacgctgatgaagcaggcgaccgccgcccgctggatgctcgaggaattctacgtgtccctgtgggcgcaggaactcggcaccgccaagccggtgagcctgcagcgcatcaagaaggcactggcgtagcgatggcgacgacgcaacggcgcaagccggccaatccgcgcggcagggcgaacgtgattgtcgcggggcggggcgtgtcaggcggcaatcgcaaacgtcgcccgggcaaacgcccgcgcaatcgcaggtatccgctcagcccggcgcgctggtggaagcgggccgggttggcgcagcgcgtcgcggctgtgctggtcaccgtggtggcggccgcatgcgtggtcgcgctggtcgtgggcactgtgcgggtcgtccagtggcgtcgcgacgtgcaggaggccgaggcccgccagctgcagctgacgcagcaatacgacttcaatcccggcgacatcatctcggacggccagttcttcaacgccaatgcgatgagcgaggccgaggtccaggcgttcctcgacaagcagggcgcggcgtgcagcggttcccggtgcctgaaaaccatgaccttcgacaccgaggaccaggcggcgaacgagtattgcgcggcgtacgagggcgcgagaaaggagaccgcggccgcgatcatcgacaagtcggcgcgcgcgtgcggcatcagccagaaggtgctgctcaccgtgctgcagaaggagcagcacctggtcacggccgtcgatccgacggacttccagtacaaggccgccatggggctgagctgcccggacaacgcgaactgcgatccggcctatgccggcttcttcagacaggtgtacggggcggcgcaccgctaccaatactatgtggcgcatgaaagcgcctacggctatcacgccaacgcgctgaactacatccagtaccacccggatgccgggtgcggcggcaccaacgtgtacatcgagaacaaggcgaccgcgctgctctacatctacacgccctaccagccgaacgacgcctcgctggcggccgggttcggcgagggcgactcatgctccagctacggcaaccgcaacttcgccctcatatacaccaactggttcggtgccgcgcgccgataggggcgggacggcaaaaaaccgaaaccacggtaaggctaggtgtcatccgcgccgtcgccgccccgccgcacggccggagaaccggccggatgacgagcggcacggctcacaggtcgatcttcggggaggcgtcgagcagggtacgcgtgtactcggccttgggatggttgagcacgcggccggtctccccgctctccacgacgcgcccgtggcgcagcaccgtgatcacatcggacatctcctgcacgatgcccaggtcatgggtgatgaacaggcatgcgaaaccgtgctcgcgctgcagccggcgcagcaggtcgagcaccttgcgctgcacggtcacgtccagcgacgacgtcggctcgtcggcgatgagcagcgacgggttgagcgccaaggcgcgcgcgatgccgacgcgctggcgctggccgcccgacagctggtgcgggaaccggccggccacatcggcgggcagctccacctgatcaagcaattcaaggacgcgcttgcgccggtctgtctcgctgagcccgccctgcacgagcatcggctcgccgatgctccatgccacggacttgcgcgggttgagcgccgatccgctgtcctggaacacatagcccatatgcttcaggatctcgcgcttgcgcctgccatgcgccttggcgagatcctccccctcgatgagcaccgtgcccgaggttggcgcgagctggccggagatcaccttggcgatcgtggtcttgccggctcccgattcgcccaccagcgcgcgggtcctgccggccaccagatcgaacgagatgtccttgacggcgaagctgccggccttgtacgacacggccacgtcgttcacctgcgtgatgcgcctgccgccgccgagcgcgtcactttccgtgatgcgttcgccgccggccgcatgttcgccgtctgccgcatgctcgtcgatgcgcaggcgcggcacggcgtcgagcagcatccgcgtgtagtcgtcggacgggtggcggaagacctgcgcgacgctcccctgctcgacgatcacgccgttgtgcatcacgtacacgtcctgcgcggcctgccacaccacgcccatgtcgtgggtgatgagcagcacggccagatcgaggtcgaccgccagcgaggagatcagggcgagaatcgccttctgcgtggtcacgtcgagcgcggtggtcggctcgtcggcgatgagtaccttgggtcggttgatgatcgccatggcgatcatcacgcgctgcagctggccgcccgacagctcatgcgggtacgacgaccacacgcgttcggcgtcgtcgagcccgacctcgcgcagctgttcgagcaccttggccttgcgctcggcggcgctgagctgcttctggtggtatttgagcgattccgcgacctgtacgccgagcgtgaacaccggattgaacgcggtggacggttcctggaacaccgtgccgatgtattcgccacggatgcgttgcagcggcgcgtcggcggccagcagatcgatgccgcggccggcggcgtccttgccgtcgccgcccggaccggagtccggcccgtcatccacaagggcgtcgtcgaggtacgcgtggcccttcacgctggccaccgacggatcgagacggggcagcgccatcgccgtcaccgacttgccggagccggattcgccgaccagagcggtgatgcgccccgggaacagcctgaggctgacgccgtgggtcacctcccgctcgtcgaagctgacggccagaccgtccacggtcacgatcgcgcgtggttcactcattggaagctccttggatgcacaagcgttggaatgcgtccggcgcgcgcgccagcggaccatgccgccggcgcgcgccggatgcggatgccggctcagttcgcgctggcgagcgagacctgcgtgtagtccgggtacgccgggaagttgccgatgacgaagttggtcacgttcgatccgtggatgaacgtgttcttcgaatagatcagcggcacgaccggcgcgtcggccatgatcgtcttgtcggcctcggcccagatcttgccggcctcggtctgatcgatggtctcggtggccttcttgatcagctcgtcgaccttcgggttcgcgtaacgggccaggttgtagttgccgtggccgatctgcgaggagtcgaacagcggggagatgttggcgtagggcgacgggaagtcgggctgccacgagctgatggccagatcgtagtcgcccttgtcgttggtcagcgtatcggaatacacatcgtcgttgagtgtctggatgtccaccttgacgccggcccgcttgaggctcgtctggatcgaggaggcggtttcggcctgagcggaggtggcgatgagcttgagggtcggggcctgctcgcccgactccttgatcagctgcttggccttgtccacgtcgccggtcggatcggccttgtacaggtcgtagtcctcgcggccctcgatgccgggcgtaatgagcgtggtggcgaagttgccggcgatctcgccgccggaagccgtctggtaggccttcttgtcgaccgcgtactgcagcgcttggcgaatcttcgcgttcttcacgtgttgggtgttgatggcgaggtattccagcgcgccgtcgccgctggtggtcagcagcttcttgtagttcgggttggcctgcgcctgcgcgagctgcgcggccggcacgaatccggacaggaacgagttcttgccttcaccggtgccctgcatgatcgactgggcggccaccgaggtgtcctgtcccatcttgaacacgatcttgtcggggcccgcggtgcgcaccggatcggtcttcttgtcccagtaggtgttgcgcacgaagacggcctgcttgccggcctcgttcgactcgaccttgtacgggccggaggccaccggcagcttgccgtagccggacgccgggcccttgccgtcgggcacgggggtgaacgcggcgagcgagacgacccacggccagtcgccgaacggcgcgttgaggtggaagatgatggtcttgtcgttcggcgtctcgatggagctgagctcctggccgtcgaacgggccgtggtagtcctgcgcgccctcgagcagcgtcttgtggtagctcaggccgccggtcagcgagtcggcgaaggaacgctccagcccgtacttgacgtccttggaggtgatgggcgtgccgtcggagaacttgagcccgttcttgagcgtgtacgtccacgtcttgccgtcgtcgctcgacttgccggtgtcggtggccagatcgggcacgaccttcgtctcgcccttgtcggtgatcttccacgcggtcaggcggcggaagatgttgccgttcgtggtggtcggcagaccctggctcttggccgggtccagatccatctccgtgctggacagcagcacgttcagcgtgccgcccttgacggtggtgccgctcgccgagccggtggcggcgttgtcgttggacgcgccgcagccggacagcgccagtaccgcggcacaagcccccgccgcgaatacgcgccatgcgttgttcttcatgatggttttcctctctatcggtgccggtccgtggagcagaccggcaagtatcgcgtgttgcggccgcagccgcactacttcgtgccgagcgcgaccctggggtcgagcaggctgtagcagatgtccacgatcaggttggcgacgatgaccagcacggcggcgaacatcgtcgcgccgaccagcacctgcaggtcgaggttcgacacggaatcgagcagcagcgagccgagcccctgcatcgagaacaccttctcggtgagcaccgcgccgccgagcagcccgcccagatcgaggccgaacatggtcatcacgggcagcagcgcgttgcgcagcgcgtgcttgaagatgatcaccgattcgggcacgcccttggagcgggcggtgcggatgtagtcctggctcagctcgccgatcatctgcgtgcgggtgaccctggtgtagccggcggcgctgagcacggccagcaccagccacggcagcagcagatgcgtgaaccagccgacagggtcgtcgtggaagttcacgtacccgccgctggggaatatctgcagcaccagcgaaaaggcgatcaccgtcagcaggccgatcaggtatgacggtgccgaaacgcccacgatcgacagcccgagcagcgtgcggtcgatcagcgtatcgcgcttgagggccgcccacacgccggtcgccacgccgatgaccagccacagcacggccgcgccgaccgcgatcgacgcggtgatcgggaagcggtcgaggatcagctggctcaccgattcgttgagacggaacgaatacccgaggcatggtgccgagcagaccacggcgccgccgccgctgccgaaggtgcgcccgacgaagatgcccgccacgtaattgcccatctgctcgtaccacggcttatcggtgcccatgaaggcggagacccgctgcagctgctcgggcgtgcacggcttgccgcacgacagctgcgccggattggtcggcagcaggaagaagatcaggaacagcgccagcgtgatgagcaggatgacgacgatcgagctcgccacgcgcttgccgatgtattgcaggattctcatgcacgcacccccttgcgtgggtcgatggcgtcgctcaggccatcgccaagcaggttgaagccgaaggtcagcaggaacagggcggcgcccgggaagatcagatacatcgggtcgaccagtgcccactgcacggcgtcggagatggaccggccccatgagggcgtcggtgggttcatgccgacgccgaggaacgacaggcccgcctcggcgccgatgcgcccggggatcgacagcgtgatgttgacgatgagcagcggcatgaggttcggcaggatctgatgccacagcacatgggcaggcgaggcgcccatcaccttggacgcgacggcgaaattgcgcttgctcagcgtcagcgtctgcccccggacaagacgcgcgatgccgggccatccgaagaatccgagcactagcgtcagcagcaccggcctcgggaagccctgcggcaccaccgccgacagcgcgatcgcgaagatcaggaacgggaagccgaagaagacgtccatcgtgcgcgagatcagcgcatcgaccaacccggggaaatagccggccagcagcccgagcgccacgccgatgaccagcgagatgaccgacgagacgacgccgatgcccagcgagatccgtgagccgtacgccacgatggagaacaggtcgacgccgcgcagcggggtgacgccgaaccagtgccgggcactgatgccgccgccgaatccggccggcaccgacccggcacccaaggcctcgggatgctcggcgtacgggtcgttgccggtgatggccgacaacggcccggccagcggcgccagcagcacgaagaacagcacgatggcgccgccgaccactatcgatgagcgagcgccggaacggagaacgcgccgccgtctttccgccttcggcgcggctttcgccgtcgcatccgtcatattgtcatccccattttcacgctgaacataccgataatcatcaatccgcgcaggtgggcgcccgtgagccgggtccccctgcagccggtgtcctaacattaaggtttcgcagcaggatgacatgctgtggccttatcggttatttggatagcaggttatcaatggacggcaatcggcggataaggcatgccgcggggacatgcgggaaaaacccttcgttcccgcgcgtcacgccacccgtcattccccgaccgggctgacgtacggacgcagcagggtcgtggtgccgaccgcgagcagcgcgaaaatcgcgccgaccgggccgagccaggtcaggccaaggaggtcgttgaccaggccgccgaccgcggagccgatggcgatgccgatgttgaacgacatggaattcagggaggcggccagattcaccgaaccgggatgggattggtaggccacatccatatacagcacctgggaagcggaattctgcagatacatgagcatgccaagcgccaccagcagcagtgcgccgccggccggcaccagcgaggcgaaagccagcaggcacaggcagacggcctgcacgcagtagatcggtcgaatgtgggtcagcggctcgacccctctgccccgatcggccagcttgcctccgtacaggttgctccacaggcaggcacagccgtagaccaccaagccgacgctgatatagcgttcgggcacaccgatttcgtcgcgcatgatcggcgagagatacgtgtagaagacgtaggaggcggctgcgccaaagaccacatccgccacgccgagctggatgcggcggtcgaagaacagacggaattgcctcaggaaaccgatcttcgccggatgtgagttgcgtggcagagacactgccatcgatgccatcagcacggcggtgagcaccgaaaccaaggcaaaggtgacacgccagccgaaagtattggccacccaagtgccggccggtacgccgatcacagaggcgatggagaaacccgagaatacccaggcaatgaacttggtgcggtatttgtcggtggtcacgtcgggcgcgaaggtcatggagatggccaccagcgtgccggacaccgaggcgatgagcagtcgggcgatgagcagcaccggatagttcggcgcgaaggcgcacaggatattgccgacgaggaacacgcccatcaacgtcagataggtgagaaagcgcgggaatcgggcggataatgcggatccgagcggcgtgcagggcgcgtacacgaatgcgaagatggccaccagattacccacggtcacttcggagaccttaagtccggatgcgatgtccggcaggatgcccactaccacgaattcgctcatgcccagcatgaagctggcgaagatcaggatggtgaccggcagattgaagaagcggtcggtgcgcgcggtgttcgcaggtgtgttcgtcatgggtgctctcttgagtgctctcgctcgtactacaagctgattcgtcggttacgtcaatcgtttttcgtatcaactcagcgacaacactattcccacctctgcccgctacccaccaccacgacacgctatagaaaaccccgccgatgaccaatcatcgacggggttcggcacatgtgcaacgcttgcgattacagcttcggcagatacttcttcagctcgtaaggcgtgacttgctggttgtactcctcccattcctggtgcttgttgtccaggaagtagccgaaggcgtgttcgccgagcacgtcggccacgaagtcggatttctccatgatcttcagcgcctcgtccagcgagcgcggcagcggctgaatgcccatagcctgacgttcgccgtcggtgagctcccacacgtcatcactggtgggttcgcccagctgcatctgcttatcgatgccatcgagaccggcggccagcagcaccgagtaggcaaggtatgggttggccaccgggtcgagcgcacggaactccatgcgcgcggagttgcccttgcccggcttgtactgcgggatgcgcagcagcgcggaacggttgttgtggccccagcagatgtagcttggtgcctcattgccgccccacaggcgcttgtacgagttgacgtactggtcggtgaccgcgcagatttcggccgcatggtacaggatgccggcggcgaactggcgggcggtcagggacatgttgaactcctgaccggcctcgtagaaggcgttggaatcgccttcgaacaggctcaggtgcgtgtgcatgccggaaccaggcgcgtcggccaggggcttgggcatgaagctggcgtgaatgccacgctccaaggaaatctccttgaccaccgtacggaatgtcatgatgttgtcggccatggtgagcgcgtccgcgtatcgcagatcgatctcgttctggcctggccccgcctcatggtgcgagtattccaccgagatgcccatttgctcgagcatgttcacggtggcgcggcggaagtccatgcctgggctgcgcggcacatggtcgaagtagccgccctcgtcgatcggggtcggggccttggaccagtcgtcctggctttcgaacaggtagaactcgatttccggatgcacgtagaacgtgaagcccttgtccttggccttggcgagcgtacgcttcaacacgtgacgtggatcgccgagcgaaggctcgccgtctggggtcagaatgtcgcagaacatgcgggcggtaccttgcgggccaccgcgccacggcaggatctggaacgtcgcgggatcgggttgaacgatcatgtcgtcttcggacacgcgggtcatgccctcgatggcggaaccgtcgaagccgagaccctcctcaaacgcggcttccagttcggccggagcaatcgccacggacttcagtgttcccaacacatccgtgaaccacagacgaataaagcgcacgtcgcgttcttcgaccgtgcgcagcgcaaactcctgctgtttatccatagtcgcctatcgttccataaccgtgttacgaggggcgttaacatctcactgtttgtcacctgcgagtcgcgagatttcatcaacatgccccggtccgcatgtcaggcatggttcgggcccatgccggcacggcactatggtagtgactatgagcgaa

SEQ ID NO: 2090 - DNA, 5359 bp, Unknown
  R51_24m  MAG No. k141_897
acgcccgttcggaggcatccaggtcgtgctgtccggcgacttcttccaactgccgccggtttcggtgtccgggcgcaaccgcgacctcatcgcccccacccccgaattcatcgccagtcgcgaacggtatgcccgtgccgggcttaacccggaaggtttcatcaccgaatcattgatatggcctgaacttaacccggtaatctgctatctgaccgaacagcaccgtcaggacaccggcgagctgctgaccgtgctcaccgacattcgcgaaggcaacgtgacccagtccgaccgtgacgtgctcgtcacccgtctgggcaaactgcccgagcccggccaggtcgccgtccacctattcccggtgaaccggcaggccgacaatctcaacgacatgcgcctgaaccagatcatgcttgagccgcacgagttccacgccgagacagcaggccctgccaacctggtcgaccggctcaagaagaacatgctggcccccgagcgactggtactcaaggaaggcgcggctgtcatggccctgcgcaacgacaccgatcgccagtacgtcaacggctcgctcggcaccgtgcgcggcttcgcgcaggagaacaagggtggctggccgatcgtggaattcgaaaacggcaacatcgtcaccatgaaacaggccacatgggaaatgatggacggcgacaccgtgctcgcctccgtctcgcaggtgccgttgcgttgcgcgtggggcatcaccatccacaagtcgcaaggcatgacgcttgatcgtgcggtcatggatctgaagcgcaccttcgcgccgggcatgggatatgtggcgttgtcccgcgtcgaatcgctgggcggactgtatttgactggcgtcaacgaacgcatgttcctcgtctcgcccgatgccgtggtgctcgacggcgacctgcgcgaagcctcggcctcggcttccgaccagttggccgatgaaggtgcaagcgcgttcaaacccgccgagccggacgaattcggtgtcaatcccgatgatgacttcgcccaggacgcgttattctgacggtcgatatatcgaacgaccgctaatttgagtgtttctgcacttcgaggggcggattttgagttttcgggacatctacttccgtttcaaggggctgatgtccaagtagacagcgcttaaaaacggcggaatgacgttggtatgaagccgtttctatgtgcgattgagcggatgaccagcccctcgaaacgcaagtagatgtctccaagaggcggaatcggccccttgaagccgaagaagacactgcgaacttgtcttcattgaggaactgaacggctaccatggaataagaggtggtagttatggtgctatccgagatatttcgtggaaacaatgaggttcgcgaggccgcccgggccggtgtgcaaatcgatacggttagtgtggctagtgcgtcagatgcagcaagcgcggcagacggcagcggcaaaatcactggcgcaatacgtccgccagcggtggctggttcgttctaccccgctgaccgcacaacgctcaagcaactcattacccatcaattggattacagtcgagaggttctgcaacagttggagcccacgcttccagcgggagtgccaaaggctgtaatcgtgccgcatgccggttatgtgtattccggcacggcggccgcgcttgcctatgctttgctcgaacgagggcgggggagtgtgactcgcgcggtaatcgtgggaccgactcaccgtgtggccgtgcgaggcgtcgcctgttccacggcagcggcgtttgaaacgccgctgggcactgtgccggtagacattgcagccgagcgtaaggctctgggcctgtctgtcaatgagccattgcgctccggtacacatgcccgtccgggcgcgtcggctcccgcaatgatcgtcaatggcccaacccacgcacaagaacatgcggtagaagtgcagattccgttcctgcaaaccgtgctcggcccagacctcactattgtgccgttgaacgcgggcgatgccacgccacaagaggcgggtgatgtgttgcgtgctttgtggggtggcccggaaaccgtcatcgtgattagttcggatctctcgcactatcatccgcacgaagtcgcccgcgcgttggatgaccagaccattgcggacattgcggctttgcatctgccgattcaccctcgccgggcctgtggcgcatacccgatcaacggccttctggatgtgttaaaaggccgcaaggacatgaagctcttcgagctcggctgttccacttccggcgacgacggcgtggtggcgcttgccggccaacctcgccccgcaatgcgagacgccgacgagccggtagtgggatatgtctcgtttgccgcgtgggaatccaaaccagaagcagatgctccagccggtgcagatgacttaggcgaatcgggaacagcccatggtgatgtgctgctgaaactcgcccgtgccgctatccgggaacggctgcatatcgagcatccgaccgccgctgattcgaccgcgtccattcttgccgcaaacccgtggctgaacgagtccggtgcctgtttcgttaccctgaccgagggtggccggctacgcgggtgcatcggttcgctggccgcccaccgctcgctcggcaaggacgtgaccgagcacgcagtggatgccgccacccgtgacccacgtttcaacccggtcaccgccgcggaatacccgttactcaatgtggagatatccgtcttaggcgagcccgagccgattaccgtgaattcctgtgacgccgattcgcgcgataccggctcgaagaccgcgactctggcatcgctgcaatccggacctcagaccgacgccgtcaaacgggacggcagtaacgtcgaacgcccggtacgttcgcgcactgaacttgaggaagtattacgccccggcaaagacggtctgattctcgccgaccgtcgtggccgcagcgccacattcctgccacaagtgtgggatgagctgcccgattcgcgcgatttcgtcgctcacctgctcgccaaagccggtatccgcccgtactacgactggaacgatggcgaaatcgactgtcaacgctacgaggtgaccgcctatgccgagcactaacgcagcaaccatgtcccctcccgctggcgggaggtggcgcgaagcgacggagggtggtcaccgagaatcagagggtggtcaccgggaatcgtgcggtcacacggcgtcagtcacagatgttcgtaaccccgccatagcccgctggcaaacgcaattccacgacggtaccaaccgcgctcgctgcgaactatgcccgcgccgctgcgtcctcaagcccggccaacgcggcttgtgcttcgtccgctcaaaccacgacggactcatcgtctccgacacctacggccgcagctccggcttcgccgtggacccagtggaaaagaagccgctcaaccacttccaccccggttccagcgtgctgagttttggcacggctggctgcaattccggttgccgattctgccagaattgggatattgccaaagcccgcagtttcgaccggctcggcgtggaagccagtccggagaaaatcgcgcaggtcgcggccgaccggggcatcgattcggtggcgttcacctataacgatccgatcgtgttcgccgaatatgccatcgacacggccgaagcctgccgagcgctcggcattcatcccatcgccgtgactgccggatacatgagcgccgaagcccggcccgacttctacgccgccatggacgccgccaacatcgatctcaaaggcttcaccgaagaattctattggaaagtgaccggcacgcatctggccgatgtgctcgaaaccatcgactatgcggtcaacgaggcacgcacaccagaaggcgaacacgtgtgggtggagctcaccacgctactcatccctggactcaacgatgacgacgcccagctgcatgctgaatgtacatggatacgcgagcacttgggcccggacgtgccgctgcacttttccgcattccactccagttaccgcatgatggacgtaacgcccaccccgcacgagactctgacccgcgcccgaggcatcgccctcgaagagggactcaattatgtgtacaccggcaacgtgcatgatcgtgaaggcgataccacatattgcccaaaccctgaatgcagggccaagctcgtggaacgcgattggtatcgaatcattgccaaccgtttatctgccggatacagtggcaatgggcactgccccgtatgcaggactgctatcgccggacgttggtaatctgcctcaggtcgcccgcgcgatttagcgcagatcgccaatacgcgcggcgatcgtcctcatcgatttgaggctcgcctcatagcgcgcggctgccacaatcagaatgatgccgcccaaagcaagccacacccaccggtagtggcgggagaattcggcccgccatggccacagcacagtcaccgtgctgacgataagaatcaccgtgccgtagatcaacggtgcttgcagcaaacgcacacccacaatcagcgcggccgctccgggtaggccgattgttccgggaccgacataggcgattgcgcaaatggtggcatggccattggctgttgcgataccggttgtcgcggaactgccgttgggaattgcggggttgcagcagaaaattgcggggcccatgctgggccggttgatacaccggttgctccgcgggttccggctgattcccctgttgctcggtcggctgcgtcatcgtgccctcctacccttctagccatcattgttgtacgaatgagtccgaatgccaagatgaaggccggaatagtgcgaatagcaggcgggcttgtcggttcacgcgaatatcttggaacacatgacttccaatacccttcgtatgtcaaccatgttcctgcgcaccctgcgcgaggaccccgctgatgccgatgtcgattcggccaagctgctgcagcgcgccggctatatccgcaaggccgcacccggtatctggacctggctgccgctcggtctgcgcgtgctgaacaagatcgaggccatcatccgcgaggagatcaacggcatcggcgcccaggaagtgcacttcccggccctgctgccgcgcgaaccctacgaggccacccatcgctgggaggagtacggcgacaacatcttccgcttgaaggatcgccacgaggccgattacctgctggcccccacccacgaggagatgttcacccttctggtcaaggacatgtactcctcttacaaagacctgcccgtcaccctgtaccagatccagaccaagtaccgcgacgagttccg

SEQ ID NO: 2091 - DNA, 13670 bp, Unknown
  R51_24m  MAG No. k141_940
atcaacggttcggccggacatgttgaccacgaccagcagcttctcatcgccgagggtgcgggtgaaggcgtagacatgcgcgtcatccgcatcgagcagatgccagtcgccggccgccacgacaggcatgtcgtggcgcagcgcgatgagctgcttgtagaaggcatacaccgaatccggatcgtcgaattcgccggccgcgttgatcgccgcatggttgggattgacggagatccatggctccttagcggcatccggcgcagtgaaaccggcatagacagagccgtcccattgcatcggggtacgcgaattatcacgaccgcgcgcggcgatacccgccaacatcgattcgggcgactgcactttggcttcctcaaccctttgacggtaagcgttcagggactcgaggtcacggtactggtctaggcgcgtgaagtgggcgtcggtcatgcctagctcttcgccctgatatatgtacggggtgccgcgatgcatgtgcagcatcaggccaagtgccttggccgaacgcacacgagattcctccgaggagtcatcaccccaacgagaaacgacgcgaggctggtcgtggttaccagtaaacaggcttgcccagcctgcattcttcacggccgcttgataaccggccataatgctcttgagcttcggcaggtcaagtggcagtggcttccatttgacgccttcgcagtcaaaatcaacgtgctcgaataggaagagcatgtccagctcgccgttggcggggtcggtgatgtattcgttgcgctgtgcggtaacgccgggagcctcgcccacggtgaggaagccctcacggccttcgaacacttcacggcgcatttcggccaggaattcgtcttggcgagggccgtccgcgcagaacggattcgggttggaatagccttcctcacccacgggcagatcgtccagctcggaaccgtactcgccgggcagcttgccagacaggtccgtgcgcttggaaatcagcgtaatcacatccatgcggaagccgtcaacgccgcggtcaagccaccagttcatcatgtcgtataccgcgcggcgcacagccggattttcccagttgaggtccggctgcttcttcgagaactgatgcaggtagtattcgccacgctcagggcaatactcccatgcagaaccgccaaagtaggagccccactggttgggctcggcaccgggctcgccggcagtggtgccgggacgggcgggacgccaccaataccagtcggcgtgctcatcatccttgtttttggacgcttcaaaccaggcgtgttcatcggaagtgtgattgacaacaagatccatcacgatcttgagcccgcgcttgtgggcctcggccagcagctcatccatgtcgtcgagtgtgccgaacagaggatcaatgtcctgatagtcggaaatatcgtagccattgtcgtcttgcggagacttgtataccggggatagccacagcacatccacgccgaggtcggccagatagtcgagccgtgacgtaatgcccttgagatcgccgaggccgtcgccgttggtgtcttggaaggaacgcgggtaaatctggtaaacgaccgcattggaccaccacggatttggggtggcaccgttggtgcggatggaatctggaattactgtgcgttgtgaagtggtcatcgttggctcctccattatttatggtctacattgcctgttgctcatagtctaaaaagcgctgaattacattcccattggggaactgcgttggtgtgccggaaacaaaaactgcaaagagccggaaggcactgctacggctcaattctcataagctgcacatgctatttagcaacatatgggccctttcgctgtttgtggtgggtgactgtgccgtggggtgatgttggtcgggtaggttggaggcatggatgcctctcacctgttcaccgccgcgcttcggctgcggtcgccttggagggtcgggtctgcggacttccgtgacgccgacggcgacgggcgggagccgcacatcacgatcggcttcgagcccggcagagggttcatgctcctgttcgaggcgtgggtgtggctatatcgcctgtgctcgtggatgatgcactcgaggctcgaacctatgaaggagctcgcccgcttgttccgccaccataatctacctgacctgcggcagctcacatattaacggttcttctgattgcgacgcgcaagagcaacttcgggcgcgcttggattgcctgcttgaacccactggtgcggggatagatgatttagttgacacgcctgcgggaatctggtggggatttcgctggcacaccggatttcaagcaaaccccgcctcgggaaccgctccggacttcggcgttggcccggttcgtatgtcaatcgattgccgtctgaaccgggacagaatccgctgtcccggttcgcgatttttgtccttttttacaaacagggacaagccaatctccgcagttcatatgctccgtaatacaaaatcggcggaatagagccgatcccggaatcaacatgttgtcccggttttcacataaaacgattgacattcataccgggacaatgaaaattgtcccggttcgtgaaaatcgcccgaaaccgcgaaccgggacagcggattctgtcccggttcgcgcgtcaaacggttgatatgtggaccgggacaagccagtggcacggcgacacagcagatgcgctcaattgcaccgtaagccgtacggtttcgtcactttttcattcgcacaacgagcaaagccacatgacctttgtgcgccaccgccacatcaaccgaccgtcgcctttattgtggcggtttccagtatggcaacaggacagaagagcctcctccggtgagagccggaggaggcttgggcggaagcggacctttacttcacagagtcctgcaattcaggactggcctacggccagacccaacatgacctcgcgagtacgcgacctatccggccgcccgggccgggaaacagcccacggggctgtttccttaatcggctcgtctcgctcgacgcggtgaagtaaagcagcgcctgcgctgttttacttgaccgctcccctcatcacaccaccgacgacccacttttgggcgaagatgtagacgatgaggatcggggccatggccatcaggtagctggagaaggccatcgggtagttggtggcgaactgcgagctgaagacgtactgggcgagcgggatggtctggttcgactggtcggtcaggatgatcaacggcaggaggaagtcgttccaggcccacagtgcggtcaggatggcgatggtggcgttaatcgggctcatcagcgggaagatgatggtccagaaaatgcgccacgtggatgcgccatcgattcgggccgcctcttccagcgaaaccggaatcgaacggatgaagccagtggcgatgaacaggttcgtgcccaggccgagcaccgtgtacaggatgatcaggccgacctggttgtccaggtgcagggagcccatctgcttcgcaatcggcagcatgacgaccgggaacggcacgaacatggcggcgatgaagaagtagtacaggaagcggaagaagcgcttatccatgttgcgggccacagcgtaggccacgaaggtgttggtcagcaaggtgagcaccacggcggccaccgtgatgatcgcggagttgagcgcggccttcgggtagttgaccttggcggaggcgtcggcgaagttgtgccactgccacgaggtgggcagggcgaaggtgccggcttcggccggagtcttcagcgcggtgacgatggtgaagtagagcgggatcagaatggtcaggctcagcacggccacggcggcggtcagccaccagttgatcttgtggtccctgcggaacttggcgggcttgccggacttggacggggtaactgttgcagtagtcatttcttatcctcccctaaatcagatctgttcctggctgcgggagatgcgcagctgtacgaaggcgatgatcgccagcacgatgaagaagagcacggcgtttgcggtctggtaggcgtactcgccaccggtcaggccacccttccagatgaggtaggtgacggtttcggtggaggagttcggaccgccctcggtcaaggcgacgacctgatcgaaggtgccgagcgcgttcttcatggacagcacgaggttgatggtgaagaacggtccgatcagcgggaatgtgatcttccagaacttctgccaagcgttgacgccgtcgatggcggcggcctcgtagatttcgtcgtcgatggtctgcaggccggcgaggtagatgagtaccgagtaggcgatgccctgccagacggcgaggaagacgattgggatccagctgagttgctcattggtcaacagcgaggtggacagccacttgatgcccagcgccttgccgagctcgggcagcgggttcatgaagatgtacttgaacacgtagccgatgaccagcacggagagggtgtaggggatgaagaagacggctcggaagccattcttgaaggcgatcttcgagttcagcagcaccgacaggaacagggcgatcacattaatcagcaccgtgatgagaatggcgatgaggaacgtgaacaggtaggcgtggcccacgcggttgtcttggaagagggcgatgtagttcttcaggccgatgaacttgtaatcgccgtagccctgcgagttggtgaaggaatactttacgccgtcaagaaatggcaggtacaggaagaaggcgaaaatgatagccgccggaaccaccatccagtagtaggcggggtccaccttgcgggtggagaaggcggagaccttcttcttggccggtttcttggcagcggtcttggttgcggttgcgtgtgacatgatgttctcctctcctaccgatcactcgaaggtcctggcttggaccttgtcccattcggtctgcatctggttcaggaagcgatcggtgttgccggaggccaccatggtctgcaggtagccgccgatgttgatggacgaaggaatgtagtggtcgcagaagtcggccagtcggttttcctcgaagaacgggcgcacggtttccagcgcatcgttgccgaagtaggtgtccttcagcggcgtgatggcggactgggcgtcggcgtaggcgtcaagctgatccttctgcatgaggaactcgacgagcttcatcgcttccttggggtgcttggtgttcgcaccgatggtgagcatcacgtcgtcgccggcggtgaggatctgctcgctggcgtcatcggtggccggcatctgggcgaaaccaagttcgatatcggggttgatcagcaggatctgcgggatggcgtaggtgccgagcgggatgatcgcggccttgccttgggcgaagttctgcgtgccctgctggtaggtgacgccggtgtccgcagtggagtaggtgaagagctcggattccttctcgactgcggtcttccacagttcctggaacgtggtcttgccttgcttgagctcggtgtacttcgattcgggaaccagcgtgccggccagggaggcgagcggtgcctgggtggtccaggcgtcggccacggaaccctgcagcgggttgatgccggcgtccttgaaggtgttgagcatatcggtgaactcgctccaggtggtcggcggattctccgggtcaaggccaaccttgcggaacagagccttgttgtagatgtagccggaggcgttacccgcgaagggcaggccatacaggcgcttcttggaggaatcggtggtctgcaccagattcttggcgatctgcaccatgccggggttgagggtgtccacaatgggttcatcggtgaagtcgtagaacacaccggaggcggcgaagttgccgaagctgatgtcgccgttgaaggtgatcacgtccggcacacgattcttgacgaaacgggtgcgcagatcggtctgggcgttggcggagttgttgatgttgaccttgatggtcgggttctgcttctcaaagtcggcgaccatggacttgaactggtcggcggcctcggacttgaactggaagaaatccagcgtgacggtgcctgcggtgctggagccgcagcctgccaggccgaacccgacggcgatcgcgcacatcacggcggcggtgcgcacggccagacgcttcagtctaggcgttgcatgtggggaatcggacagcataattgttgactcctttatctttcttttcctccggcttcggtgccggcggttcttccactttccaaggtaacggttcggccatttcattcccagcgccagcgagcccacttgcgcaagcaacaaaaagcgcggtattttgtgattaacgcaataaatacagcgaaggggcttgcatgtctgatgtcaacgcgattccacagtggttttccggatccgagcatacgcatcgcgtggcggcggcaattgcccaatacgggccgatagcccgcactacgttggcacagatgctgggactgagccaaggggccttgtcccgcatcaccagcgatctgatctacgccggggtgatcgaggagcttccggccgaggccggcccgtcaggcaagctgcccgagcgattcacgccaagggaaagttcggatcgtcgcggacgcccgcagacttcgctggtgttgtgttcgaacgcacgcaccttcattggtgtcaaggttcatgggatgtcgattgtggccgctgcggtgaacgcgcatggcgaggtggtgtccggccggcacgaggtgccgatcggggcggatcagtcggctgagtatgtggtgtcggccatcacgcggctggtgcgcgaatgttccgccgatatcgcctcttccggactgccctcccccactgcggtgggcgttgcggtaggtgggcatgtggtcgacgattcgattgtgacgttcgcgccgttcctgcattgggacggggccacggacttggggacgatggtcacagaggcgaccggcctgccgtgcggggtgttcaatgatatcgattctctgctggtggatgcctcctggttcgggccgggtgtcggcgtggatatgttcgccgtggtgaccatcggcgtgggtgttggttattcgctggccgtgaacggcaagccagtgcagtacccggataagagctatggtctggtgggccacgtgcttatcgatccggaggggccgcgctgcaccagcggacatatcggctgttcacaatgcttgactgacgattcgatcgccgaacagtactctgcgattgtgggtcgcgcggtcagttttgaggactttgcgcgcgatgccaagggacgtgtgccgcaggccacgcagttggtgaaccggacgtgtttccggttgggttcgctggtggctacggtggcgaacatcgcgatgcccggacatgtgatgattgccggggagtccgcgtttttggccaagctcggcaccgattcgctgcgcgatggcattcgtttctaccgtcacagccagacccagccggtcaagttcacgattatggaccacgactggcagctctgggccaaagccgccgccagtcgcgtaatcgtgaagcatattgggtaggccgttcttggctcccctcagagagggaagccaagaacgttgcttcgccacagttactccgccacgaccagcaattacggacttgcctatcggcaagactcaatcccaccttcgctcagctgtcgcttcgctcaggccgtggctactgacagcctactaggctgtcagcttaacgccacagccttgagcaatactgcctgctgggggtggagggacgggggacggatgccgtaacgctgcagggcttcgccggtcaggactacgccttcctcgttccaccagccgagagtgctctggccgttggccagaccggtcaaatccaagctcgggtcgagcgggctgacgcggtaggtgcgctcggggtcaagtccgggcaggtgcacgggcgcggccggataggtctggctggtggtcagctgggtgaagcggtagatggcggcgtcgcggttcggcatcaccatgccatccaagcgcacggccggatcgttggagtcggcgtgcacgcaggtgtcgatggcgaaccagtcgcggtgcttcttgaattcggccacccacacggccagcttggcgagcgcctcgtccggctccttcaacaggttccattcgacgcccatgtggccgaagaacgccatggccatgcgcagttcctggctggtggcacgctgggtggagtgcgcgggactggcacccacgtgctcgcccatcatcgccggcggcaccagcagcgaggtgtagcgctggatgtccgcgcgctcgaccgggtccacgcagtcggagacccagatacggtcagcgtgctctaggatgccgaggtccacgcggccaccgccggaggagcagctttcgatctcaaggcccggatgtgcggtcttgaggcccttgaagatgttgtagacggcgagggtctgcgcgtgcacggccgggcggccggagcggcgggaaccgggctcggtgacgagcttgttgtggtcccacttgatgtagtcgataccaagctcgccgacaagctggtccatgcagccgtagatgtagtcgaacgcatccggattggtcagatcgagcacctgctgagtgcggccctgcagcggcagtcggccggtggtgggcgaaagaatccaatcggggtggttgcgggccacgtcggaatcggggttgaccatttccggctcgaaccacaagccgaattccatacccttggcgtgcacgtagtcggcgagcgccttcagggacttcggaccatcgggccagacgtcctgcgcaatctgccagtcaccgaggccggaggtgtcgtcgcggcgggagccgaaccagccgtcgtccaccacgaatcgttccacgccggagtcggcggccttgtcggcgagcgccttcagcgtatcgaagttgtggtcgaagtacacggcttcccatgtgttgaggatcaccggacggccgtgcgagaacaggcgcgggtgcagggagcgcacgtaggagtggaagcgggcggcgatctcgttgagaccatcgccataggagccgaacagccacggggtgtcgtaggagttctggccttcgccagggccagcgagcgtcacttcgccgtcgaacaggagttcgccgccgccgatcacgccggttgtgtagggcagacgttcggcggacagcacggagttgccgctccagcccacgtgcaccgaataggcgtcgccatgctcgaagctgaaaccgggcacgccggcggtcaggagcagggatgcgtcgaagtcagggcggccggcgagctgcggcttttcgaaacggccgacggtcagcggctggcgctgcggactgcgttcacgtagatggtgaccggtggtggtgaggatttcgccggcggattcgggcagcgggaagccgagctcgatcttgccgatctcgagcggggctccggcgtctgcaccgaacaggttggttacggtggccttctgacgggccaggccgccggggagcagttcgaggtgccactcgacttccacgccctgctcctcatcgcgcgcggtgactatgacgccgggcacgcggaccggaccggtggcacgggcatggccggccacatcggtgtagctttcgccggacacggcatcgagggtggcttccagcacgccgccggcctcgatattggtcacggtgaacttggggaagagctcgacgccggcgcggcgcagcaccacgcgctgctcgccgatccagctttcggcctgggtgggcaggatagacggccaggcggtgtcgtcgagcgcgccggacacgcgctgcggcttcagggcgtcataggcggccagcagggtgtcgggcttggccagcgggcggccccagtggacgatgtgcggcaggtcgctgccggcaaacaccagaccgatcgccacattggcggcgggctgggtcaggtagacggcggtgagtgcggtgccgtcagcggcggcaccggtgaaagtggaggtgttctcggccatattgtctccttcgacgtgtgtggatttgcattgcactactggtttcgatggtagaagaaatggaatatgttgccttggtgccgcgtgttggttgcgtgaggtaagtaatgcgtccgtgtctatcgccgctgggcgaagaaatcagtcaggatggactgacactcgccttccagcacgccgccgtgcacttcaggactatggccgatatgcggatcgcgcggaatatcccaaatcgaaccgcatgcaccgagcttgggatcccaggcaccgaacgcgatggtgccgatatgggtctggatgcaggcacccgcgcacatcgggcacggctcaagtgtgacggccagcgtgcaatcggcgagattccaagcgcccaaggcttgggccgcctgacgcatggcgatgatttcggcgtgggcaagcgggtcgccatcagcctcacgcgtgttgtatccgcgcccgacaatctggccggccgcatccagcaccaccgcaccaaccggtacgtcaccagcggctgcggcctgaccggccagttccagtgcgcagcgcatcgcctcgtcatattccataccaacgagtgtatgcctttttctcatatcgtctcatgatgtgcataatcggccgcaatcttaacgttttcttcatggttcccatatacttttggtggagaaaaaatacgagaaggcggcaacatggcggtatttgagctcatcctatgcatcattgcggcggtggtggtgagctcgtttgccagtcgcttcgtaccgaaggtttccacaccgctggtccagattgtgctgggcgtgctggttacgtatctgccgtttttcccggatgcaaagctcgacccggaactgttcatggtgctgtttatcgcgccgctgctgtatctggaagcgcacgaaatcgataagtcggcgttgctgaaaacgctggatctgagcctatcgctggctatcggactggctatcgtcacgatggcggcggtcggattcactttgcatgccgtctggccgtccatcaccttagcctcagccttagcactcggcgcggcactcggcccgaccgatgcggtggccgtcagctccctaggtaaagaagcctcgctgacgcagcgtcagcgcagcgtgctgaaaggcgaatcactcttcaatgacgcttccggcatcgtcggcttccagttcgctctggccgccgccttcactggcgaattcgccgtggggcaggccgccggcgaattcgtgatctccttctttggcggcaccttatttggcctggtgatagcagcagcggccaactggctattcgagaccgtgcgatccctcggttgggaaaccaccaccacacgtattctgatggaactgttcctgcccttcctgctgtatttgggcgcggaggaattcaatgtgtccggcattctgtcggtggtggccgctggcctgttcatccgattcgaccgtaccggcgtggggccgaatgtggcacgtacgaatatcgtttccacttcagtatggggtgtgctgagtttctcgctcaacggtgcggtgttcattcttctgggcatgcagctgccgcgcgccatgagggccagctggtctgacccgtatatcagcaataccgtgctgatcggcattattctgctggtcactctggtggtaatcgcgcttcgattcttctggattgcggccatgctgcgcgttgcgcgagatacaatcaccggccagcgccgcaaaatgacacccgaacgctggcgctcggccgcagtgatgacctttggcggccccaagggaaccatcacgctgtcattgatgtttaccatcccgtattacattgccggcggtgcgccgttcccgatgcgtgacgagctgattttcattgcgtcaggcgtgattatcgtgaccttgctgctggccaacttcctgttaccgctattggccccgaaccgtggcaaggatcccagcgcggaaatgattccggtgaccatcgatgtgttacgcgccacggtggaggaattgaccggacgcatcacgccagagaatcgccgtgcgattctgatggtaatcgaccaatacaccaagcgcatcggacgattgcagcagcgcatcggcgataccgatcctcagggattcgagcaattgcagatcgaagcgctgcattgggaaaaggaattcgtgcgcgaccgacttgccgacaccaaggcgcatccggcggcggatacggccacgcaagagctgaacgtcgaagcctgcgagcgcatgcttgaccagattatgaatacgctgcgtcacacttccactgatccgacttcggggcatgcggtatcgcagattcgcggtcgcttacgcatgttccagcggcagatgagcaattacgccaaacgcacggtgtccaagattcgccataccacaccattggtgagcgaggatcagattttcgcgcgcacccgcgaactgcaggtcgaggcgattcatcatgttatcggccggcttattgacgagatgggccaggatacgtacaacaccgagcattgttcggcgctgttgctggattatcgtcgcgctgaggcttcattgcaggcacgtccgaatatgagcggcactacggaaaccatcacgcaggtcgaggacgtaaagcgcgagagctacggtatcgaactcggtgtgattcaggacatgtacgaagccggcgacatcaaccgagcccaagcccgctccctgaggcgcaacatctacgttatgcaggtcgatgccgattccggcatctagtttccttggctcccttctctgaggggagccaagttggggattgctatttccgtatgattctcttcagtatgtgcagtagtgcttgcagtgctcacttcgctcatgggagaacggtctatgaccgcgccggccacaagcgccctcgatgtccgattgctgtgacggccgcgccaattccagtgatggcggctgactacagcacgccagaggtaatgtcgttgtcgagcagccactggcgcaaatcggcgaactcctcaagactcacattgtgatccagaccgtggtagctcttggttttcagccacgtatgctcttccaaccaagcggcggtggcgaacagttcgtatttcgggattacgccatcgttcttgccgtacgtatagaacacggggatatcgtaatcggccaggcgagagtcggcgggggccgtgccgggcacctgaccgggtgtgttgaagccggacagggagacgacggcccggtaccgctcggggttgatgcgcaacaaatgcacggcgaccagtccaccttgcgaaaacccaagcggcaccacgtcacggtcggcgggaatgttgtcggccacccatcggtcgactgctgtggcggcggcatacgcgtcgtagtcacgatcatcgccgataggcagggcatcgtgaaaccacgcgtagttgccggggtcgggactgccttcacgggccggcgcgagtgtcagcggcccgcgcaatgccacgaagtcgttatatggagcgatgaggcgcatgatgtccgccatgtcttcttcgctggatccccatccatgcaggcacaggaacagcggatgcgtggcatgctggtcgaagccgccg

SEQ ID NO: 2092 - DNA, 29100 bp, Unknown
  R51_24m  MAG No. k141_983
cggcggctcgctgaagctgctggctctgctgtttgtgatttccctgatggcctcgttcattccctatgtggtggagcagatcacgctgcgacgcaccacatccggcgcattttcggtaatgcaatccatcaatcccgccatggcggtggccgtgggactggcgtttggcgagattcccagcgttggtgaaatcatcggtgtggcgttggtgatttgcgcggttatcgttacgttctccggcgatgccgcgcccgcggacggtcaataatgtgtcgttcggcacgccgtatccgcaggacgtggtacagtaatttgctgttgcgcattattgcgtaacgtggagtcatgcctgagtggccgataggggcaccctgctaaggtgttagtcgtgtaaacggctcgagggttcgaatccctctgactccgccgattaaggttccgggtgaaagcttggaatcttttttgttttccggaaactcctgatgatgggcctgttcgcacttcgcggagtcagagggattcgaaccccgggaatacggttctggtgggttgtccggatatctgttttgcgacgcattcctgggaatgtgtttctagtgggttgcttggggtctgttttgcgaaactttcctgggaatgtgtcgctagaaataaccgaaataaccgaaataaccgaggacggtcggtctccgcttgtggtaagcggagtcggaggtacgccattgtccgtccgcctccaaaccgccattttagcgggtgaacgagtgcggcacctcggggaaaggctaacaaacgaaagaagaatgtccactaagtgagacttttgcgtggtgttcgtgaatggtgattgaagattaaccggtttatgtcgcttgtccaatcgcttgcccatcgccttcctccccgcagtgtttgactgagatgggcggtatcctagagagagaagaagagttccgaagggtgggcaaagatgagccatatcgctgggcaggggcaacatcgctccaactcgacacgaaccaaccgtgcggcgctgattatcgtgttcgtgatcgcgctcgccgttacgctgggcatcggcgcatggttcgcaacccatcgcacggacggcaatggccccgcacgcgccggagtgtcggacgtcgcgttgaataaagcgaagaacacgcccaaaccggtgaccgaacatcacggcaattcaccggattgcccggatacggactgcatcgccatgctggtcaacggcgatttgttgttccatgagggattgtggagccatttccaaggcccgaaccccaacgccacggatggcaccgccttcaacttcgacccgctgttcgcgccgatgaagcagtacattcaggcttcggacatcgccgtgtgcgaattcgaaaccccgatcgcccagcgcggcggcccatatgccgcgtacccgatcttcaacattccgccggaagtggcggatgccgcccgcaacgtgggatacaacgcctgcacacacgccaccaaccattcctgggatcagggggcggatggcatcgcccgtctgtgggacacgcttgaggccgatggcatcgcccagaccggctcgtacaaaaccgaagccgactccaccaaaccgttagtcatcgattccccgaccggcggcggcaagctgggtctggtcaccggcacggtctccctcaacggcatgaccgccgacgaggactggcaggtggatcgtctgcgcgaagacggcgacccgaatcacggcagcgacatccagcgcgcggtagacaaggccaacaaggcccgcgagcaaggtgccgatgtggtggccatcgccatgcactcggtgcaggaataccttgattacgccgattcctggcagatttcggaagcccatgagcttgccgacactggtgccttcgacgttatctacggtgccggctgccattgtgcgcagcccatcgagaactataacggcacgtggattgtctacggtctgggcaacaccgtcaccgagtcggcgaacacgccggaaaccttggtcaacaaccagggtgtgaccgcacgcatccagttcgccggcaagaagggcgtcaaggggtcgtggcgcgtcaaccgcatcgactgggtgcctaccgccaacgtgcatcaaggcaactaccaatggtgcccgatatccagcgaccatcccataggcacatgttgggacgaagcctacgacgctcagatacgccaacgcatctgggatgtcatctattcgatgggcgcggaccagaacgtcgtcaaggaatggaacatcacgcaggagcaggcggcaaagcaatagttgctcggcttggtctcaaggaggggaagccgcaaggtgacgcttttcccgtcggcctcctaatgtggagcccatgaccgagatttacgaaacccaaagcgaacgcaccgatctgcccctcgtcgtgatgccgtccgtgctcgacgcgatgatcgagcccatcaaggcccagttccccgcgctccacgacgttgcccgcgtgcgtatgttcgaggaattcacgtccgacgaggcgaccatagccgagcgtctgaaggatgccgacgccctgctggtgggtggctaccacatttcggatgatctgctgcacgccatcagcgagcaggggcacgtcaagtgcatcgtgttctgcggtaccggcgtcgccagctacatcaatctcgataaggcgcgcgagctgaagatccgcgtctgcaacgccgaacattatggcgatcacgccgtggccgagcacaccttcgcccttctgttcgagctcatccgccgcgttggccaactcgataaggatgtcaaggccggcaactgggcgtgggccggcggcgatggactgcaactcgccggccgtcgcatgggcatcatcggactgggcggcatcggcgccaccgtggccggcatcgcccgcgccttcggcatggaggtcgccgcatggaattcgcatgtgccgcccgagcatttcgaacgctccggcgccactccggtcgacgatctcaacgagctcatcgaaaccagcgacgtcatctccgtccatctgccgctcaacaacgccactcgcggcatcgtcaccgccgagaaccttgcgcatgtgaagcccggcaccctgttcatcaataccgcccgctccgaagtcatcgaatccggtgcgctgcttgcccgactgcaaaagggcgatgttcccgccgcactcgacgtgttcgaccacgagccgctgaccgccgacgacgccatctgccatgtgcccggcatcgtcctgaccccgcacgtcggctggcgtaccgacggcgcgttcaaggagctcacccgccagatgatcgcctgcctgaccgcctacttcgccggcgaggactataacgtcgtcgtctccgaacactgatagtcctgtctagcctcgcgctcaatcgaacacccagtcagccgaccaccggaacacgcttatgcagacgattctcaacacgtccgacgatcccgcccacgattcgctcgtcgaaaaaaagtccgaattcatcggcgacgccgcccatgtcgatacgctcgacgaggcgctcgcgttcgtggccgcgatccgcgagcagcatccgaaagcccgacacgtggcgtatgccgccgtgtgcggaggcgcggatgggcgactgtccgaacgcatgagcgatgacggcgagccgtccggtaccgccggcaagccgattctcgacgtactcaagcagtccggcaccaccgattgcgtggttgccgtcaccagatatttcggtggtattctgctgggctccggtggtctggtccgcgcgtactcatccgccgcatcattggcgatgaaagccgcccgcgccgcccgcatcatgaccgccaagcgataccgggtccgtctcgaatacccgcagctggcacgattccagcagatcctggcgcagctcggtggcaaccaggaggatgaatcgtatgcggtgaacgtcgaactgaccgcggtggtgccgcaggatgattgcgtgcgattcgaggagcgtgtgcgggaagcgttcaatgccgcggtggtaccggacccgattgacgtggtcaacattccgattccgttcgcgtgacgcctgtatgactaagctgggcatcatgaccgacgagaacaccaccagccagcggacccagcccaccgaggccgcaaccgagactgcaatcgacacgggcgcccagcagcgggaccaaggcgcgcaggccgcagccgagtccgccgctccggtggatttcgaaccgctgaccgctacatacgaacgtctgcgtcattccaccgacccggccgaactgtccgaattcgcccgtcggccgttgcctgaccgtgccgatcaggcggcgttctcccgcgccaccgcacttttggaggctgtggccggcaacccgcacaccccggtggccgatcgcgtgttcctcgccgacaccatgccgttcccgaacgtattggtcaaactctccgaagaccccgaaccgtccgtgcgccaagccgtggccgccaacggggatgacaagaattggctggtcggccgcctgaccaaggacccggtgcctgcggtccgggatacggcgttgaaaaacaagcgcaccagctggaagatgcggcttgagggtgcgcaggaccccactgcggatgcggagacattggatttcttgggcgtacttggcaccgaatccgaagagggagcaccggcagtgctttcctcgatggtccgccgtgccgtggcgctgaaccccaatacgtctgaagcgatgcttgccaaattggccaacgacccctcggccgaggtgcggcacgccgtggaaagccgccgctaagcacactattgctgtgttttgccgtgcaaatttggccggcaatcaccctctatccaccattgtgagcgctcacatctcactatgtgagggtaaaaagtacataatttggcggaatcacggcattttgcttacggtgtggcgcaatcaaacggcgttagactggggctatgagtgagattaccgagagtgaagagcgtctggcccgtccgttgattcgactggccaagttggtcggtgtcggcacgagttatgtgggcatgagccatgactaccacgagatagacgatgacgtcctgatcgaggtgctggcagcgctgggcatcgacgcctccagcgagaacgcccaactcatcgccatccgacgcattctgaacgagcgttactcccgattggtggcacccaccgtgctgcatatcgccggtagcgaggaccgggtgctggtgaacaccggcattctggacgtgccttcggcgagcatcacgctggagaacggcgagccatatcagggcaccgttgaagttggtcctggagatggatcccaggcctacgacttggatggcacgttcatttcgaatgcggctgtggtcattcccgccgatctgccgattggctaccatacgctgcacgtcaaggtcgccgaccgtgtgcaagacgccactttgatcagtgcacctgatcgcgtcgatctgcttgacccgatgaagggcggcagtctgtggggctggatggcccagctgtactcgattcgctcctccaactcctggggcgtgggcgattacgaggatctgaagaccatgctggtggacgccaagcagaagaccggtgccgacttcgtgctcatcaatccggtacatgccgccgagccggtgtccccgctcaccccgtcgccgtatctgccggtaagccgtcgcctgatcaacttcacgtacatccgccccgaggcgatcgccgaatatgccacgctcagcgcgggcgacaagaacgccgtcgacggactgcatgccgacaccgaaccgctgaacggtgattcccagctcatcgaccgtgacgccatgtggcgcagcaagatgcacgccctgtggattatcttcaaggccggccgtaccgccgaacgccaaagcgcgttcgaccaattcaaggcggactgcggttccgacttggaggcgtatgccacgtggtgcctgtgctacgacaagtggggagcacccaacggcgaggagagcaactgggagcgcaagttcaaccgcaactccccggaaatcgccaatctgcgcaagcagtacccggacaccttggacttctaccgctggctggaatggattgccgccgagcagctgtcctccgcccagcaggcagccaaggacgccggcatgcatatcggcatcatgtccgatatggccgtcggcgtgcacccctccggcgctgacgtgtggtggaatcccgagcgcttcgccaagggagccacggtcggtgcaccgccggacatgttcaaccagcaaggccagaactggagccagccgccgctgagcccgatcaatctggaggccaccggctacgagacctaccgcaatatggtgcatggcatgttcgcccgtgccggtgcggtgcgcatcgaccacattctcggcctgttccgcctgtggtggattcccgagaaccggtcggctatggatggcgcttatgtgtactacgactcagacatcatgctgggcgttctggccatcgaggcctctcgcgccggcggcgtggtcgtaggtgaggacctcggcgtggtgccggaccatgtggccgattccctgtcgagccacggtattctcggttgcgccgttgaatggttcgagcagtgcgacggcgtgttccgcgccccctcccagtggcgtccgtacgcattggcctccgtgaatacgcacgatttgccgccgaccgccggttacctggaatacgagcacgtcaagattcgtgagcgtctgggcttgctgaccggcccggctgaggaattcgaagcctccgcaaaggccgagcaggatgcgatgctggtcatgctggtcgagcagggctatcttgatgccgacttcgccgaacatcgtgaggatcacgaggcggatatcatcgacgcgctgtaccgcgcactgaagggttcgccgtgcaagctgctcgccgcctcgatcaccgacgcggtgggggagaagcgcgcgcagaaccagccgggcaccaacaacgaatacccgaactggcgcatcccgctggccgacgccaagggcaacatggtaccgctcgaaaccctcttcgacacccccggcgtccaacgcttcgcccaaatcttcaattcctgacccactttacctccctctgacgagccgagtcgttaagcggacagtccagtggactgtccgtagacgaggcctgaacgaagcgatagctgagagaaggcagggaattgcctcaccgtaggcgagtcggttagccgaagtgggtggaagagaaaccataaataggggaagagaagccataaacccaatggagtgtccccagttgccctatgtcaagcccggcgatatactagtggattgttgtgtttccctaaggggtccttcaaagcgctatcccactcgccatcgaggactttcagggagcccacggataatgaggttcgatgcctcttggatgcggccctgaccaagccacgccaagcagctgagacccggaacacaatatagaaaaggtaatccagtgaaaactttcactccgaagccagctgatctgactcatgactggtatgtcatcgacgccaccgacgtggtgctcggccgtctcgccacccaggctgcaatcctgctgcgcggcaagaacaagccgacctacgctccgcacgccgattccggcaaccacgtgatcatcatcaatgccgacaagattgctctgactggcaacaagatgggcaaggaactctactcgcactccggtcgtcccggtggtctgcgtcgtgactcctacgccgagctgctcgagaagaaccccgagcgcatcattaagaacgctgtcaagggcatgctgccgaagaaccgtctggccaaggtgcagctcgaccgtctgcgtgtcttccgcggcgccgagcacccgcacaccccgcagaagccccaggtcttcgagatcgcccaggtctcgcagcaggccaagtgaaacctgagaggagataagaatcatggctgaaaacaccaacgactcccaggttgtcgagaccgaagaggagctcaccaactacaccaccgagaccaacgctggcgctggcaccggcacctccgcgatcgagccgggctacggcaccggtcgccgcaaggaggctgtcgcccgtgtccgtctggttccgggtgacggcaagtggaccatcaacggccgcaccctggaggagtacttcccctccaagctgctgcagcgtgaggtcaactctccgattgttctgctcaagctcgaaggcaagtttgacgctatcgtcctcgttgacggcggcggcaccaccggccaggccggcgctatccgcctcggcgttgcccgcgctctgaacgccatcgatcgtgatgccaaccgcgccgccctgaagaaggctggcttcctgacccgcgacgctcgcgtcgtggagcgcaagaaggctggtctgcacaaggcacgtcgcgccccgcagttctccaagcgttaatttcgcttgtcctgtaccgagcatacaaaggctctccgtggaattccgcggagagcctttgtgtttgtgtcgtgctgttttgagtgtgactcacacctgtttcatcagcgtgatgctcagcgccggcatggtccagacattgtcgtcgacgggagtgtccggcgtatcatccacaggggcatcaggcatatcatctgatacctcatcccgaggcgcggacgaggtgccgtttgcggcgtgatccgttgctggcatcgcgaatccgatggtatccgcttcatcctcagtcgaggattccgtgcgctgcatggccacttcttcgaccagcgtgcgtaccgtctcgctggcgtccggtacatgctgcgtccaaacggtggtgtcatcgttcaaatcgcattcctcgacctgaatgccatgcccggctcggcggccgttgatttcggccgagcaccatttaggcgtccagtgagtgtctggcggcaggtggaatgtgcggtcgtcagcggtgccgttgaccacaatgcacacgtccacctcactgttggacagcaatcgcatggtgaagctacgtacgcccagatcgaaccagtcacgctccatcggcgtggtgccgtcgggcaggaaccactgcacgcggcttgagggcttgagtaggccgagttgggtcagtcgggtgaagaagtcctcgtggtgatacaggtccagtgatttacgtagcgccaccagtcgagacacggttttcaggcgacgcatttcgcgtgtcttgttggtggaatacatccaatcccacttcagccacgtgatgtcgttgtcttggcagtaggcgttgttgttgccgtcctgtgtgttgcggaattcgtcgccggcgagcatcatcggcgtacccagcgagagcagcagcatgccgatcatgttcatggccgcctgttcgcgtgccgtgatgacgtctggatcatcggtgacgccttcgacgccgaaattggcggaatggttcaccgacgagccatcattattgttctcgccgttggcttcattgtgcttggagcggtatctggtgaggtccgtcagcgtgaaaccgtcgtggcaggacacgaaattgatggaggccggagcgccgcgcccgggttcggtggcgaacagatcggccgagccgcagagtcgcgtggccatctcctgcaaactgatacgaccgaaatcggagccgccatccacatcctcaagccagaaggtgcgggccgtgtcgcggaagcggtcattccattcggcgaacggcacggagaattggccggtgcgccagccgaggttgcccagatcccacggctccataatgagcttcaggttgcccagcagcagatcggaacgcagggcgtagaggaatgggtgatgatgggtgaattcgccttccaggcgggccagcgtgacgccaaggtcgaaacggaaaccgtctatgccgatacgcttggcccagtatcgtaatgagtcgatggcaaaggtgaccacatgcgtgttggtgaagtccagcgtattgccgcaaccggtggtgtcttcgagtcgaccggtattggatttttgatggcgatagtaggccaggtcgtcgaggccgcgccagcagaccgtcgggccttcgacgccgccttcgcatgtgtggttgtagaccacgtccatgatgacttcgaagccggcctcgtgcagcgcgcgcaccatgtctatgacttcttggcgcacggcggccgcgcccttctcttgggctgctttggtggcataggagggttcgggggcgaagtagctgagggtggagtagccccagtagttcttgcggccgtgttcttgcaggaagagctcgtcctgcttggccataatcggcagcagttcgatggaggtgatgcccaatccctgcagataggcgagcgttgtggggtgggcgagtccggcgtaggtgccacgcaacgcttcgggcagccacggcgcgttggcggtgaagcctttgacatgcatctcgtagatgacggttttgcgccacggcacatgcgggtgctgcgggtcgccctcatgcttatggatatcgcgatcgtcgatggccacggacaccggcacatggccgagcgagtctacggtgctcatggcaccgtatgccgagccggttaccttgcgatccacgacatcgcattcataggagaaggcggcgggggtgagctccatggagccgtcgatgcccttgccatacgggtcaagcaggaatttgtatggattgaagcgcacgccgtgtttcgggtcccatgcgccgtccacgcggtagccataacgcatgccgtcccatgctttgggcgggtgcacgtaccacaggccgtagttcggtccggtcatgcggaacagggtctcgcgcagatacaaatgttcgataatgcgcgtgcacaccggaaactcatggatctgctggatgaacgaggcgttcgggtcttcgaacaggcggatggcgtcttggaagaaggcgccgggctcgtcaatgggctccagcacacacagccaaacctgatcggcagtttcggaacgaacaacgacgtcagccccaccgtcgtcagtgaagtacagccctgggcgagtggcgtaacgatgcaacggtgggtttttcatacctccattgtagacgtgttgtcacttctggtgtaagcccttgatttcctgccgcgttccgcagcaccacagatatcgtcgagataattctcggcgaatcgcaatgcggcaccgatgatgttctggtcttcggcgcagtagctcttgcgcagattgaaatggtcggtgccgaacggactgcgtgcgatgacgcgcgccttcagatcctcgatgtcactgtcttcaagatgctgggctgcttcaccgccgacaatcacgtcgcccgcgatgatggatcgcgcgttgacgatggcctgcgccacgtaatccagccattcgtccatgcgctcgcgatgatgccgttcaccctgctcaagcacgctgaagaagccgggaatactttcgtaatcctcgggcaaggtctccggcgagcagtaggtgtccatgcaaccgcgctggccgcagtagcattcgcggccgcccggcaccagcgtcatgtgttcgatggcgccattgcacatattcggaccctgatacagcttgccgcccacgatcaccgcgccgcccgggcgtcgctccagatagacgcacaccgcatcggtgagcgtggagtcgaaccatagctcgaccatggcggaggcatcggaatcgtggatcatcatgcacgggtaatggaccgactggctgatggtttcgagcgtaagccccgtgttgcccataatggtgccgaaggtgatggtggtggcgtcgggggagaggatgccttggatggcgaacgagacgccgagcactttgccgtgcttcttttcgacgtcggaggcgaagttgttgatgatgccgccgatacgctggtagtaaacgttggtgttgcggtaaggcagggcatcgttgcgtttttcgatgacgttgccgtacaggttaatcgcgcacaggcgcagttcgttggaccgcatcactacgccgatggcagtgcgatgatcgggattgaactcataattttgcgccttgcgcccgccggtggaatcctgcagttcgcctttgcggatgagtccgtcatcttctagggcgcgcagattttgggtgatggtgggcaggctgaggccgagttcgcgttccagttcctgcttggtgacatggctatggccatacagatactgggtcatggcactgcggttgtgcgctttcactgcggtcgatggcattgccctcatatttacccctttgtacgatgagatatatgtaagtatactttatgaaagtggctttcatgtgcctcgacgcggagattatgaggcaacaatcgtatatttgtaggcgattttgggcacttttttaaaccaattttctagaaatgtggggaaaatgagtacttttggaaacttgatttaagaaagttgtcggattgcgttgtttgcaagcatgtgattttcggtaaaaagtgaacaaaaagtaccaaatcgccgaataaagtgaggatttgttcgatatttcgcacaactcttaacaaaaactgttcaatatcgcacgtgaaacgccgtcgattttgtgcgtatgcatcgcgccggaccgttcggtatattgtgactcaagtcacatatgcaatgtgacaacgcatcaccggtcattttcggttactgaggcggtatcccgctggtgcaactgaggtgacgaggcgatggcccagaactttgccatataccccaagaagatcgaggaggaccccaagtggcagaagcaaagaagaaagtcgaagctgccaatccgaccccagaagagaagcaggccgcagctgaggccgaagttgacgcgctggttgcccgcgccaagaaggctctcgacgaattcgagaacctcgaccagaagcaagttgatcgtatcgtcgccaaggcctccatcgccgctctgaacaagcacctcgttctcgccaagatggccgtcgacgagaccggccgtggtctcgtggaagacaaggccaccaagaacatcttcgcctgtgagcacgtcaccaactacctggccggccagaagaccgtcggcatcatccgcgaagacgacgtgatgggcatcgatgaggtcgccgagcccgtcggcgtggtcgccggtgtcaccccggttaccaacccgacctccaccgccatcttcaagtccctcatcgccctgaagacacgctgcccgatcgtcttcggcttccaccccggcgcgcagaagtgctccgtcgaggccgccaagatcgtgcgcgacgccgccatcgaggccggtgctcccgagaactgtatccagtggatcgagcacccgtccatccaggccaccggcgcgctgatgcagcacccgggcgtggccacgatcctcgccaccggtggtccgggcatggtcaaggccgcttactcctccggcaagcccgccctcggcgtgggtgccggcaacgccccggcctatgttgattccgatgtggacatcgtccgtgccgccaacgatctggtgctctccaagcacttcgattacggcatgatctgcgccaccgagcaggccatcatcgcccacaaggacgtctacgaccagctcatcaaggagctcaaggtccgtaaggcctacttcgtcaacgccgaagagaaggccaagctggagcagtacatgttcggctgcaccgccggttccggcgtcaagcccgtgctgaactccgtggtgccgggcaagtccccgcagttcatcgccaaggctgctggcttcgagattccggccgacgccaccattctggccgccgagtgcaaggaagtctccgacgacgagccgctgacccacgagaagctcgctccggtgcaggccgtgctcaaggccgacaacaaggagcaggccttcgagatgtgcgagaagatgctcaagctgggtgccggccacaccgccgccatccacaccaacaaccaggagctcgtgcgtgagtacggcgtccgtatgcacgcctgccgcatcatctggaaccagccttcctcccttggcggcatcggcgacatctacaatgccatcgccccgtcgctgaccctgggctgcggctcctacggcggcaactcggtgtccggcaacgtgcaggccgtgaatctcgtcaacatcaagcgcattgctcggaggaacaacaacatgcagtggttcaagatcccggccaagacctacttcgagccgaacgccatcaagtacctgcgcgacatgtacggcatcgagaaggccgtcatcgtgtgcgataaggtcatggagcagctcggcattgtcgacaaggtcatcgaccagctgcgcgcccgctccaaccgtgtgaccttccgcatcatcgactacgtcgagccggagccctccgtcgagaccgtcgaaaagggcgcggagatgatgcgcgaggagttcgagccggacacgatcatcgcggttggcggcggctccccgatggatgcctccaagatcatgtggctgctctacgagcacccggaaatcgccttctccgacgtgcgcgagaagttcttcgatatccgtaagcgcgccttcaagatcccgccgctgggcaagaaggccaagctcgtgtgcatcccgacctcctccggcaccggttccgaggtcaccccgttcgccgtgatcaccgatcacaagaccggctacaagtacccgatcaccgactacgcgctgaccccgtccgtggccatcgtggacccggtgctggctcgcacccagccgcgcaagctggcctccgacgccggcttcgacgccctgacccactcgatggaagcatacgtgtccgtgtacgcgaacgacttcaccgacggcatggccctgcacgcggccaagctcatctgggacaacctggctgagtccgtcaacggcgagcccggcctggccaagaccgacgctcaggagaagatgcacaacgccgccaccatggccggcatggcattcggctccgcgttcctcggcatgtgccacggcatggcccacaccatcggtgccctgtgccacatcgcccacggccgtaccaactccatcctgctgccgtacgtgattcgctacaacggccagattcctgaggagcccacctcttggccgaagtacaacaagtacatcgccccggagcgctaccgggacatcgcccgcaacctcggcatcgacaccggcaagaccccggccgaagccgtggagaacctggcgaaggctgtcgaggactaccgcgataacaagctcggtatgaacaagagcttccaggattgcggcgtggacgaggattacttctggtccgtgctcgatcagatcggcatgcgcgcctacgaggaccagtgcaccccggccaacccgcgcatcccgctgatcaacgacatgaaggacatcgccgtcggtgcttactacggcgtctcccaggcggaaggccacaagctacgcatcgagcgcgagggtgaggccgccactgaggaagcctccgagcgctgattgcaggcggttggcggctgctggcaccagcagtagccaccaaccgcggtgttgcagcttagtggctgcatagcggacacaaggagcccgaccccattacaggggccgggctcctttgcatatgtggcgctccctcagccggcaggtgcctccatggggcggtaacctactcatggggcggtaacttgcccatggggcggtgaaaaccccatggggcggtgtacgaaaacggctctattctgcggaaggtaaaattttaccgtccgccccatgggctaattaccgccccatgagggaattaccgccccatggaatcgctgagcgtcgctaaatcaccgcaataatgcagccaaaagcaataaagctggcaaacgcctcggtaatgccggtcaccacgggcttcaaggttgtgcgccgtgtaaccaccggcaacgcaacggcgcgggccaacagcagcacagtcatcgcaatcagatacgggctgcgtccagccggcacggcggctagcagcaatagcgccacatgccatacccacgaagccgccacgtacgaacgcttcccgcgttcccggatcatggttctgaccaccaaaaccgacccatactgcgtcagcgcaaacagcacggtggcaatcagcccgttcacgggcaatgaacccgcaggccaccaggcgtgaaggtcgaatatctggctcaaatctggcatattccgaatcgcggcgcgtgcggcggtgacatcagcggctgcgcacgaggcatgtgctgcgttgatgggaataacacatgccgtctcaacagcgttgccaaacgacgcgatcaccgtggccatggccgatgcggcaatcaccgacacggcattgccccacagcgagcgctccttcctcagccacgaggacagcatcgacagtgcaaccagcactatatataaaggagcccaacgcagtatgccggtatgcgtaatcaggaatggcaagccgatgacgatgagcgctacggcataagtgagcatcggcggcagataacggcgtgaaaagtgtgctttgaaccagtgcgcggcgctgaactgcacgcaatagcacacggcccacgtcgccaacagccaaagcgtatcaagattaggcccgccgataaagaagccagccacagcgggcagcataaccattacccatgcgccaggttggttgtcgaaccaatcgcgtttaagagtcttgcggcgggaagccatatctgtcatgatatcgcagcgaatggttctcaataagaaagatgtgagacctgcattgcgacaatcgaacataggaagtgcgagaagccagtgcttccgccattatgcaacatgtgcgattgttcggaaatgttcatttggctcacattgtgtttatgtgagactaatctcgttgagtatcgccctcggcgctggaaatggcctcggctatcggatcttggctgaagtcgtggttgcgataatcagggtcgtccaccggcagatgctgcaccaaggtatcgaacacctgactgtagattttgccgcgctcgagcaccgcatcgagcacatggccgccgaacgtcttgtcgtcggacaggaagtgctcgtggaatccggccacagccgcgccgtgaaacatcacgggggagaagtacccgagcatggtgcccttgacgtcgtggcgcaggaacacggcctgccggtcggccacctctaccagcgtggggtagggtgcctgctgcttgatgaccgcgcgtgtcttgatgaagctgaacgtgccgcgcacaattaccgaaaagaacgtgttcgcgcggccgttcgccttgacgatcttttcgttgagctcttctaggccgatatcatgacgctcgcactggtactggaaggccgcgcgatggctattagcgaatggcatggtgaagtcgtccggcacgcgttcggccacaccggattggcctatcttgtatgccacgccatccaggatgatgagctcgccgtccaagccctcgccggtgccgatgccggtgtcgccatgcttgagcaattcgccgatggtggtggtgccttccagcagccccggcacgagtaaggccaaagtgccgtgctgatataacacgttggcgccgtgctcacgaataggtttgatgttctttgccagtgattgtgtcacgagccttaagagtaattcgcgttaccgtccaactcaattaatcaatccatattcgccaacgtgagctgtgccactatatataggtaagtctcagaaggatgttggtaggcgacgccgagcggctatgccgcgaggtaatacgaacggcatgagcgcgacacgcgcgaattgctccgcgctgtcccacctcaatgcttgaataaacaagttgcctgatttgggctcgcaaattggaattaaaaaagcgagcgcgggccgggagccatttcaagtgaagtgacagccggaaaccgcgcactgatgtcggatgaccgccagaggacgtatgtccaagggaggccatgcgcgccggtgccctagaagcaggttggtaaacagtacaacgaacatcgctagaaagggcggacggcaatggcgggacagaaaatccgcatcaggcttaagtcctatgaccacgaggtcatcgaccaatcggcgaagaagatcgtcgaaacggtgacgaacgcgggcgcaactgttgttggccccgttccgctgccgaccgagaagaacgtcttctgtgttatccgttctcctcacaagtacaaggattctcgcgagcacttcgagatgcgcactcacaagcgcctcatcgacatcgtggacccgacccccaaggccgtggactccctgatgcacatcgatctgcctgcggacgtcaacatcgaaatcaagctgtaagggaggaggaagcattatgtctaatcgcaaggctctgctgggcaagaagctcggcatgtcccaggtgtgggacgagaacggcttcttcgtgcccgtcactcttgtcgacgtgtccaccaacgtggtgaccgccgtgaagaccgaggaatctgacggctacaaggccgtccagctcggctacggcgccatcgaccccaccaaggtgaccaagccgctggctggccactttgccaaggccggtgtcaccccgcgtcgccacctcgtcgaggtgcgcaccgacgacgtcgatcagttcgaggctggccaggaactggccgctgacctgttcgaagagggtgctgaggtcgacgtgaccggcaccaccaagggtaagggcttcgccggtaccatcaagcgttggggcttcaagtcctaccgccgtactcacggttctcacaagaacgagcgccgtcccggttctgtgggcgcatgcgccactccgagccgtattctcaagggcaagcgtatggccggccgcatgggtcatgtgaccgccactacccagaacctgaccgtcgtctccgctgatgtcgagaacggcatcctcgccatcaagggcgccattcctggccccaagggcggcatcgttctcgtccgctcggctgtgaagggagcctgataaaccatggcaaacgttactctgaacgtcaccgacgccaagggccaggccaccggcaccgttgaagctcctgaggctctcttcggcgtttccgccgaggatgtccaggctcacatcccgctgatccaccaggttgtcaccgctcagctcgctgctgctcgtcagggcacccacgccaccaagactcgtggcatggtttccggcggcggcaagaagccgtggaagcagaagggcaccggtcgtgctcgtcagggctccatccgcgcaccgcagtggtaccacggcggcaccgtgttcggcccgcagccgcgtgactactctcagcgcacccccaagaagatgaaggccgcagctctgcgctacgccctgtccgatcgcgccaacgccggtcgcgttgccgtggtggagttcggtatcaccgagccgtccaccaaggccgctgtcgcagccttggccccgatcaccgcggacaagttcaccacggtcgtcttcactcgcgacaacatcaacgagtggctctccgtgcgcaacatcccgaccgttcacccgattttcgtcgatcagctcaacacgtacgacgtgattacctcgcagtacgtggtcttcaccaaggaagccttcgaggctttcgtggctgccaagaccgagccgaaggaggcctgatttagatggtcgctattcacaagcccgctcacgacgtgattcttaagcccgtcgtctccgagaagagctacgccgcttccgaccgtggccagtacaccttcgtggtggctccggatgcgaacaaggtgcagatcaagcaggcaatcgaagagatcttcaaggtcaaggtgacgaacgtcaacaccctcaaccgcgctggcaagaagcagcgcactcgcaccggtttcggccagcgcgcttcccagaagcgtgcgatcgtgaccgtcgccgagggccagacgatcgacatctttggtaactgaaggctagccgagaaaagttaaaggaagaactacattatggctatccgcgtttataagccgacgaccgcaggccgccgcaacgcgtccgtctcggatttctccgagctgactcgttctacgcctgagaagtcgctggttcgcaagaagtccaagaccggcggtcgtaactcttacggccgtatcacctcccgtcatcgcggcggcggccacaagcgccagtaccgtctcatcgatttcaagcgttgggacaaggacggcgtgcccgccaaggttgccgagatcgagtacgatccgaaccgctccgcccgtatcgccctcctgcacttcgcagatggcgagaagcgctacatcatcgcgccgaagggcatcaagcagggcgacgtcatcgagaccggtgctcaggctgatatcaagccgggcaacaacctgccgctgaagaacatcccgaccggtaccgtggttcacgccatcgagctccgcccgctgggtggcgccaagatcgctcgttccgctggtgctgccgttcagctcgtcgccaaggatggcgcctacgctcagctgcgtatgccgtccggcgaaatccgcaacgtcgacgcgcgctgccgcgctaccgtcggcgaggtcggcaacgaggaccacgccaacattcagctcggcaaggctggccgcgcccgctggatcggccaccgtccgatcacccgtggtgagtccatgaacccggtcgaccacccgcacggcggtcgtacccgcggtggtaagccgccggtctccccgtggggcaagggcgaggttcgtactcgtcgtccgaagaaggcttcgaacaagatgattgttcgtcgccgtccgtccggcaagaaccgcaagtaagggagtatcgagaagatgactcgtagcatcaagaagggccccttcgtcgacgcccacttgcagaagaaagtcgacgagcagaacgagaagggcaccaagaacgtcatcaagacgtggtcccgtcgttcgatgatcacccctgatttcatcggacacaccttcgccgttcatgatggtcgcaagcatgtcccggtgttcgtcaccgaggccatggttggtcacaagctgggtgagttcgcccccacgaagaccttcaagggtcacgtgaaggacgacaagaaggcccgtcgctaaggataaggaatagaacatggaagctaaagcaatcgctcgtcacgtccgcgtgacgccgcgcaaggctcgccgcatggtcgacctcatccgcggcaagaaggcgaccgaagccgtcaccattttgaagttcgcccctcaggctgcggccctgccggtccgcaagaccctggagagcgccatcgccaacgctcgcgtgaaggccgacaaggccggcgagccgttccgcgagaacgacctgtacatcaaggagacctacgttgacgaaggtgtgaccctcaagcgcttccgcgctcgtgcccagggccgcgccgctcgtatcaacaagcgcacctcccacatcacggtcgtcgtggctaacaaggaaggagcccgctaaagatgggtcagaagatcaatccgtttggctaccgtctgggcatcactgagaaccaccgctccaagtggttctccgactccaacaaggccggcgaacgctaccgcgacttcgtgcttgaggatgatcagatccgcaaggagatgagcaaggacctcgagcgcgctggcgtgtcccgcatcgtcatcgagcgcacccgcgaccgcgtccgcgtcgacattcacaccgcccgtccgggcatcgtgatcggtcgtcgtggcgccgaggccgagcgcgtccgcgccaagctcgagaagctgaccggcaagcaggtccagctcaacatcttcgaggtcaagaacgccgcgctggacgcccagctcgtcgctcagggcatcgctgagcagctgaccaaccgcgtcaccttccgtcgtgccatgcgcaaggcccagcaggacgccatgcgcgccggtgccaagggtatccgcatcaagctctccggccgcctcggcggtgcggaaatgagccgttccgagttctaccgtgagggccgcgttccgctgcagaccctccgcgccctcatcgattacggcttcttcgaggccaagaccacgtacggccgtatcggcgtcaaggtctggatctacaagggcgacatgaccgaatccgagttcgaagagcagcaggctcagcagaacaaccgtccgggccgtcgtggtggcgatcgccgcccgcgccgtggcaaccgttccgccgccccgcaggccgtcgaagcccccaaggctgaggctcccgccgaggccgctccggctgcagaaacgaaggagtgagcaagaatgcttatccccaagaggactaagtaccgcaagcagcaccgccctgtgcgttctggcatgtccaagggcggcaacgagatcaacttcggtgatttcggcatccagtccctcgccccggcctacgtgaccaaccgtcagatcgaagccgcgcgtatcgccatgacccgctacatcaagcgtggtggccgcgtgtggatcacgatcttcccggatcgtccgctgaccaagcacccgctcggtgcccgaatgggttccggtaagggcgccccggagttctggattgcgaacgtgcgccctggtcgcgtgatgttcgaaatcggtggtgtgtccgaggacgtcgctaaggaagccctccgccgcgctatcgacaagctcccgatgaagtgccgcattatcgcacgtgaaggtggtgatatctgatggcagtcggtaccgctgattactccatcaagaatctcaacgagaagaccaacgcggaaatcgaaggcttcctgaagaagtccaaggaagagctgttcaacctgcgcttccagcacgccaccggtcagctcgagaacaccgcccgtctcaaggctgtcaagagcgacatcgcccgcatgtacaccgtgcttcgcgagcgtgagcttggcatcagccaggagccggccgccaccgaatccaaggagaagtgattatggctgaagagcgtaacttccgtaaggttcgccgcggctacgtcgtgtccgacaagatggacaagacgattaccgtcgagctcgagcagcgttcgacccacccgctgtacggcaaggtcgttcgttccaccagcaaggtcaaggcccatgatgaacacaacgacgcccacattggcgacctcgtgagtattatggaaactcggcctctgagcaagaccaagcgctggcgtctcgaatccattatcgagcgcgccaagtaagtaaagttcggcaaggctcgccatttaccggggcattatgggcaaccacgatgccccggtaaatggggagaaccagctcggctaaggagaatcaatgattcagcaggaaacgcggcttcatgtcgccgacaacacgggtgcgaaggaactcctcgccatccgcgtgctcggcggatcgaagcgacgctatgccggcatcggcgacgtgatcgtcgcctccgtcaaggacgccattcctggcgggtcggtcaagaagggcgacgtggttaaggccgttgtcgtccgtaccgtcaaggaatcccgccgtgcggatggttcctacatcaagttcgacgagaacgccgccgtcattctcggctccggccgtgaaccgaagggcactcgtatcttcggaccggtcggtcgtgaactgcgcgagcacaagttcatgaagatcgtgtccctcgccccggaggtgatctgacatggcagccaagatcaagagcggcgacctggtcaaggtcatccgcggcaaggaccgcggcaaggaaggcaccgtcaagcaggtgctctccaacgatcgactgatcgtcgaaggcgtgcagatcgtcaagaagcacgtgcgtgcaacgcagcagggccagcaggctggcatcgtctccactgaggctccgatccatcgctccaacgtgatggtcatcgacccggagaccaagcagccgacccgcgttggcatcaccgttaaggaagaggcgcgtgacggcaaggtgaagaccgtgcgcgtgcgcgtcgccaagaagtccggaaaggagctggcatgaccgatactactgtcgaagcgccggccaccccgcgcttgaaggtcaagtacaacgagcagatcattcctgagctcgagaaggagttcaagtactccaacccgatgcaggttacccgtgtccagaaggtcgtcgtctccatgggtgttggcgccgctgcccgcgactccaagctcatcgaaggtgccgtcaaggatctcaccctaatcaccggccagaagccgaagatcaccaaggccaagaagtccgtcgcgcagttccacctgcgcgaaggccaggccatcggtgcgtacgtcaccctgcgaggcgaccgcatgtgggagttcctggaccgtctgctgaccctcgcgctgccccgtatccgcgacttccgcggcatcaacggccaccagttcgatggccagggcaactacaactttggtctcaccgagcagtccatgttccacgagatcgaccctgattcgatcgatcacgtgcgcggtatggacatcactgtggtgacctccaccaaggacgacaaggaagcttacgcgctgctgaagcacctcggcttccccttcaaggagaactgatatggcaaaaaccgctctgaagaacaaggcggccggcaagccgaagttcaaggtccgcgcttacacgcgctgccaggtctgcggtcgtccccactccgtctaccgcaagttcggcctgtgccgcatctgccttcgtgagaaggctcaccgcggtgaactgcccggcgttacgaagtccagttggtaaacatcgacgctgaaggtccgcggcccgaacgcttctagaagaagcgtgagggcggcggaaaccatagcgagaaagggcaacaagcccaaatgacaatgacagatccgatcgcagacatgcttacgcgtctgcgtaatgcgagcgcggccaagcacgaaaccgtggatatgccgtactccaagttcaaggcgaacatcgccgagatcctgaagcgcgaaggctacatcaaggacttcaccgctaaggaagccaaggtcggccagactcttgaggtcaccctcaagtacggtccgaacggtgagcgttccattcagggcatcaagcgcatctccaagccgggccttcgtcgttacgcgaagtccgactccctgccgatgccgctcggtggcctgggtatcgccatcatctcgacttcttcgggactgctgactcagaaggaatgcctcgaccgaggcattggcggcgaaattgtcgccttcgtgtggtgagaaaggagagctgaaacatggcatcgcatattggtaagctccccatcgccatccctgctggcgttgaagtcaagattgaaggccagaacttctccgccaagggcgccaagggttctgactcctacgtggttccggaaggcatcaccgctgccgttgaaggcaacgagatcgtcctgaccgccgctgatgacctgcgtccgacccgtgccaagcacggtctggcccgctccatcatggccggcatggtcaagggtgttcacgatggctactccaagactcttgagatcgtcggcaccggttaccgcgccgtcgccaagggcaagggcatcgagttcttcctcggctactcccacaccatcaccgtcaacccgcccgaaggcatcaccctgaaggtgaccgacgccaaccacgtggttgtcgaaggcaccgacaagcaggtcgtgggccaggttgccgccaacatccgcaagctgcgcgctccggaaccctacaagggcaagggcatcaagtatgccgatgaacgcatcctgcgcaaggctggaaaggctggtaagtgatatgagcgttgctattctcggaaaaggcaagaaggtagctctcaagcgccgtcacgcgcgtatccgcaagcgcatctccggtacccccgagcgtccgcgcctggtggtcacccgctccaaccgtcacatggttgctcaggtggtcgacgataccaagggcattaccctggtgtccgcctccactcttcaggccgacttcgccggcttcgaaggcaccaagactgaggccgccaagaaggtcggcgagctgatcgccgagaaggccaaggctgccggcatcaccgcagtcgtgttcgaccgcggtggcaacaagtacaccggtcgcgtcgcagccgttgctgatggcgcccgcgagggaggtcttgcactgtgagcgacaacgaaacgaaggaaacccaagtggctgaagaaactcagaacactgtggcgaccgaatccaacaacgaggaccgcaagggtcgtcgtggccagcgcggtgaaggccgtcgcggcgagcgtcgtaaccgtcgtgaagaaaaccacggcgacgagctgctcgatcgcgtggtgaccatcaaccgtgtgtccaagacccacaagggtggccgtaccttcagcttcgctgcactggttgtggtcggcgacggcaacggcaccgtgggtgtcggctacggcaagtcccgtgaagtcccggccgccatcgccaagggccagctggacgccaagaagcacatgttctctgtgcctcgcgtccgcggcaccatcacccacccggttcagggtcacgacgctgctggcaccgtcctgctgcgtccggccgccccgggtaccggtgtaatcgccggtggctccgtgcgcgccgtcatggaatgcgcaggcatcaccgacgtcctgaccaagtcgatgggctccgccaccgccgttaatgtggtgcgcgctaccgtcgacgccctcaagcagctcgaagagcccgaggagatcgccgcccgtcgtggcctggcgctcgacgaggttgctcccgatgctctgctgcgcgcccgtgccgccggcattgccgaggctcgcaaggctcgcgaagaggctgctgccgctaaggccgccgaagagaaggatggtgagtgatactcatggctaagaacctgaagattaccctgcaccacggcatcgtgaaccgtaccccggctcagcgcgccaccgtcaagaccctcggcctcaacaagatcggtaagaccgttgtccgcgaggacaccccggccaaccgtggtctggtgaacgccgtgcgtcacctggtcaccgttgaggaggttgactgattatggcagataacgaaatcctgcagatgcacgacctgaagcccgccccgggcgccaagaaggaccgcacccgtgtgggccgcggtgaaggctccaagggtaagacctccggtcgtggcgccaagggccagacgaagcgtaaccacgtgcgtccgggctttgaaggcggccagctgccgctgtacatgcgcctgccgaagcttcgtggcttcaagaacccgttcaaggtcgagttccaggtcatcaacatcgctcgtctcgtggagctcttccccgagggtggcgaggttgctgtggccgacctgatcgccaagggcgctgttcgtgacaacgctccggtgaaggttctgggcgacggcgagaccaccgtggctttcaccctcaagggtgttaaggcttcggcttccgccaagtccaagatcgaggccgccggcggttccgtttccgaggactgattagtcctacggggatcgcaataggctgtacaacccccgcccgccaataggtggacgggggttcccttttctaaaaaattgttgttctgagcgcagagaagcagtctcaacacaatgatcgttttgagtatgcttcccccgttcagtacgacggagcataattcaggtaacattcgcgagacatgaagtggccgaagtaggcactttagactatgctcattcgttagtttgtgtatttcgcgtgattggcgcgctattgggaggaaatctaggtgaggacactaatccaggccctgaagaccaaagagttgaggaagaagattctcttcgtcctgttcatcatcatcgtctaccgcatcggttcgttcattccgacccctggcgtggactacaacgtggtgaacaagtgcatggccactgtcggcagcgcctcccaggagaacttcatcggactggtgaacctcttctccggtggcgctatgctccagctgtccatcttcgcgctgggcgtcatgccgtacatcaccgcgtccatcgtggtgcagctgctgcgcgtggtcatcccgcgcttcgaggccctgcataaggagggccagtccggagaggccaagctcacccagtacacgcgttacctgaccatcggcctggccgtgctgcagtccaccaccatcctggtcaccgcccgctccggtgccctgttcaactaccgctgcgaccaggtcatcccggacggctccgtgtggaacctcgtggtcatggtcctcatcatgaccggcggcaccggcctgatcatgtggatggccgagctcgtgaccgacaagggcatcggtcagggcatgtccatcttgatcttcatgtccatctgctccggcttcctgccgcagctgtgggagatcggctacggcaccaacggcaagaacggcgactggaccaagttcggcatcgtcgtgggcgtgctcgtggtcatcctcatcttcgtcgacttcgtcgaactgtgccagcgccgcgtcccggtgcagtacacgcgccgcatgatcggccgtaagatgtacggcggctcctccacctacctgccgctgaagatcaacatgtccggcgtcatcccgccgatcttcgcctcctcgatcctcgccatcccgaccctgatcgcccagttcggcaagtccgaccagtcctgggtcaagtggatcaacgccaacctggcgaacaccacatccgtgtggtacatcgccctgtacgcgctgatgatcgtgttcttctgcttcttctacacctcgatcacgttcaacccggacgagaccgcggacaacatgaagcagtacggcggcttcatccccggcatccgcgccggcaacgccaccagccg

SEQ ID NO: 2093 - DNA, 14878 bp, Unknown
  R51_24m  MAG No. k141_1037
acgatggaattgaccacagcggtaacggcagagcccatcaccacacctaccgccatatcaatcatcgatccgcgcgacaggaatttcttaaagccattcaacggacctttatcggtcaaagcaacaactttgcgagcggttcctcccgtggccttggcaaagtcggtggcaatattcatgggattgtggttactcataacggcactccttacgaaattcagacacttcacttgtatccgactggttttcccacgactccattatgccgcttgttggaatatccctataccactgcggcgttcccgtacatgactatgtacgagaacgccgccaaccctgcttgcagagaacctgttagagctgcttagaactgaatgtaatcgacttccgtatgttcgccggtttccaagtatttcgccacatcatcaggaccggcgaaaaccagttcgaccgcttgcgcaatcatcagattgacacgatccattggtgtaaggttctcgaaatagccgtacaccggaattcccagcgcatgcgcatatccgatttcgaacatcgtgcccgggtcctcgtccataagattggcgaccacggctttagcagcattaatgccatggatatcatccgcaaaacatccttcagggccgacttcttcgatctggctgacaaaccgcggcttgaacaataccttgccatgatcttccagtatcttttccaaacgttccatacttgccgtttgctcaggatcgaagaacggaccggccacatagaagtcatactgtttgtcttcactcatggtctctagtcatagcgcagccgcgtcggacgccagccgttattttcactgtatggacaaggggtcgtatcgtgaacattactacgggataaccgtcaatgactacgtacgttgcccccgatcagcgcactccgccactttcgcccctcccgtatcgtcgagcacgcgaaccaagccgaccaaatagccgccatcccatgcgctgattaccgtatccgaatgctgcaatgccttgaacaaccgttcgggccactgcgccgattctcaaccaaccgacttgaacggcgcctcaacctgttcgacagtaaaccgcttctcttccgtgtattcgatagccatggaccctcacgataaccgtgaagccccacatgtctttgcatagtttcacatgacgggatgatggatggtggaacctatacgtttacacatgcctaatgcctatggctcatcaccgatgaatagaggctgagataccgtcatgtttccgaagccaagtgcccgagatcggattcgaaccgacgacacccgctttaggagagcggtgctctatccactgagctactcgggcaacgacgtttcattgtacacggccgcacgcccagtcgcatcatgttcgcgtggcagcctacataagacgcatggcagtctgtgtaagctacctggcagaacccgccaccaaggcatggccggttttcgtgctggtttggtgcgaactgctcttgcgcacggcgaaaagacactgaaagacaagccgcacacggtacagtggcaaatcgcacgaaaagcaagataacagtaaacaagccggaggaaagggcagcatggcaaaggcacggagtactaccacaggtgcaagcgtacgagctcgcgccgctgccaagccacgctctgccaaagccacggcacgcccagtatccaagtctgccgtgaagccacacaaacggcatcgtctgcttggttttctcgccacgatgttcgcgcttcttgcccttgccggcactgccgcccgcgcgctgcctgccgatttacaggaactgccatttgtgccgattgtggtatcggcaacgccctggttcacgttgcttggcctgattgccctactgttggccatcgtgtcgcggcgtatccttgccgcactaatcgccatcgccgcaatcgcatgcaatggctattggcaatatccgttcttctactcgaccgacccgctcccccaagccgcgcagaacgccgtggctgcggcctcccccaacaccagcgatgcctacgcgcgcgtcatgaccttcaatgtatacaaggggcaggccgacccacaagccatcgtcgaactagtccgcgatcagcgcgtcgaagtgctcgctttgcaggagaccaccgaggatttcgtcaaaaaactcaacgaggctggcattgagcactatctgccgtatgcgcaggtctcatcgtctgacggcgtattcggtaacggcctctggtcggccacgccacttgccgatccggccgacgatgacgtgaattccagcgcctcattcatgcccggcggcacggtggatatgggtggtcagcagattcgattcgtatccgtgcacaccaccgctcccgtacccggctattggcggcagtggaagcgatcgctggatgagttgggtccgatgcgcgggcatacggatacacggtatattttcatgggcgatttcaatgccacttacgatcacacgccattccgtgattttcttggcgaccggttcgtggatgccgcacgtgaatccggacatgggtttacgttttcgtggcctacgaaccgcgtgtatatgccgatgttcgccggtattgaccacgtggtgcttgatcagggcatgaaggccgggcaatgcaaggtggtcaaagtcgagggctccgatcatgcggcgttgttggctaccgtggcggttgggtgatttcgtattcctcggccagccgcatacactgggacacggcttccagaatcgcctcgatgccggacttcttgattgagccgtcatcctttaaatacttcatcaggcgcactgtggatttggtgctggcctcggggtcagggcgagcgccgggagcggcgtcgacgataagcatgtggatagtgttcgaaccgatatcaagcacaccaagtcgcgtggtgcgcgaacgcagattgaccatgatccctattcctgaccttacccaacccgtgatggccgaacaacgggccgaccatcgcaatcagccagccgtgcgccaccatggcgagtcgttcggccggcaaccaacaccgcgaggccagccgaacatcacacaaactcgactaccgtacaacaatcacaccggatgccgcgccgttcacaacgattcgacgaacgttccgagacgttccagcccctcggtcagggcctcacgtgaggcggcatagctcaggcgcacatgcgtatccgctgtggccgcaccgaagtcgcggccaggagtcagagccacatgggcttcatccagcgcgcgttcgcagaacgtccaggcatccagaccagtacgggagatgttgaagtaggcgtagaacgcgccattcggctccacctcaaccggcaaaccgatgcgcttgagcccgtcaatcacaatgcggcgacgggcaagcaattcctgacgacgagcttcacattcggccaaactctccggcgtaaaacaggcgagcgccgcatgctgggtgggcgtgtgggcgcacaggtagtagttggtggccaggtcgtcgaccgcttccagcacggtggggtcgtcgggcagaatagcccagccgagacgccagccggtcatgccgaagaacttggagaagctgttgcacacgatggcaccgggatcgcaggccagtacggacttgacttcggtgccgtccggctcacggtcggccaaatcaaggtaggtttcgtccacaatgcgccatgcgccgcggctggcggccagcttgcacacctcgtccaatacgttgaagtcgatggtggtgccggtggggttggacggcgacgtgatcattacggccttggtcttgcttgtccagtactggctgcacaggtcggcggtcaggtggaagcgggtggcggccgaggtcggaacgtcgatgacccgcccctcaaaggagcgcacaagttcgcggttgcacgggtaggaggggtcggccacaatcacatcgtcaccggggtccacggtcagcgcggtggccaacagcagggcggccgaaccgccggcggtcacgcagatacgcttggggtcgatgtcaaggtcatgacgctcgcggtagaagtcggcgatggcttggcgcagttcaggtaggcccatggcggcggtgtacggcagggcccggccgtcgtactgttcgcgcatggcgtcgcgtacggcgggcggcgcgccgaaatcgggctcgccaaggcttaatttgatgacgctgataccttgggcgatcatcttgtctgcttgttcgccgaataccatggcacggaagggattggcctcacgcgctcggcgggacatgactggagacgcggccggagattggggctgctgcgctgcttcgttttccatatttcggttctatccgcctcacgggacaaggtttcttcttctataatcactgtaggtcgattgagtgtaccaacccgtattcaaggaggaataatgagtcgattcaatggcaaacgcgccgagttcgaggccagcggcgaaaagatcaacgtcgcgattctgggtgcgggccgcatagctcacaccatggccgacaccctgacccagatggctgaaggttcactgtattcctcatggattcacccgtatgcggtagcggcccgtgatattacgcgcgcgcaggcttttgccgaccaatggcattttgacaaggcttatggatcgtatgaggagttgacggcggacccggatgtggatctggtgtatatcgccaccccgcacagtctgcacgccgaacaggcgatcctgtgtatgaaagccggcaagaacgtgctggtggagaagtcgttcaccgcgaacgccgggcaggcacgtgaggcgctggccgtggccgaggaaaccggcatgctgtgcacggaggccatctggacgcgctacatgcccagccgcaagctcatcaacgaagttatcgagtccggcgagatcggcgaggtgaaagcggcgagcgccaacctgtgctatccggtgtccggcaaggcacgtatgaccgatccggcctgtgccggtggcgcgctgctcgatgtgggcgtgtatccgctgaacttcctggatatggcgatcggtgccgaccatggccgcacgctggatcatttcgatacgtcgatgatggccgccgaaaccggtgtggatgcacagaattccaccacgttgtattacgatgatggcacgatggccgtgtccaccagttcgatgctggtttcctccgatcgcggcggctacgtgtggggcaccgaagggtatttggtggtcaccaatatcaacaatcccgagtccatcgatatctacaacaacgatcacaagcccgtgcgcagtgttgcggtgccgtcgcagttgaccggttatgagtatgaggtggccgatgcagccaacgcgctgctggatggcaagatcgaatgcgaggcgatgccgcacgccgacaccatccgcatcatggagctgatggatgcgattcgcgaccgttggggcctgaagttcccgtttgaggtctgatttcagctcccctccagaggggagctgaaattattccgctgaatctgcatctccttcaacaatctgctcatacagccgtgcgaggcgttcgtcacgcacggctttcgttaattcgcactcccatacggtaattacacgccagccggcggcctccagttcagcccgctgcgcgatgtctcgattgtgattgcgcagtagcttcgtctgccagaattccacattcgatttcggcatcgaatgtttggaacagccttcatgcatgtgccagaaacagccgttgatgaacacgatggtgtggtatttcggcagtactacatccgggtggccggggtaacgcttgtcgttcttgcggaatcgcaaacccttgcgaaacagatagctgcgtaccagcacctcgattttggtgtctttgccacgaatatgcgacatcgtgtacgaacgggtgccccgctcatacttctccactggctgtttcttgcgattcacgcactccagactaccgtgacgttgcggcgaggatgaaagcctgaacgaacaatcacccatcttgcccgtccgtgtctcttatcgcgggcaatgatcatctgccgttcgagactgcacgattagaccgaatcaaatggatgacatgatgattcgtagggccacggcggccgatattccccaaatcgacgaactgctgcggcaggtgctcgaagtgcatcatgccggccgaccggatctgttcaaaggcggtgtcaagaaatacacggacgaggaattgaaggcgattccggccaacgatcagacccctgtgttcgtggcggttgcgccatctgccaatgacggcactgacgtcgaacataacgccgactcccccgccaccgaccaagtgcaatggcatagcgccaagcgacgtctgctttgcgagatttgcgagagatgaatgcgataccagcgttcatggctatgctccttaatccaatatcaatggatgaacctgcactgccccgtatgtcaccatcataatatatcgaatatcaatataaaaatatcgaaaatcactttcaccattcacccacacacatcgcgacgtgatcgaccgttcttgccttgctcgcagcatccacgaccaacacgggaaagtcactttaaaaaagcactttatcaatgtggataactcggaagctagaaccacatacccccgttcagcttgccaatcagaaacctcatcccataccgtcagatgcacccgcacgcaacgacgcgtcagacaacagaaagaaggaccaatgaacatctctacgtttacccacaactcccacccggcaattcggcatacgcattttgtctagtgcgagattgagagttatgatgacacgaagaaaactcatcatcaagaaacttcggcaagcggcaaagcagcgagggctcgatttctatttgttacggcaaggcagcagacatgaggtttactgcctggacgggttgaggatacccatcccccgccataatgaagtctcagaacgaaccacgctggatatcatcaacgagagcgagcagaaactcggaaaggggtggtggcaatgagcaactatgacgtgcttgtgcaacccgatggccgatattggtacgttcaggtaccagctatcgaacggtcgacccaggccaaaggacttgacgatatcgagccaatggctaaagatctcatcactgtcatgaacgacgacgacaatccggagctcaaggtgacgtttgtgttgccgaaacaagccaaacaacacgtaacagaaatgttccggcagcgcgaaatagcaaaaaaagccaacacacaagcggctgccgaatcccgactcgccgcacgggccctacgcaacgaggaactcacgtatcgacaaatcggagctttattgggggtctcctaccaacgagcatttcaattggtcaacggcaaaacaaagcacaaaacgacagcgtccgaatcgcctcagccaacaactgaatcacgctccccacgcacgcaccatgccacaccgctatcgactccggtctcggcttagcgaacgggtccacaaagcccagactgtttccgcctcccaagctcaagagcaccgagcaggatcttctcatcccagcagattgaggagatcgtccttggtgagggtggcgatggaggcgggagcttcggtgagggcgctggcgccggtgccggcttcgtcggcaagcaaggaagcatcggtgaactggcgggcgagctcgctcttggtatgctgaagctccaagatgcgttcttcgatggtgtccttggccaccacctgatacacgttgacgtcttcggtctggccgatacgatgtgctcggtcggtggcctgatcctgcgcggcagcgttccaccatggatcggcgtggatgaccacgctggcaccggtcaggttcagtccggtgttgccggccttcaatgaaatcaggaaggcgggcgtatcgtccgcattgaactggtcgacgagttcgagacgcttctttttaggcgtggatccggtgatggtgtagtagcgtagtccttgcgcgtcgaaacgttcggcgatcagatcaaggaagctggtgaactgggagaagatcagcgccttcttgccttcattcacgcaggtttccaccagttcggtgatggcggcaagcttggccgactgatccttggcatcggcatacagcagccttggatcacagcagatctggcgcaacttggtcagctcggcgaggatgcgaatcttcgacgtgttgaaatcggcttcttcgctgtgttcgagctgcattctgagccgctgctcgtgggccgcatacagtttgcgctgttcgccggcaagctgcacggtcagcgtggtctccaacttgtccggcaaatcggtcagcacttgggacttcaacctgcgcttgatgaacacgcccaccaacgactgcaattggcgagacacccgggcggcctcaggattgacctgtgcggcggcccgaccttcggccgtgctgccatctgcagcccgggcgttggagatgggcaactcgtagcgctcatggaatcgcttgtatgagcccaatagtcccggcatcaggaagtcgaagatgctccacagttcggagagtcggttctcgatcggcgtgccggtcaaggcgaaacgatggtcggcggccacggccttgaccgctttggctatcttcgtggtgtgattcttgatgtactgggcttcatccagcgccatgacattgaaacgttgctcattggcggtgtaatcatcgacatcccggcgcagcaggtcgtatgaggtgatgagcacggtgggttcatccgcccggaacgcgcggccgatggcggtgcggcgctcggctttggtaccggccaccaccacggcgttgaagctcggggcgaacttggcgaattcggcaccccagttgtacaccaaggacgccgggcacacgatcaatgatggatgcggcccgccatcttcggaatcgaaagtaatatgaccggttacggctgattcactattaacagcattaccggcatccatgccttgagcggtcggcatgccactagattcgttatggtatcgcgacagcaacagggcgataagctgcacggatttgcccaaacccatctcgtcggccaaaatgccgccaaaacccttgtcgcacaacgtgttcagccattggaagccttcgacctgataagggcgcagaatatgcttgagactatccggcacttcatacgacttagggtcgatgatcttgagatcgtcgatgtattcggtgaacgaagcgtccttgactacatcggagccgtcatccggcagctcaccatccagtaggaatgctcgaccgcccggcaactcgatcagcccggagttgagctgctgctcgctcagatcaaggtcgctggccaatcggtccaacgtgctgagattcgcgccgctgagtttgaccagcgtgccgtccttcaactgatggaatcgttgacgccgacgatacgaagacagcaaggcacccacttcgtccggcggtacttcatcagcgaggggtgatatctccaccaaattgcctttgatggacaatccgactttgacgcttggcggcttgggcgcgatcagccggtcaaaagccggtgtggtgaagacctcccctacttccttcagtgcgggcaatccctcgtcaaaaagacgaacaatctgcgtggtgtcatcgcgatcgatagtggccgcatcagacacgaattgtttggcggtctttcgcgcggccggcgctcggaacccattcaccgtctgatgagtggcggccgcaacgcgcttgcgctggtcaggcatggtaaagaattcacgcactacatcaatcgcaagatgctcagcgtcgaaatcacgcccaatcacgccccgagacaaggggatggaacgctcatccctagcatgcaccgtcgggccatcgggtagcaacgggacaatggcatcgccgtagtgtgccttgacctcgcattgcacaccatgctcatcacgatccagataaaactggaggctgcattccgtaggacttaattcagccagctcgcgaggaatctcactggcctccaacagtccggcaccaaccagctgaggcaatagcgtgcgtgcgaacagggcgatgtcatcaccggcaatgacctgcccctcgccatcgggttcaaacaggtctcccaatagtcctcgcaacggaatcaatcgtttcgggcaacggacgaatcggcatcccgctgcgcttttacgctgagagcccgccatcatggcggataccgcaccggccggattagtggaggcgagcaacagccatacatccttgccaccatcaatcacggtttccaccgccggcactccggcaagcaggtatccggcatccggaccatacgtattgaaatcacgccgcgcaatgcgcataagaaaatctggctcgccaccatcaaccggcaccgatgcaggctgcccggagaaccatgtgttcaacacgagctgtacgcctctgccctcacgtacggacagtaaccgggccacttccggtgctgaaagtgtcaggtgacgatcgatggcgatatgcccgtaataccggtcctgctgctcggccgcacgacgcacggccatcgcgtcgtcaaggaagcccagcagtgggcgcgaatcatcgtcgaacatatccggcgtatgggtaaaggcaagcttctgcccataatccgtatagtcgccgttcgccatggtaagcacaaattgcggaatcgatttcagtacatagctggacccattggaagtcgatccgatcttgaactccacgctccacacgccatcgatgaaactcaatatcggaacaagctgcacctgccccaagcccacagtctcactatcgccctgatacccgccgcctcgggtgccggcacgagagccgtatccgctattcgtacgtcgtccacctgcgccatttcgtctttttgcagtatcgaatcggcgcatgagcgcattgcggcgacgcgctttggcttgagcatcttgcctatcgacgtgctccatatagtcgatcagcgtccgagacggcctcacagccccggcacggtacccttcaaaacgctgcggatcatcgcagaatatgaaggcgagcgcaatcatgtgcttgcacatgccatagccacggccgtaagccgggcatgagcacttgccaccgacggcttctcccgtatcgaggtcgaattgcacgctggtacgatacctactcgatgggctggtggtgccacgtagaataccatcaagctcggcatacccggttcgatgattttcgctgtataccggattgataaccatggtggccgctttgcgcgcaatgctacgggcacgagcgagcacggtattcgacgatgacgattccacatcgttgcgtaacgcaaggatagggacggcatgggcttcggcacgcttcgcagccccggcgaaatggccttcgtcctcatcttcgaaccatacggaacgtccttgcctgaaacgatagggcatcaccgcatcggcggcggacaaactgtccgttccgccaaacgttacggctctactgccggcagcgcctgtgcccccaagcattccacctgcctcgccagagataccgcctataccgctgctcttgccggcaaagagacccctgtcctcattagtgtcatctgtgtcatctgcgccataccgatcatcgtcgtaatcggcaccttcgtcgcctccccttttccaaggattgcgacggcgcaacgcatggccccaggaaacgccggaatcatcatcctcataaggcaggaggtcatcgtcatccgcattatcgggaacatggccaaatacaccataccctttgctcatgggcgagcctcctttccagcgaatgcatttcagtccaacacttctatcctagacgaggcgcgcggtagccttaatgtatggatgcagacaagccggcgcaacgcaaatcctatgcagggaacaccaccctcgaaatcttcgaggtgctgtggcgtcacagctactttggacatggcctgaccgtgcggcaaatactcgatgaacttgcccgtaaacaccagctggaagatccaagcgagctgccgaccgagaaaaccatacgaaatcagctcaaaaagcttaccgccacggaatttctcggcagacatatcgggcatctcaccgaaagcgaccttgccggcatcgaatgcaagaatccacaacccggctggtatcttgacgcattcctatccaccgccgaaatgcgactgctactcgacagcctcaccttgtctcgcatcagcctcgacaccatggacgatctcatcggtaaaatccgcgaactcgcaggtgccgctgggcaagcagtgggttaccttgagcacgtggccacctacacgcatatcaacggcgagttcctatccaccatcgaccaactgaatcaggccattgaagaaggccacggcgtaaccttccaataccgtgattacggcccggacggcaccctgataccgcataaaagccgtacgggcgcaggtcgaattacctacaccgccgacccttaccagatggtgtacaagaacggacggtattacctcatctgccatctacatggcgaggataatctccgcattttcgtggtcaaccgaatcgccaacgtcagcgccaaaggcaggaacggcacagttccactggaaaaaccagcgccggctgattttgacgcagtgaacttcatgcgtcaccgcccgtatcccgtagccgatgccccgattcgcatccgcatggccgtacgagacgaatccatgctcaacaatgtgttcgaatggttcgacgaccctcagatcaaacattcgccggacggcacacagttcgaagtcatcgtcgatgctcccgaacgcgccgtgttctggtgggcattgcagtattcctgggatggccgcgtagtgattcttgagcccgattcgctcaagcgcaaactctatgatgccgggcgtcgcatggccacagcctatgctcccgaatgatgcagcatcacatcgcacacctccttgccgagttgttcaccagtgaatttcaccggagaacctatcatcccatcgccaatcacgttcggtaattttttaccgaacaactcgatttcaagccattccacgaactatggcccccgcctagccgtacttgacgctaaggtggaaccatcacatgccgcgatgcacatgcaacgcaaacgcaacgatatgtaaggagcaactatgagcgaagagcgtaccgcatggggatggggtctggccagcgtagacgccgccggcaccaccctagacgtctggtaccccgaactgaatctcggtgaggcaccggccgaggccgatcgtccaaaccacaatttcggcactctggctcacgatgaagccgacgcccgtggcatccgccgcgtgccggtattcgtcgtcagccagttggacgagccgatcagcaacgccgcggacgcttacctgaaactccatctgatgagcatgcgcatggccaagccgaacacgctgaaccttgacggcatcttcgcccaactcgccaatgtggtgtggaccaactacggtcctttcgccgttgaggacttcacactacgcaaggccgatgtcgaacgcgcctccaccgaagccgctctcgctttcgctgctcaggccggactgcctgccgcagctcctgccaccaccgtcaacgtgttcggtgtggataaattcccgcgcatgatcgattacgtagtgcccaccggcgtgcgtatcggcgacgccgaccgtgtgcgcctcggtgcttacctatcttccggcaccaccgtgatgcacgccggattcgtgaacttcaatgccggcacgctcggcgtctccatggtcgaaggccgcgtttcgcaaggtgtggtcgtgggcgacggttccgatatcggcggcggtgcctccatcatgggcaccctctccggcggcggcaagctgcgcaactccatcggcgagcactcgctgctcggcgccaacgccggtatcggcatctccctcggcgataactgcaccgtcgaagccggtctgtacatcaccgccggcaccaagatcagcatctgggacaaggccaaggccgcagccggcgagccgctcgaagtcgtcaagggtgctgagctctccggcaaagacaacatcctgttcatccgcaactcggtgaatggacgtatcgaagcccgctaccgcaaggtgggaattgagctcaacgccaagctgcacaagaactgaaattgaaataatggagcgttatcttcgttgctcctcggtcgacgtacttccgtacgccttccctcggtgcgcttcgataccgcacacattatttcaatttcagaactagccctgctcgttcttatgcagccgtcgcagcatagccggtttgtactgtacatatagaaagcgcctcactggatctccagcgaggcgctttctcaaaccaacaatcaccgctcgtccatcggcacgaaatcgcgctcgaccggaccggtgtagacctggcgcgggcggccgatcttggtgttcgggtcggccagcatctcacggtactgcgcaatccaaccaggaatgcggcccagtgcgaacagcgtggtgaacatggccggatcgaagccgatcgcccgataaatcaagccggtgtagaaatcgacgttcggatacaggttgcgcgatacgaaatactcgtcgttcaacgcaatatcctcaagctcggtggccacatcgaacaacgcacgctcgtcggacggcagtttctgcgtatcctcgcgctccatgatcttctcaagatacttcttggcaatcgccgcacgcggatcata

SEQ ID NO: 2094 - DNA, 15311 bp, Unknown
  R51_24m  MAG No. k141_1113
gacacgggcatcaccgaatcgcatgccgtggcgtacgctgccggcatcgcacgggcgggtggcacgccggtggtggccaccacggcgtccttcttccagcgcgcgtacgaccagttcttccaggagatgagcctgaaccgttcgcgagtcacggtacttgattttctgggcggcttgtccggttcggacaatacgcattccggcgcatatgacgtgacgatgttctccaatattccaggggttacgatgctggtgccgacttcggctcgcgactatctggctgatttggcatgggctaccgcgccggccggttcggcggacgcccctgctggtccggcggtgattcgggtgccgggcgaggcgattctggcggcggaacgggatgcgacgctgctgccggtgacgggtgggcagattgctgaccgcccccagtcagcttcgctgccagcctccgccagctccgccagcgggggcatatctgccgcaacagtccgcgggaccgttagcgtaacggctcagcatgccggtgcgcgtcacatgctggattggcgggtcaatcagacgggctcgcaagtcgcgatcatcggactgggcaatgcgtatccgttggcggagcagacggccgccgcattgtctgacgattatggcatcacggcaacggttatcgacccgcgccagtgcacgtcgctggattcagacgtactggagtcgttgcgtgatggccaccagcaggtcatcacccttgaagacgggcagcttgaaggcggctggggcgagaaagtgaccgcatactatgcgaatcatcatgtctcggacggcagccgtaatcctcgtgtgctgaacttcggcgcagccaaggaatttaccgaccgcgtgtcgctgggcgaactgaacgaacgttatggactaacggtggagcaggtgacagaggcgatcactcgttgtttttgatggcgtctagggccgggattttaacggctttattggccgggccgaagccgaatagcaagccgatcagcgtggaaaacagcacggcgaacaggaacagccaccacggaatcaccgaataacgggtcacattctcgccaccaactatcgcctgccagagtatggtccagatagatgttccgccaccggtaccgtcgccggagcccccgccggcaccgctgaccataccgccgctcatgccgccgctcatgccgccgctcatgccgcccgcatacaacgcgccgacaacgttgatgcccagcgatatcagtccgctcagcacgcagccgatcaatccgccgaagaatccgatcgcgccggcctccgcaagaaacatgacgcgaatgtcacgaacgtagcagccaagcgccttcataatgccgatctcgcgcgtgcgctcggttacggacataaccattgtgttggcgatgccgatggccgcaaccaacagcgaaaccgcaccgataccgcccagaatcagctgaatcgcgcgcgactgttcttccaacgacttacgcatgtcttcataggaggaggtctcgtagcccaacgctttgatctgtgattcgacttcgggcacggacttgaggtcggcggccttgaccagcacttgatcataggcggtggcttttttggcggcggctggatcgactttggcggccagttccttcaacgcctgcaaatccatgaccagaccgtcggaggtggcatagcccttgttgtagtcgcccgccacaatgccggaagcccgcacatcgagggtgacgttttccgactgacccgcggcgctgccgcttgcgccgcccgcgccgccaccgccgcccgcgccgccaccgccgccgtacatgttcatgctgtactggtcgccctgataattggtgccggtggtcagactaatttgcgtggcgagcgggtcgaagaacggatcttcgtcctgatctttctcgcactggccggtggcctggttaaacgtgcatgaggaatactgaccgccacgtgtgctggtgcgttgttcgccgttcttcagggtgtccatgaaaccataggcgaaccattcgccggcaagcacctggtcttttttgaccggtttctcgccaccgacgagcttgtagcccatctggtcgagctgggtcatgtcgatgcccatgatctgcacgtaatcatagatgtaacggccacccgcgccggctctggccgtcacgttataagggaagttcatcatcggcgtcacgccggatacgccgctcatcgcgcggaaggattccacggccttgtcgtcgagcttggtatcgcccatcttggacaagccgccatcgtccatcggaccggcataaccgttggtgtacacggtgacgatggacagatcgcccatcgatttgagcatcttctcgttctgctcgttaatgccttggcccaaagagaccatgagcacaatcgagcagcagccgacgataacgcccagcacggtcagaatcgtacgggatttacgccgccataggttttgtctgcagagccgcagtatgtcgccgaatcgcatggtcgggcctttcaggccttgtgggatgagccggctggtgcgactgatgaggctggggtgactggtgtgataggagcggtgtctgccgcagcaccatccgtcacgccggtatcggtcttatcatccttgccttcggaccaatcatcccagtcctcatcaatatcgttcttcttggccttctgcttgcgccggcgacgcaccagcagcacaatcaccacgataatgaccacggcgatcacgacgatgaccacatacaccagcaccggcaatccctgattggcgttctggtccatgttcggatcggccatgccggaatcatccatcggctgcatatcggttacgggtatggtgagcgggaattccttggtcttggtctgtccgtcggaatcctcgtacgtgactttgagcgtggtcttcagctcgcctgacgcgtgcggtgtgaaggcgtaaccaatcgtgccggtggcgccggaagccacattgcccacgtactgggttttcatcgtggcatcgaaaccttcgccctccatcgtggcctcgacgttggcgatatcgcctttgcccttgttcacatattccatcgtgaccgtgttttcctggccggcgatcacctggtcgggcactacgggatcactgatttcgaaccggtcaggctgactgatcggcacggaaatcttgacgtcagactggcttgaggagcgggcgctggcgtccacatactcgtatcggaagttcacggtcacggactgggcaccgcttttcgcggaggcgagcgcctgcatcggcacgctttgcgtcatggcgtaaccggcccacagcgcgtcgacgtagaacgtgttcgtgcctcccgcgatggcgaagctctcgccgccgtccacggtgacgaccatgttcgtcaccgccacctgccccttgttctggaaggtgaagtcgagattgaatttggatccggcggccacggaatcacctccatacgcgaagttggtgatgatgatgttgggcaccggtccggcgatcggcgcggaatcgccgtcgtttccctgagacgtactgttcgtgccgcttgtgccgtctgtgccgtcgaccgcgtacgcctgatgcggaagggagatgacggcaagtgccagtgacagcgtggagagcaacgcgacgatgatggcgatggtgtggtgggagaggtgcttcatcggtcagttccttgggttctatgggcggacggcgtggacggtgtagttggtgtggttggggcggacggcgtagacggaacagttgggcgggaaaggtcggtgttgagccgatcgctggtgatgcggccatcgagcaaggtgacaatgcggtcggcgtatgaggccatctgcggatcgtgtgtgaccagcacgatggtctggttgaagtcatgggcgaatgcgcagatcatcgtcatgacctcggttttggttttggagtcaaggttgccggtcggctcatcggcgaacaccacctcgggcttggtcacaaacgcccgggcgatgccgacgcgctgctgttggccgcccgacatctggcgcgggtaatggctgagacgatggccgagcccgactcgtttgagtacgccacgcgccgcacgttcgcgctgttccttgggcacgccgcggaacatcagcggcattgccacgttttcgagcgcggtcagattgggcagcaggttgtacgactggaatacgaagccgagatgcttctggcggaaggccgccagctcacgctcgtcgagtttgctgacgggtacgccgccgattctcacgccgccgtgcgtcggtttttccatgccggccaactggttgagcagcgtggatttgccggagccggattcgccgaaaatgcagcagatctggccttgcgggatactgagattgacacggtcaagcgccaccaccgtctcatcctcgacggggtattccttgcgtaggtttcttacctcgatgattgctcgcggcacgggcccttcttcccttgttcgtcgccattggcggacgcgcgatagctggttattattcagcacatctcaagtcagagtatagccgttatgcaggagccgcaccccttaagggtgttcccggatggtgatgatgagcatgtgacttctaatctcaaggtcgacagttcaggctccagacggacccagaccggcataatactcaaaagcccctggcccccacagacgatgagggaccaagggtttattgcatcgtgaccccggacgggctcgaaccgtcgaccttgagattagaagtcacatgctctatccagctgagctacggggccaaactcgtgtaagtctagccgtaggggtgtaaaacacctcggcgtaacgtcggcttgcaccggtaccatcggcgatatggggacaacggagagcaacgtagatcacgccgcatcgggccagaccgtcgcaggcgatagtggtgagctcactttcacatacgcacagggtcgttttgccagtgaaggcagggattgggaaagcccggttgtgaccaacatggctgcatccgtctctaccgatgccggcaatgccctcgccggcagcatcatcaacaccggcgccaacaacactttgaccagcaccaccgaatcgtcgcttgccaccctgctgtccgaccaatgcccgttcgttatcaaggccaccattttcgagggcaatggcaaaaacgccattcgcgaacgtcacacattcaccggctcggtgctgcgccagctcgaccaagccagcgccctgctgaacggcatcaacgaatccggccaacacccggccatagccctgcgcgaagcattggtcaacgcactggaacatcgcgattacacgtactccggccccacactgatcaatatcttcgattcccgcctggaaatcgtctcgctcggcggcctgaccgatggtttggaaatcaacgatctgctcaacggcgtatgccagccacgcaccccgcgtttggctgaattgttcgccgatctgggcctctgcgagaactgcggtaccggtattcaacgcattatggacgcctacgcgcagagcgcggtcagtccgcaactgcgcgtaggccccacttcggtggcgatggtgctgcccatcccggtctcggccgaggccgcatccttgcatcggaccgataccgatgcttccgccgcgcccagcaccactgacgaagcgcagcgcgccaaaatgtattcattccccacgattcagcgcatgacggataacgccgcagatgctttggccggcgcacgcatcatcggctgcgcgccattgcagacgctgattctcggcagtggattcggcgagcgcccggacggtgacgaccaggtcagtacccgcccgctcgatacagcgacgctggaaccgtcgcctcaaacgttggagcagttcacgctcaatttcctcgcgttccgcggcgtgaagctcagccgtaaaaccatgcagaaagcgcttggcctgaacaaggatcagatgacgcaactcttggaccagctggagttgagcggcaagatcgaacgtcatacgcacgccaagtccactacgtattcgctggcacatgcctcaggacggtaacgaccagagcggcaacaaagcggcaacgaccagagcaatacagcccaaggcacgataaagcagcagctcagttctcgaatacgcgatcgcgaatcatgcgaccggattcgtcgagcgcggtggagaaacggccgtagtcggacagaatcacgcccatgtacagcatgtccacgagcgcggtatcggccacgcgcgagaaaatcgcattgccatagatcgtgtgcgagtcacgacccgtcagcaacgtcacgtcggcccagctggccagcggcgcgccgatggcattggttatggcgatggttttcgcgccatgcgatttcgccaatcgcaacgctttgaccgtatccgccgaactgcccgaatgggagaaggcgacggccacagcgccgtggggcaggtgcccggcaccgatctgctgcagataagcgtcggtattgagacggcatgtcagtcccaggtagccgagcttggtgaacagatccatcgccggtgtcaacgagttctccacgccgaaaatatcgatgaactccgattcggcgagtagggcgaccgccttgcgataggccttggggtccaacgcactgtgcagctcatcgatcagcgccttcgcgacataggccgctttgccgggaatctcatcttcgccatcccacggattcagatcgaatccagccaacggattgaaggtcactttgtgctcggcggacggatggcgcaacacgtaccgcagttcacggtaaccgccgaaaccgagcttgcgggcgaaacgaatcaccgtcggctggctgacgtgggcgatgtcggccatctggccgacggtcaggtcggccgcctcctcgatatgatcccgaatatactgggccacggcgcgctccgccggacgcagcgacggatacacatggtcgatgcgctcgcgtattcccaccgaggattgcacagccgcgctcctagtcgtccgtattttccattcctgtttcgagggtaccggctgtataccggcgaacagtcgacttggattgaccgcaacatgaacggtgagcgaactcttccgtttacctttccgctccattccctctacaatcaaaaccatggtgcggattagcgtgggaagccccacccatcacacaagcgggcggctgtacggcgtgttcttcgaggacatcaaccatggtgcggatggcgggctgaacgccaacatggtgaacaactacagttttgacggcgtctatctcgaccatcacacgtggcgtatggccggcgccgaacgatggcgtacacaggccgattccctgcgtttctgggatttcatcaactgctccgccgccagcctcggcagtgagatacgcgggattcacggccagcgggtgaccaccgactgccccgccccgccaattcacgcacatagccgatacgctcgcatcacgtccgatgttccttccgaaaccggccctgcatatctggaaaacctcggctataacggaggcggcgacaacgggggcgagcccgcgttctccatcgtcgccgaccacacctattccgtcagtctcgcggtacgtccggttcatgggcgggcgaagctgtccgtcggcgtggtcgataggtacggtctgccgctcaccagcaccactcgattgtcgtatatcgtggacgcagatccgcttgacgatacggaagagaccggtctgaggcaggacgatggcgccaatgcgcaggattccggcgtttcgatcagtccggattcgtcggatggtgccatcgccatcggccgtgacggctggtaccggttcaacgccgacgtaaccggcctgaacaccgattacggcaagctgcgtatcaccattgacgccggcgaacgcaccacgttcgacctggatctggtgcagttcatggatgcggactattggggcgcgggcgacccgaaatggcgttacggcaagctgcgccgcgatctggtggaaaccattcaggcgttgcatccagcgtttctgcgattccccggcggctgcatcgtcgaaggtgtgacgcccggcaatgaatatcgctggaaggataccgtcggctccctggccgcgcgacgccaacagtattcgatgtggtcgttcaagatgccggatggttccagctattcgcagagctatcagatcggcttctacgagtatttctgcctgtgcgaggacctcaaggccaagccgctgcccactctgttcgccggcatcgcatgccagtcgcccggccgcgatccgcgccacatggatatcaattcggccactttccgcaacaatgtgattcaggattacctggacctcatcgaattcgcgaatggcgatccggagtccagctcgtgggccgcggtccggcgtgatatgggccatccagaaccgttcagcctggacatgatcggcgtgggcaacgaaaacttcggggctgactacgtggccaagtttgacatgatcagcgaggccattcacgaacgatacccggatatgctgtgtgtgatgagcgccggactgttccccttccagccgacgatgaaacgcagctgggaccatgcgcgagcgttggccgcaaccgattccggggcacatgattccgccaccggtgacgcgattatcgtcgacgaacattcttaccactcccccgaatggtttgcataccaagcgtcacgattcgacgcttacccgcgttgcggcgccggcgtctatttcggcgaatattcagccaacggctattttgccggccaaccgcagaccgaacagggcgcgaacacgtggaagtcggcactcggcgaggccgcgttcctgaccggttgcgagcgcaattccgacgtggtgcgcatgacctcctatgcaccgctgctcgcgcatatcccggctaaggggtgggcgcagaatcttatcgaactcaatccggcgcatgtgaaccccacggtgaattatgaggtggagcggctgttttccacgcatctgggcgacacgacatatgccgtgtccatcgagcagaccgcgtcacgccccgccaaacatctgtatgtcagtgccaccgggcatgacggggatgacgcctgccgttacatcaaaatcgtcaatacctccgattccccggtggatgtgacgttggaaatcgcgcgcggactggccgggctgggcgcctcgccatcgcgaccggtgcgtttggaggtgacgacgttaagcgccagtccgacggcgaaaaccactatcggataccgcggcgaggcttcgggggcgattgtgccggaacgtcgggcttacacattgccgtcgccgtcttcattgctggcgatgaagatcaagccgtacagcgtcacgctggtggcttcgcgctgattgacatcggccattaggccgattcctttgccgttagaatcaccctcaaggatgagggggaatcgtgcagattcagggaataataggggctatcccccatagcgaatacaagcacgggagggcaggatggaaaccacggcggccagaagaccgccggccaacgatgaaggagtatgcggtatgtttatcaatctgttccgcaggcagcgccctgcgctcgcccggctggcccgcaactccaacgcctatcgtcagccgatggttgcggccgtatcatcgtccgcagtcggcgtatccagcatcacctctgcagccaacacagccaacacagacggcgtatccggcgtatccacgctggatgccaccatcggccgcattcatgacatcccgcagtcagccatgagccgactgaccggctcccccaccgtatacgcgcggtagaccggcccaacccacaacggcggctcagagactcggctcgatgatccagctcaaggtcagcaatacggccaaaaacagaacgttgacggcggagtagacggccagataccggcctttcttgtgcgggtattggcgcacgacgttcttgtaagaaataagcgaggccatcgaggcgatgagcgtacccatgccgcccaaattggtgccaatgatcagatcgcgccattggtcgcagaagccggaaagcagaatcgtggtgggcacattgctgatgacctggctggagccgaccgccacctccagcggatggccgccgaccagcgagcgcgccagttcgtagaattcgggcacgcgcttcatgttgccgatgaagatgaagaacatgcagaaggtgagcggcagtccccaatccacgtatttgaatacgcgccgatcggtgaacaggaacacgacgaccacgatcacgcacatcacccacaggggaatcacgtcggagacggccagtaggcagacgatgaacagcagcgagtagacgatggtgcgccagccgccataaccggcgccgtagccggtgatacgaatctcgtcgggctggtgtttgttgcgctcgggagccagcacgccggtttcgaggtcgcccaggtcgccgaccggtttgccgccaaacaccacggaaatcacgatgaccagcaacacggccgccgtgccggaatacggtgccatgatgccgaggaattccatggtcggcatgccggtcagggctttgagatacaggttgtgcgcgttgccgatcggggtgagcatactgcccacgttcgcgccaatggtcatcagcgtgaccacgaggatggtcttatcctcttgcccagccatgatgagcacggccaccgcgaacggcacaaacgtgaccagcgcaacgtcattggtgatgaacatcgcggaaaagaacgtcaaagcgacaagcgtaatgaccagtccacgcatggtgttgaccttctccagcaatcgcgaaccgatgatgcggaacacgccgatacgctggaatccgcacaccacaatcatcaggcagatgagctggctgatggtgctggcgtgaatgtagcttttgtaatcggcgtccggcggcacaatgaaacacgaaatcagggcgagtattgcggcgacgatgagaatcgtctcatttttggctacattgatcagccagcgtcgcatccattcctccgtgaataacccaatatcgcagccgttctattctacgcgcagaccggcataaggtacgtagtcgcgttgcgctggcggacatgagtttttggatcggtgccgcacatcagccgcgctcgtttttttatttggacaaggaaacattgagtttgcatgtcttccatacaatgaactgccgcgcaatgctgtgcccgtatatacggctgcatcattgtgtggcaggccagacacgaataccgtacgtggctggctcaaaccaatggaacatagtttcattcgaggaagaggagcgatgaagttgcgtattaccccagtattcccggtcaaacgtttcgccgccgtgtctgcacagaacgtgaagaacgtgcagttcgattacacgaacatgcccacgtacaacacgatcaccaagtagcgcgcaccgccgcactgatcggcggcacttgccgcatacatgaatggccggtgtgctgcggattccttaccaagaatccgcagcacaccggccattatgatatatgccgcaatacaggggggcaatcagccctgcaccttaccgccttgcgcgctacggtatccgaagttcatcatctcgctgttgtaggcgaccacgccacggccgaccgccggcagaacgatcatgccaccatcgccatgatgcgcggcgacttcgtccaaagtggccgtcgcggcatcctcgacgttctcgccggcgaaacgcacacgatccgacacctgatgggcggcgaccaccttgatgaatgcctcgccgatgccggtgcaggacaccgccaccgtggactggttggcgaacgtgccgcaaccgggcagcggcgaatcgcccacacgaccgtgcatctggttggtgatgccgccagtggacgtgccggcggcgatattgccttcggcatcgcgcgccacggcgccgatggtgccatgcttctcccactcatcgccaccggactgagcctcggccaaggactgacgacgctgttcggtgatgaagtactcgttgctttcggtcgcgacgccccaatcggcgatctcggcatcggtcgggtccgcgaacagcacatgcttggtctgctctttgacggcacgcgccgcatcgatcgggttcttcacggtgcttacgccggtgaccgcaccgacctcgccatcgccggtcatcaggcaggcgtccatctgggcgatgccatcgctggtcagggcggcaccacggccggcgttgaattcgggagcgtcttccatgacgtggatggcggcgaccacagcctcatgcgccggcgctccggattccaacaactggtatccggcatcgagggcgcgctgcagatcaagttcgacctgggcgatgcgttcaggcgtgctgcgcttgccacgactgcccgctccggcgtgaatgataagcgtgatgccggtttcgctgcccgctagttcagtggtcaccggcgaaacggaggatgtggtcatatcgtgtccctttctggagtcagatggatgtgctgacgccaacgtatcgttgcttccgcatgtatgatagccgttgatggccgcgaccggttccgcatttcgcatcatcggctcgcgatggcgtgactcgttactgcgccacctcgccactacgccaggggcaatgcgatgccggctcgatcggccaggtcacgcaacgaccacgtggtctgccccgttcgcccgacaacgctatgcgcatgccacagcgaactgatgatggcttcctcgcttatttattcgtcgaatgcacccatcgatgtgggtatgcagccatcaaaaaactcgacaaccgcaatgagccagtcacttggctacatctgtgctatcgtctcgccaatgattcgaatgccggtatcaatgtcagcagcatccgggcgcacaaagttgagacgaatatgggaatcatccatttcgtcaacgtcgaacacgctgcccggcatgaacgtgacgccttgggaacggcaggattccaatacatccagagagcgcacgccgtccggtaaggaaacccaaatatagtagccgcctgcaggcacggtccaatacacttcatccggcgcatactgctccaatgctgcgattgctgcatctcgtcgaatgcggtaagtcttgatcaaaccgcgcaaatgttcggcgatgcggccttctttaagcagttccaggcagatgcgctgcgatgacgtgctcgtatgctggtcgaccatgcgccgcagagccgccagccggttaatcacatgcgggtcggccacaacccatcccgtgcgcaggcccgaagtgacggttttcgagaacgtcgacaaatacatcacatatcccgcattctccatgcctttgagcggtatggggcgatgtacgtcggacgattccccgccgtaccacaaatcgccgtaagcatcgtcttccacgatcagacactgatagcgccgcgccacgtcgatgagttcgctgcgtcgttcgggcggcagcgtggtaccggtggggttttggaatgtcgggacggtgtaaatgagcttgggccggaatcgcgcgcaatacccatccaacaggtctgtacgcataccgtgctcgtccactggaacgccgatgatgcgcgcatccgccgaacggaaggtctgcaatgccgggaagaacgtggattgttcgaccagcacgcagtcgccggggttgatgaacgcgcgcacgatgaggtcgatgccctgctcggaaccggagagcaccatcacgttgcggacgccgcattgtacgcctcgtgtgcgcatatgttcggcaagcagcgcacgcaactcttcgaatccctcgataggtgattccggttggccgtcgaattcccgcgattcgaacgcctcgatgctcaccttgcgcagcagatcgtccgggatatccgccgggttcggcgaaccggtggcgaaatcaataatggtgtcgccgcgctgcgcccgctcggccgaggcgatgtcatggtaggtaaaccggttggaataatcagagaacaacaccgaccatggcggacgcacgacggttggctccgggccctgaaccgagcggctttcacgaatcgtatggaccgccgcagagctgctgccctggtccgtcgtcaagaaaccagtggaggtagcacgttctacgtcgccggaagaggaggcttgcgatgttcccatttctgccgacgatcgtgttgttcgcgttattgcattcccgaagtcactgtttgacgtgtgcggtgttcggcttgcggaggcagccggcagcacgaacgtgcctttgccgactttggaggcgataagaccttcgtccttgagctgctgatacgcctgcaacaccgtggtgcgattgacttcgagacacgaggacagctcgcgttcgggaggcaggcggtagccctcggccatcgcgccggagacgatctgttcacgcagctcggcagccagctgccggtacatcggcaccttgctgcgtcgattcagctcaagctgcatggcagatcgtctccttgattcgtcagtcggataccagtctaacggcagacgaatcgactacagcgacaggaagagctcgtggatgcgggtatcgtccgtgagttccgggtggaaggcggtggccaggatattgccttgacgcaagcccaccacgtggccatcgacttcggtttcgaccgtggcttcgggtccgaccgacaccacgtacggtccgcggatgaataccagtgggaagtccgtgatacgctgcggatcatccgctgcaccaaaatcggcggtggcctggaaactaccgagctgacgaccataggcgttgcggcgtacgacggcgtcgagcgcgccaaagtagacgttgtcgtcattgtcgagctttttagccagcagaatcatgccggcgcaagtgccgaataccggtttgcctgccttgatgtgggcggcgatcggctcgaacagtccggtcgaatgcaggagcttgccctgtgtagtggattcgccgccaggcagaatcacgcggtcgatggattcatcgaaatcctcggccgcgcgcagcagtttccacggcgcaccgagcttgtccagcaccgccgcatgttcggcgaatgcgccttgtacggccaggatgccggtcacgccgtgcttgacgttttcgacgtccgcggactcttctttggaaatatattcaacagctacaaccatgttgtctc

SEQ ID NO: 2095 - DNA, 6617 bp, Unknown
  R51_24m  MAG No. k141_1124
aacctgttcgacgagtggcagaaccaccagcgcaccaccgtgcgcatcgacaagccggaggccgaggcgctgtggaagcgcttctccgccgcccgcaccaccttcaaccaggctcgccgcaagtgggctcaggctcgcgacaacgagcgtacagccgccaaggaagccaaggaagcgattatcgccgaggccaatgagctcaaggattccaccgcttggggtgagacttcccgcaagttcaacgatctgatggaccgttggaagaaggccggccgcgctggccgtaacgaggacgacgagctgtgggccaagttccgcgaagccgccgacaccttcttcaacgctcgtcaggctgatcgcgatcagatcaactcctccgagaaggagaatctggctgccaaggaggctctgctggtcaaggccgaggctctggtgccggtgaagaccgacgccgaggccaagaaggcccgccaggagctggccaagattcaggaagagtgggatcagatcggttacgtaccgcgtgacgatatgcgccgcatcgagaaccgtctcgacgccgttgacaagcagatcaaggccatcgaggatgccgcttggaagcagaccgacccggaggccgacgcccgcaagtccagcttcgaggagcagctcaacgcccagctcgccgagctcgacgccaagatcgcggccgaatccgacccgaagaagaaggccaagctcgaagccgagaaggccaccaaggagcagtggctgaacgccatcaagtaagggtctcgtgccaggttcccctctgagggaagccggcagcaaggctgactgaggggagtttacggttataccgcaagctcccctcagtcgcctacggcgacagctcccctcagcgaggggagcttcgtcatatttatgccgttttcttctgccctatactcataactccaccccatagttcctcagtcacccagcaattggtgtcttacgcctgagtccctaccggtgctgcaacaattgccgtgagcccttgatgtgcggccagatattcatgcaacggctggctgtatggcatattcagctcgccgtaattggttccggcacggaaggcgggataactgtcgccgccctgaagcagatatgaattggatgcgataatcaccaggtcatcgtccgcaatcggtcgaccgtcaacggcgaggttcacgatacgaaccgccgcatgttcgtcggcagcacactcgtcagcgtcagcgttggtatcagcggcggcatcggcattgccgctcccaccggtcgtaccgcattcggcataccgatacgtcacgttcgaggagatgccgagccagcgccgctccagtcgcccatcgtcacggtggaattgctcggcgagcactctcttcacatcgcgcccggtgagcgtctcatgcgcggccttgaactgcaaggccatgagactatccacctcgcgcacggtgactttgccatcgccattcatatcaagccgtggagtccgcagactgccattattcgaaaatccgattaccggcaaacgatttccggcatacacatgcttcatgattgactcgcggttcgcgtccgccaccagcacaccgaccgtattcccgtgcttatccgaaccttgtttgtcgaaattcacgccggaggccaaggtgccaatcaccgcgttgccggcatgattcgaatatgttgccgctgcctggtaaatatgctgagcgcgcgatacctcatcgttcgcctcagcaccggcagacatccaagcggcttgcgccggatgcgcattaagcccttccacgcccagcacgccgtcaaccgccgtatggctggtgccattgccgaggtccacatcggccactcgcaccgtggcgcgacgcccggcaccggtgatgatcaaatcctgcacggccatattctgcccgaagctgcccgcctcgtaaataggcgcgccaccagcggtcgtaccacgcttgatcgcgtgactgtggccggtgtataccacatcaacatctcgcccaatatcggcggcggctgaagcatcggcgtgcagcaaggccaccaccgcatccacctttccggagcgtttgagttcacgggccacgcgattgatcgcgtccaccgcccgttcgtcaagatcggcatcacgcgtaatctgcggagtggctaccgagccgagcgcatcagtaagggcgcccacgaaaccgatccgcttgccgttcaccgttcgaatcgtagagtcacgtacatggctcagcagtccgtcaggcgacttactggcggcagacgtgttggcgcacagccagtcgatgccattgctgggatcagcgatgcgattgttgaaatcggcgacaccgcggtcgaactcatggttgcctaccgccgaaatcgtcaatccccacgctttggccatgtccagcgtgggttggtccttctccaccgccgactcatacggggaacctcccaccaaatcgccggtcgataccgggatcatattgccgggattatggctgtcggccacggtgaaggcggtggcgttgtccgcaccacgttcgatatgcccgtgaaaatcagtgatgtcggcgatggtcaccgtacgggtgccggaagatggattatcgccggaaaaaggaacggctcccgtggttcccgcacaagcataaggaaccaccagagccgtaaggataagcgctactgcaccaaaagcgatccccgatcgcttgccggcccaccgccggttcttcatattcctgctcacaccagtcacgctaggatcgtcgattgaacggccatgcctaggaaggcgactctcaggtgaattcttagcggcgtcttgggatgggaaaggcctgaccccgtactatcagggtcaggcctttgcaacccgtgtcactacgaatgcgtcggcaaggggagattactcggcaaattcctcgacgcagatctcagctaccgcatccacgcacgcctcggcaatcaggcggccgcgttcggcgcttgagccggccggattggcgagtccgccgtgagcgggaacgtcaccttggcgcaccgggtagcgtacataggatttcgccgtggcaccggcttcctcgaccatacggtccatgtgcaccagttccggcgcgtagtggagcatcaacgaagtttcggtgacggccgcatgctccaatgcccagccggggaacaccaatccatcgaacaccttgtcgataaccgactgcggaaccgggtcccaccaattggtttccacgatggtggccactcccccggtttcgcgggtgaccaggtcgatggcctcgacgatgaacgcctcgttttcaaaatgcgcgttcatgacgacgatcttggtgaagccatcggcgatgagttcgctcagcacgtcgtgcatttgggtgatcactgtcacgccgttcatgtcgatagtacccgggaacagcggcccgccaccggagagcggcttggacttgtatccgtagctcagggtgggcagcacggtgccgtcgatgcgttccgccagatcttcggcgacccgcgtggcgagtaccgcgtcggtaccgatgggcagatgctggccgtgctgttcggtcgaaccgatcggcacgatgacgggatgagtcttcacctccttgaattccggccaggtcatgtggtccatacggcggttgctacccattgcagtactcctttgggttggtggtggattggatggtcaatgaatgcgcccggctccctcgggaaaggagccggagctgaggagatcagatgtgattcagatccttgtcggtgttttcatgggaaagaatcatcgcgaccaaggcgatggccgcaacacccaccatgtaccaggccggggcgatggatgaaccggttagggcaatcaggccagtggcgatgaacgaggccgtaccaccgaagatggcattggccagattgaagctgaacgcgaatccggtgaagcgcacggaggtggggaacgtctcggtcaggtagctggacagggtaccgtcgttggcggtcagggtggcgcacattgccagctcaaccagcagcacgggccagaactgggaggtgttgaggatgaggaaggcaggaacggtgaggacgatgaacgccacgcaagcaccgatgagcaccttcttgcggccgaatttgtcggagatgtggcccatgccgaacaccatgaacacgtaggcgaccaagcagatggtggtgatggtgccggactgggtggcgtccatgccgacggtgtcagacagataggtcggcaggtaggtgagcacggtgtagaagccgaccgcattcagcacgcaggctccgaagctgatgatcagggccttgagatggttgtggaagagttcggcgagcggggcgaacatgccgctcttggaaacgacttggccgtcagcggaggcggcgctcttggactcaagagcatcgttcattgactggtacacgggggaatcggagagcttggtacggatgtacagcacaatcaggccgagcgggccggccagcaggaacggcacacgccatccccaaccgaccatcgcgctggagttcatgttggcggtcatcagcgtggccagcgtggagccagcgagcagaccgatggcggtggacgccggaatcagcgagcagtagatgccacgctttgaggtgggtgcatattcgccgaggaatgtggccgcaccggcatattcaccggaagcggagaagccttgcaccatgcgcagcagcagaagcagaatcggcgcgccaacgccgatcaccgagtaagacggcaggcagccaatcaggaagctcgcaccggacatgaacataatcgagtgggccaatgcggctttacggcctttcttatctccgtagctaccccagaacagtgcgccgattggacgcaggatgaaggatagcgcgaacacgccgaaggtctgcagcatggcgacggtgtgattgtcggttgggaagaacaccagggcgatggtggtggcgaagtacgaataggaggcgtagtcgaaccactcgatgaagttgccaaggaaggaagataccgcgactttcctgaccatggcctgttcttcagtttgaggggtgaaattcatcagtcgtgcagatgtagtaatcgttgcggaactcatgatgtcaccgtcctttcaaggatgtgctgttcgtgtgactgaatgggattcaagtgggaattcgtttcgcagcaggtcgaccagcgccgcgatagcctcgactatgcccttgagtatttgctgaaacgtgaatcgtcgattaacccgttcggcgtagaagtggacaggttgcccagtggtgctggcgcattattcaccatgcttttcttgccatgatttcgtgagtttggcggcgaatagcagcatcgaccagttcggtttgtcgttatagtcgacgccgaccatttgtgtcactttgtccagtcggttgtacagggtttgccgtctgatacccaattgctcgcacgcgccggttttgctatcgaggttgtcgaagcagacgcacagtgtgtccagcaacaacggagaggcggcgacctcgaatccgatggtctgcaccacgagcatgcgcatcgccttgtccatatcagaggatgcgacgaaacggtcgacgagtgcggacatggtacttacgattcgcccgtatgccggttcctgattggcgatgtcacgcaataccgcgaacccgtcgaccagcgtcaccgtgtccaatgccactcggccatgcaccacgtacacaccgtcgccttccagtacggcaagcgcatccatgcaatggcgtccgaatgcggccgcaccgtctgaggaatcggtggtggagcaccatccgaccatcaagtcaccttccagcatgcaggagacggcacatcccgaccgttcttcgaaccgttcgaccatcgtcgatacatggttgatgccttccaccaccgatctgaaccgaaaagcgaatggcatatagatgcatgatccggcaaaacccagcgcgtcgagcatcgcatgcgcttcctgcgcctcaaatgcattgacgtgcacgccgtcggccgggcccatactcagatgatgcatcatgcccatacgcgcgccgccgtcaatatagagggcggccaccggagacacgatggtggcgatggcccgacgcatcgtggcgtcgaaagtcatggcgcgttgcgtgatctccaatgctcccaccggccgggagcgactttcaagggcgatgacggcgctcgattcgttgccggcatcgaacgcacgacccgctcgagcggccaacagaccgtcaccatcgaaaatggcgacgctttcgccgaacagcgacgcaatggtttcggccacagcctcgatattgccggtacgggacaatccctcacgtaatgaagtggacattgtgtccacctccaattgcaagtgcatctgttcgtgcacgatagcggtattgacactctgacagatgtcgacaaaaggtacgcgagatttcagaccaatcaacgtcaacccatgcagcctggccgcagacaccagttcgtccggcatccgcaccacaccctccaccagttcgaccaccagagcggcgacaccagcctgtgccaggcttgc

SEQ ID NO: 2096 - DNA, 2562 bp, Unknown
  R51_24m  MAG No. k141_1216
acggcacgctgtgcatccaggttccgaagatgcaggcccagccgcaagtcgagtccaagcaccaaatcgcgattgagggctgacgatacttgattcgtcccgaagtcccgcttcgagtagctttgccccctctgacgagggagctcccgcgaagcgggtgggggagagataaatcgtaaccaaaccatgcttcccacgccgcctgccctacgctttcaacgccgactaacctgacagacggcgggaaacatagccaatgcaaatgccgagtagggatttaccctacccggcattttgctgtttcaatcaccgaaccccaccctgttcgcgcgccggtcgtgtgccgttctgcagctgtacacatccgatgagtagaatgccttcgaaacgaggcaagagaggcggacatatggcgaacggcgcacagaacgcaagcggcacgccggccccggcggcgagccgttccggcggccacgtcgtatccgcgcgcgccacgaccatcggcctgatggcgatcctgctgtggagcttcatggccggcaccgtgcgcatcgtctccgaaaacttcggtgccacgcttggttcggccctgatctacacggtcggcggcatcctgctgctgatgttccggcgcccggccccgattcgcgagttccccaagaaatacttgattatcggcggcctgttgttcgtattttacgaatcgtcgatatccctctcgctgggtctggcctctaccgacgcatcctcggtggaagtgagcctggtcaactatctgtggcccacgatgatggtgctgctgtcggcgggcgtatcccatcgcaagcacgcggtcgtcaaggtgctgccgggcgcgattgtggccactgccggcgtggtgctggcggtcggcggtaattccgggctcgactggcatgcggccgtgcagcatatcgccgccaaccctttgccctatgcgctggcgttcgcgggcgcgctcgcttggtcggtgtacgcggtgttcacgccagccatgagtcatggggtggacggcacttcattgttcttcccctgcgtggccgtggcgttgtggattatccacttcgcgtccgggcaggggtggccggccgagccgccgagtctggtcgcatggctgtttgtgttgattgccgcggcggcgattggcggcggttatgcctgctggggctatggcattctgcatgggtctatggagcggctggctattgcgtcctatgccacgccggtgctgtccaccggggccggtgcggtgctgctgggtttggcgctgtcgctgccgttttggtgtggcgcgctgctggtggccgccggatcggtgctcaattacttggtcagtgcgcgcaaatagcggggtggctttgctcatggggcggtaataatcccatggggcggtaaaaccctcatggggcggtatcccaaaatggctttattctgccgtttcacaatttcttcaaaccgccccatgggccttttaccgccccatgggtaaattaccgcccgatgggcagcagcaacttactcgccgcggcgctcggacgggcggcgaatcgggtcaagcagcgtattcggatcggagatgccgaacatgctgcgcccgccggtggattcagggtgcttggcgagaacggccagcgaaatcgcccccggaatcataatgatcaccgaaagggccgccaatccccagttcacgaagaatccgagccccagtacgatggccaccacaaccaccaccgtgacgataatcgtcaacagtgctcgacgtgggttggtttccctggtccaagaggtgctggctgcggattttgctgttgaactggccgcggcgtttgtggctgttgtgccatcagccgtgccggtcgtgggccttgccgccgcgctcgtcgcggggtcagtaggggcgtcagacacgttatcggcgacattgccggtcgctgctggacgttgttcgtttgcgtgagtcatatccaccagcatattccctgcttccggctaaagctgggacaagcctgcgcaccgctaatccagcgctgacactggccttgagctgcggacgtccaggccggatgtgaacaggagctgaacggagtctggggaaaccatgagaactcgcgacaatttttgtgaaattgggtgacgctctatgaatcgcgcgctagtattgcgtgagcttacaagacgaggagcctggagcgcggggacgaaggatgaagaactccgtttggaagacgttcatggaattgtcgctggtccgcggaatcgtgccgtggaccgtgttcggactgaccgcgatcgcggcaatcatactgattgttgggctggcattgagcaagaagcgcggcccggcagcagacggcctggcgccggacggcgaatcgtcggcccaatcgcccgtcgacccagataaccagccggccaaccagcctacgaacgcggctgctacggcgtcatccgcagcttcgacggaagagacgtttatttcccatggcctgcgtacgccgcaacgtcgtcacttgcatccgctggccgccgcgctggccgccgccg

SEQ ID NO: 2097 - DNA, 8365 bp, Unknown
  R51_24m  MAG No. k141_1309
aagtagtccaaatcagcgggcttgcgggacgtgatgagcttgaagccgttggcgtcgtccacgtgcagctgctcgtcgacgtaatggccgcccgcgttctcgatatcggcggcgatataacggcagggcgcggcggtcttgagatcgcgcagcgggcgcgtcagctcggattctcatattccagaaacgggtgcggcgcatgtaacgggcggtaggtagtctgaaggactgtaatgcaaagccgaacaggggagtgaagcatgtcgttggcggtacgagtcatcccgtgcctggacgttgacgccggtcgcgtggtgaagggtgtgcatttcgaaaacctcaaggatgcgggcgacccggtggagctggcggccgaatactatcgtcagggcgccgacgagatcaccttcctggatgtgaccgcatccagctcccaccgcaacacgatgattgacgtggtctcccgcaccgccgaacaggtgttcattccgatgaccgtgggcggcggcgtacgcacgcccgaggacgtcgactcgctgctgcgctgcggtgcagacaaggtcggtgtcaacacggcggccatcaatgacccgtcgcttatcagccgcgtggccgaccgtttcggcaaccaggtgctggtgctctccgtggacgcccgccgcgaaaagggcgagcaacacacgcaatccggcttcgaggtcaccacgatgggcggccgcaaatccaccggcattgatgccatctggtgggtcaagcgcgccgagcagcttggcgccggcgagattctgcttaactcgatggacgccgacggtaccaaggaaggctttgatctcgagatgattcgcgccgtgcgcaaggaagtcaagattccgatcatcgcctccggcggtgccggcaaggtcgaggacttcccgcccgccatcgaagcaggtgccgacgcggtgctggccgcatccgtattccattacggcatcctgaccatcgccgatgtcaaggcggaactcaagaagcacggctacaccgttcgctaaacgaatacaccttgctcccgctggacgaacaatccagtggattgttcgtagcagtgcgctatgcacatgtcgcacataatccgggagctgtcagcgaagctgactgagggtggtccacataaggaagataggtatgacagacactacatacgacaattccactgaactcgatccccgtattgccgcacgcctgaagcgtgacgccaagggcctggtcgctgccgtcatccagcagtacgacacacacgaggtgctgatggtcggctacatgaacgacgaggcattacgccgcacgctgaccaccggccgcgtgaccttctggtcccggtcccgtcaggaatactggcgcaagggtgatacctccggccatgtgcaatacgtcaagggcgtgtccctggattgcgacggagacgcactgctcgtcgaagtagaccaagtcggtgccgcctgccacaccggcaagcgcagctgcttcctcgaaggcggccccctgtccgtggtcgaaggccatcgcccggccgagcagtagaacgggcttccctgactgggggaagccgaacgaccgcgtactacgaaacaagacatcgagttgtaagtaaaggagcgaatatgagcgaatgcagcgtcaaacacctgaagtggggcgccacctggcccagtcgcggccagttccacgaactggccgacgccggctaccgtgtgattccgatcgtgcgccgtctgctcgccgactcgctcaccccggtcggcttctacgagcgtctcgccggcggccgatccggcaccttcatcctcgaatcggcggaatacggcggcacgtggagccgttacagcttcatcggcgtcaactcgatggcccagctgcgctccaacaacggtcaggccgactggctgggcaaggtcccggttggtgtgccagtcaccggtgacgtggtcgaagtcgctcacaccacgttgaagactctgaaggccccgcatgtggaaggcctgccgaacctgaccagcggtctggtcggcacggtcggctgggatgccatccgccactgggaaccgaccctgcgcgccgaagctccggacgagaccggccagcctgagaccgtgctcgccctggccaccgatatcgccgtggtcgaccacgtatccggttcggtgtggctcatcgccaacgcggtgaacgtggatgataaatccacccgcgccgacgtcgcctacaacgaggccgtcgctcgactcgaccagatgcagcacgatgccgccaccccggctccgggcgagtcccgcgtcaacatcttggacgaaacggtcgcccagcctgagctgcgcttccgcaccgagaaaagccactacgagcaggccgtcgaacgcgccaagcagcacatcgtcgacggcgacgtgtttcaggtggtcatctcccagcgtctcgacatcgattcgcctgccgacccgttcgacgtgtaccgtgtgttgcgcacgctgaacccgagcccgtacatgtatttcatggcgttgaccgatgctcagggccgcgacttcaacgtgatcggctccagcccggaaaccctcatcaaggtggacaacggccacgcgatgaccttcccgattgccggatcccgccctcgcggcgccacccctgaggaagacgaaaaattcgccaaggaattgcttgccgatccgaaggaacgcagcgagcacatcatgctcgtcgacctgtcccgcaacgacctgagcaaggtgtgcgtgccgcagtccgtggaagtcgtgcagctcatggacatcaagcgtttcagccacatcatgcacatctgctcgacggtcaccggcaaggtcgacccctcgctgaccgcattcgatgtgttcaagtccgcgttcccggccggcacgctttccggcgcgccaaagccgcgcgcagtcgaaatcatcgacgagttggaaccggccgaccgcggcatctacggcggcaccgtcggctacttcgatctctctggcaacatggacatggccatcgccatccgcaccgcgttcctgcgcgaccatgaggcgagcgtgcaggccggtgccggcattgtgctcgactccgtgcccgctaccgaatggcaggagacgcgcaacaaggccgaggccagcgtcgaatccatccagatcgccgcccagctgcgcgaactgtaacgttcaacgcatagcgatgcccctgctgacaactgctgtcagcaggggcataacaatatgcgtatcagtgggtttcgcccatgatgtcggtggcgtcggttccggtgctcacagcggcctcgatggcggcttcgatgccgcgcgccatggtcgcgatttccatggtcggcgtgccgttcggcttgcccacgccctgcgcggtcgcatacggcacatgaatgaagccgcccttgacgccggggaatttgcggtcaatcagatacaacacgttatacatgatgctgttgcacacatacgtgcctgccgtatacgacatgaatgcgggaatcccgtggtcattgatgttcctgaccatggccttgaccggcaacgtggcgaaatacgcggtgtcgccgtcctcacgcaacggcgtatcgaacggctgctcgccatcattatcgggaatacgcgcctcggccaaattaatggccactttctccacggtcagagccgaacggccaccagcctgaccaatgcacagcacatagtcaggctgctcgcgcaccatggcttcctcaaccacggtcgcactgcgcgtgaacaccgtcggaatctccagtttcaccactgtcgcaccggcgatttcatccggcaacagcttgactgcctcgaatgcggggttaaccggctcgccgccgaacggatcgaatccggtcaccagaatcttgctcatcattagctccttatttcacggattgttgtggtatttggacaacgaggttattgcgcgatcagcatatagacgatctgcaccacaatcatcaccaatgcgggcagcacctgcttcttaatcacacccatgcggtccttcatatcgagcatcgcgacgggcacgatgttgaagttggcggccatcggcgtgcacagcgtgccgcagtagccacaggtcagcgccagaatgccaatcaccgccgggtccgcaccgtaggcgagcacgaatggcgcgccaatgcccacggtcattacggtaatcgcggcgaaggcattgcccatgatcatcgtgaacagcatcatgcccacaccgaatacgatgatgcccagcgtgacgttgcccttcggaataatgccgccgaccagcgtggcgatcacgtcgccgacacctgcggctgtgaaaatcgcgccgagactggccagcagcatcggcagcatgcagagcgcacccatggcagacaacaggcgttccgaatcgttgaggaatacgaccggcttgttgtcatgcgagaacgcgaacagaatcacggcggcaatcatcacaccgatgcagcagccggtcagggcgctgacgctgggaatcagggcgccgataatggcgaacacgcccagacacagggcgggaatgaagatgcgcatgccgatgcgctggaagttcgcggccacttcggcggtgctgggagcgctcgaatcggatgccgagcccttacgcacttggcggaagatggcgggaatgaccatgatgataatgagcacgccgtccgcaatggccggaatccaacggccgaacgcgatgacgataccgagcgccgtccagaacacgaaagtgccgtagcgggccttgttggttttatcgagtaggttgcgtacgcccgcatacacggacatgaaacccatgaaaatatagaagaactcgaggattttcgtgccaacggtcacgctggggtccatgaagaacgacatatcaggcctccttgccggtggtggtagcggtggcggcctgagcggcggcttcggcaccgtagtacttcttgcgcagtcgtgtgtccttgatgatgtaatagacggcggtgaccgccacggcaatcaccgcgacaggaatctcgataatggccatgcgcaacagttcgacgtcataacccagcggcttcaacgtggactgtacgagcagcgcaccggccgtacccacgaacagcacctggccaaagaaccatgcgacgttctccataccggaagccatgcccttgagctcttccacatactcgtcgttcggctcgtgaccggacgcttcaatcgcacccaccgccatcggcatgatgaccggacgcacgaacccggccacgccaccaaaactcacgttgaacgcggcgaacacgagacgcatcacaccatacagggcgatcaccataccgggcgtcgcattcttcaccttgccgatcagctgcgcggctgcggttttcagaccgttgcgctccaatgtaccggtgaccagcaacacgatgatgaaaaccgccatgctgcggttcgagacgaacgacgtacccaacgtggtcaggaagccgtcgacgccaatgccgccgaccagcgcagtcaccacagccgccacgataatgatcagaatcgcatcaagtttgagggcgaaacccacaatcacgatcacgattcccaataacacgagataatttggttccatgtgggaaatccttcctatactgcacacgcattgcgccgcaagcgtgcccggatatggatagtgtacgacggaaatcacgattcaactgtcttatcgcgcacattgcaggttattacatgagtctacgggcgtataagcgtatggacgcatgagcgtcggctgagtccggtcggcatggtgttcgctatgatgtacagtcggactttggtaagagacagtattcgtaacaggcaagtaggttattcatggctattgaggtgcagggacttgaaattcagatcggcgcgcgcacgctgcttcaccccaccaacttccatgtggccaagggagacaagatcggtctggtgggccgcaacggcgccggcaagaccacgctgacccgcgtgatcaccggcgacatgttgcccaccgccggcaaggtgcgcgtctccggcaagctcggctacctgccgcaggacacgcacgcctctgatcccacgcagaccgctctcgaccgcatgatgagcgcgcgtgacatcgccaccatcatcaaccgcatccgcaaggccgaaaaggatatgaccgacccggatccggacgtgatgagcaaggccatgacccggtacgacaaggccatgcaggacttcgacaaggctggcggctacgcggcccagtccgaggcgatttccatggccgcctcgctcggcctgccgcaggaggtcatggagcagcagctcggcacgctctccggtggccagcgccgccgcatcgagctggcgcgcatcctgttctccaacgccgacaccctgattctcgacgagccgaccaaccacttggatgccgattccatcgaatggctgcgcggctacttgaagaagtacgagggtggcttcctggtcatctcccactccaccgaactgctggacgaagtggtgaacaaggtctggcatctggatgcgcagctcggccagatcgacatgtattcgctcggctggaaggcctacctgcaccagcgcgtggtggacgaggagcgtcgccgccgcgaacgcgaagtggccgagaagaaggccgaccgtctcatgaagcaaggcattcggctgcacgccaaggccaccaaggccgtggcagcgcagaacatgatgcgccgcgccgaaaagctgctggaaaacacctccgaggcgcagaaggccgagaaggtggcggacatccgtttccccgagcccgcgccctgcggccgcacgccgatcatggccaaggacatctccaaggcctacggttccaacatcgtgttcgccggcgtgaacctggccatcgacaagggctcgcgtgtggtgatcctcggttacaacggtgccggcaagaccaccacgctgcgcctgctggcccacatcgaggagccggacaccggttccgtggaatacggtcacggctgcaagatcggctacttcgcgcaggagcacgacaccttggatctgaacgccaccgtgttggagaacctgcagcatgtggcgcccgagctcgataacacgcaggcccgttcgattctcggctcgttcctgttctccggtgacgacgcgatgaaaccggctcacgtgctttccggcggtgagaagacccgtctggctctggccacgctggtcacctcgcgggccaatgtgctgctgctcgacgagcccaccaacaacctcgaccccgcttctcgtgaggagattctgaaggccattgccaagtatgagggcgccatcgtgctcgtcacccacgatgagggcgccgtcgaggcgctcaaccccgagcgcgtgctcctcatgcccgacggcgacgaagacctctggaatgattcgtacctcgaactcgtagccgaagaatagtcctaccgtggcccccctaccgggagctgtcagcaaagaacgggttaaccctaggctcccctcgctgaggggagtctcgcaagcatgcaaaggaatcaaccatgccaaccacaacaggccagaagatcgccatcgtcaccggcagcgcgctgggtttgggctacgagctcgccagccaactcatcgccaagggctggctggtggccggcatcgacttcaacgccgaacgtcaggccgagctgagcgcgcagtggccagccgaatcctaccgcgccttcgtaggcgacatcaccgacgaagcgtttgtcaaggaatccgtggcgagcatcgccgcgctcggccacatcgacctgctcatcaacaacgccggccagccttcgttcaaggtgcccaccgcctatgaagccgctgacattgacaaatgcctcaaggggctcaaaggcatgattctgtggacggtggaaaccctcaaggcctgtggagagcgcgacgtgaaaatcgcccagatcatgagcaccgccgccacgcgcggcaacgcgaacgaaagcgtgtactgcgccaccaagtggggcgagaagggctataccaagagtctgcaggccgcatacaagggcaccagcgtcaaggtggtcgccgtctatccgggcggcatcgacaccgccttctaccgtgatagccacgattacgtgtccgaagccaagcagcacaccttcatgcagcccggtccgctggccgaagtcatcctcttcaacctgatcaacgaggccaacctcaccgtcaccgacatcgagatcaaccgcaacagctgagctggcaggttatacacatatccaccgattcggccgagctggttgcgcgcagaagttggttatgccatc

SEQ ID NO: 2098 - DNA, 5387 bp, Unknown
  R51_24m  MAG No. k141_1360
gctgaccggagccttgaagatcgaggacgagccgtgcgtggtgatgatgagcgccaccggtttgattgcccgtaccacgccaagcgcgatggacgtgttcaatgtacggtccacatccgatgaacgtctgcgagacgatcagatcaccacaatcttcgagacctccacgcgcgccacgtacgggctggtcacgtcggccggccgcctggtgctcgcgcatgtggttgatttgcctgccttgcccgctgccgccacattgtcgctgaagggaggagttcaggccgacgaactgatcggcatgaccgaatccaccgatccgattcgtggcgagcgtgtgattacggcgatcgccatggagcagccgacgtccggcaaggccagtgccgaggacgagagcgaggatggtgccgccgaggccaagccgttgccgtcgctggctatcggtacccgtaacggtgtcatcaagcgttggaaccgtgaggcacccaccaccatggattcctggcccgtcattgatctgaaagatggcgacgaagtggtattcgccgccgtggccgaggatgacgaccgtctggtgttcatctcctccgattcctcgctactgacctttgaggcgaagaacgtgcgcccgcagggtcgcaccgcgggcggtatggccggcatcaagctggccgagggcgcccgtgtggcggcattcaacgtggttcccgccggcaaggtggcatggacctatgaggagggcgagaacggtttgacttccggctccggcgcggtggtgctcaccgtggccggcgactccgatgcactacccggcaccgaaaacggcgccgccaaggtcaccccgctggaaatgtaccccaccaagggccgcgctaccggtggcgtacgctcccagcgcttcctcaagggccagaacacgctgattcttgcctgggttggtctctacccgttgcatgcctccacatccgcaggctccccggtcgagcttcccaagcccgatatgcgccgagacggctccggagtggacctcgcctcccccatcgccttcattgcgtaacctcaattaagctccctctgatgggccgagccgtaaagcaaacacccccagtggggtgtttgtaggcgaggagcgaacgatagtgagccaaacacatagagaagagaccctaaacccgacctacactaagcatcaaggaggtggcgatgagactactggttgccgtatccaatgaaccgttgacccgcgccattcgtggtgcgctgcttgcctgtcgtcatgaggtgtccttggcaagcaccggcagtatcgcgctcgccgcggtcaccaaggagctatttgacgcagtgattctcgatgaatccctgctcggcatctccaccgagcaactcatcgaatcccttcacaatgcccgtgcctccgtcaagattctgctgctgacttcgacgccactcagcaaaaccatcggcgaaggcagccgctggcgagcgctgcctgacgagtacgccccgatcgaagagacgccctacagctccttcagcgcggattcacacgcaaacaactcagatgccgaagccgaacagtgcacggacaatgctgccgctagcgcacgagctaatgtacgacacccggatgccgtactgagcaaaccattctccgatggcgaactgctctcatacgtcggctcgcttgccaccgactcccccaccatgatcattcgtggcaatctcacgttggacaccacgaatcgcaaagcctactacgcatccacacacaccgcaatttcactgtcccgtctggaatacagtttgcttgaagcactggtcaaggctgatggccagtttgtcaacaccagcgaattggtcaagctcgtcggtggcccattcttcgagcaacaagggctcctcaggaacgccctctacacactggataagaagctcacccacgccggcctcatcatgacccaacgcggctccaactaccgcattcgatagctgggctcaatcagtacagccgcatgcctcggggaacgggggtgaagccggactggtggaggatgcgggcgaaggggtgacgggcgttgaggggttcgccattgatgtcgctgaatgtcacggaaccggtgccattgcgtttgagagcgtaggccagttctgtggcggccttgcgcatttgttcgtcggaatcattggcggcgggttcatggccgaccgattgatcgaacgccgtcaagtgcttggctttggcagccgcgtatagtagcgcaccttgcgcattgagcacgaccgtggctccgatacgacgtgccggtttacccgcaccggcaggcgcgtccggccacgcgatggcggagccactgagatttgcggggtcgagcacactcaatgccaccacggactggccgcgatgctctgacggatgacgcaacgcatccacggtgtcgcgctcggcaaattgggccgcgccgaaaccacggacgaacatgcctcgtaccagtcgaccatgctcctccatgcgctgcaatatcggatacaacgctgagtagccacccgggatattttccttgtcgatcaccggctgcgcgatgacgccatacctgtccagcaacgtctcgaccagtgcgagcgcctgctcggtctgatcagtgtcttcggcttcagcttgcccgattacggcagaccacaaacctcctaacgtcatatccgtagtggctcggtgaatcggagcgacacgcccacgacgacgtgatgtagtggatttacgcgggcttgctgcgcctgcggttaatgcacgtaccggcgcgaagctggaattggtgaccttaccttgccagaccaagctccacaaggcatccttgaactgctgttcgctccactcttgcggaatgatttcaccggtgtttggattgatgtccggctccgcggcctcattccacacacgtttggcggcatccaccagttgacgggcatggaacgctccccctgagtccagtgcggtcagaatcgcttccggcatggtggcgtctgaggcgttcgatgtcgtaccatgttccacaccgctgagcaatattgaatccgccggatagaaagcaacctcaccggggtccatcgcactggttcccccggtttttgagccgacccagaccacatcgccgctggtcagcaactcatccagcaatgcaggttggtagtctcgtactcgtgcggggaataccgccgactcccagagtgcagtgggcagtgctatgccctccagctgctcgataacgcgcatgagcccgtcggcaccttcatatcgttcgccgccgaccggcccgataccttgtcggtcgataagaaacatctggaacgcctctggttctactggcttgactgctttacgcgccttggccaatgagcgagaccgaatgcggcggaatacgtccttatggagccactgttggccttgcttgtcatcatctacaaaatggccttgcagcaactcgcctttggcagccagtacatccaaagtatgcacggcatccgtagcatcgaggtgcagatcggccatgagctgatcggcggtgaaaggaccatgagttttggcgtaacgggtcacgcgaccagtcacatcatcgtcggcaagttcattccagaaagtgcgctcccccagttcctgttcgacttcgcgaatcacgtccgggttgagcacttgtgccatgtcggtggtgccgagcaagcgttcgagcatgtgcggatcgagagacaacagttgcgcgctgcgctcggcctgaggttggtcatactggtacatcaccacgccgacgaagccaaagagaatgttctcggcaaaaggcgatggcggctcggtctccacgtccttcacggtaatggtgccggcttgcaatccggtcatcacctcgttcagggcgggcatgtcgtatacgtcttgcaaacattcgcgcgcggtttccagcagcagcgggaagttcttgaccatacgtgcggcttgcaggagctgtgcggcgcgcagtcgctgctgccataggggcacgcgacggcccgggtcggatcgcggcatgaacagtgatcgggcggcgcattcgcggaatcgtgcggcgaatagcacggactcgcccacttgacgttctacatctgctttgaggtcttctgggtcgaaaaggaacaggtcttgagcaggaatatgtccgtcaccgtccggtagctgaatgacgataccgtcatcggcggcatatacctgcccatcgaaaccgtagcgttggcgcagtctgcggctgatggccatggaccacggttcgtgaacgcggcggccgaaggggcttaacagtacgatgcgccagccgccgtcttcatcgcgggtccgttccacgatgagggtttggtcgctgggaactgtgccggtgatggcttgttgctcggagagtaggcgggccaggttggtgatagcgttggggtctaggccgtctcggtggagacgggtgaggattgttgggatgaaggttgggacagctggaccttctgcggcagaactccccccagtccgcttcacgtctaatccggcggcgatttctcgggtgaagcgggctatggtacggctgaaaccgtagtcacggccagcgccttcaccgtgccagaacggcagacgggcggtgcggcccggagccggagtcacgaccacacgatcacgggtgatttcctgaatctgccatgtggaggtgccgagcgtaatgacatcgcccacgcgcgattcgtagaccatctcctcatccaactcgccgacgcgacgctggcctttgccggcgtccgcctcaggcaggaccacggtgtacagccctcgatcgggaatcgtaccgccagaggtaacggccactttctgcgaaccgggacgggcggaaatcaggccattatcccgattccataccagtcgcggccggaaggccgagaattcctcgctgttgtattcgccggacatcatgccgattacggcatcgaacatgtcacgtggcagttcggcaaacggcgcagcacggagcaccgtggcataccagtcatcagcgttcaaatcgtgcatcgaggcagcggccacggtctgctgggcgagaatatcgagcggattgcgcggcacggccaatggttctatatcgccggcaatcatggcttccagacttgcggcccccgtgacgatttgctgacgggtgagcgggtagaacaatgcgtgagagacgccaccgacctgatgatcggcacggcctacacgctgcaatccggaggagaccgacaacggtgtatcgacttgaatcatcaagtcgaccgagcccatatcaatgcctagctccaaactggaggtggccaccacgcagcgcaattcaccacgcttgagccgttcctca

SEQ ID NO: 2099 - DNA, 20388 bp, Unknown
  R51_24m  MAG No. k141_1585
cgttccctcgggtcgttggattcggccaggtcggccgcgcacacgccgagaggcatcgatccttcgccggcggggagattgtcggtgacgtggagtcgcacccggacgggtgtcacgccttgcttcagccgacattgacggacgatgtcatccagagcgctggcggtgacgtagccttccaccacgtctgtggcggccagctggaatgagtccgccaatgtgccggtggcggcggagggacggatgagggtttcgaccttggcgaggttggagtccctgcaccagtattcgaccatcattgcgcgccgtcgggtgagacgagtcagattctcggcatccatctgcctcaggtagcctttgagccggtaccgttgctgccggcccagccatggcgcatcgagtccgctgagcatgtatagcgccccgaacgccatgtctggtgaataagggcgcccgtccgccccttgccactgtgattggcggcgtacggaatcctccgtgaccagcgagccgcctcccgcggaaagagattcaagctggccggcagcgcagagcgcactgactcgccgttcgctcactccgagccggcgggcggcttcccgccgtgtgagcagcgtccgattcgttctgatagccatattcctattgtatacagaactattctggattgggaatagttctgtatacaccgggcaacagggcacctcaatccgtattcgtccatatgtggtcattgcgctgctttgatgaagtcttcggcgagttggtggacgatctggttgcggtgtcgggcgacgatgcgctggtagtgcttgatggcgaccttctcgctgacgtggccgagttcgtccatgacctcccgcaaggtgccgcccttgagcatgagcaaggtcgcgtgactcgccctcagggattggaaggtcaggtcggggcggccggctttctccctggctttgcggaactgggcttccagggtggtctggctcatcaccgaggctcgtctggggcggaagaccatggcttccgggtccgtccattcgcagtgcctgagcagatggtcgtgaatcaggggaacgagcccgtcggggatgggcacggtgcgccggctggagtcggtcttggtcctggcgatgcgtgtcgaaccacgatccgcatagcccctgttgacggaatggcgcacggtcaggcgtttggtcttcaggtcgatgtccttgatctgtaggccgcacagctcgccgcaacggaggcctccgacgagcgtggcgagtatcaccgccagtctcgtgtagtcgggcatgctctccgcgatcagcttgagttccagcggcgtgaccggtggaacgtcctccctggcggatcgtggtgctggcggtatgggcaggatgaacgggttgtcgcggatcaacggtggggagccgtccatgcccatcttcgtggcgctggcgaacgccgccttcagacgcatgcatgagcgacggaacgcccattgcccctcggggtgcggtgcgtcataccagcgtttgatgtccgtcggcgtgatctcggtcaggagcttgcccttgaagcccggcatgaagtgcgcgatgtcgagatacaggttccggcgcgtgccgccggctatcctctcgccgttcggcagccggtatccttccgcccaccgggtcacgtaatcctcgaacgagataaggctcgcgcgcttcctgcggcggcgttctgacggatggacccattcctggatgttcttgcggtccagttccaccagatgccgttcctcttcgagccactggtgcgcctcgtgctccatgtccggcttgaactgccgctggaccttcttgcccgggcgtttcgggtccgggtagcgcacctgccaggcgacgagattgcccgcggtatcgtagcgcggcgtcacggtgccgaacctgctccgccgctccgacgacggccccgtactgtccttcttcgtccttgcggacatgatgatgctccttgctgaatccaggatcgatggcacgcataacggcctcgaaaaaatgccaccaaaaatgccaccaagtggccgaatgggctctcggcgagccattgcacctaaaaatgcacctacggcaccttaggtattgcaatcattggggtttaggatgattcgatcactcgtcacaggtagtttcggccatcagccgcatgaagatgacgctaaggagcaacaccgctcgcgtgtctactggaaggaggcgggaatcgttgctatacctaaaattcagattgataataagtaaatatacatttgaaggatttgccgtttgctcttgaggcaattgcctttcgtatccccctctctgggggtacttcattgaagacctcggtcatagcgaccgaggtcttttcgtattcgcgggaccaggcctgaaagcattcggcccgcttccctgaaggaaacgggccgaatgcttggactcgggtttcaacccggaaggcttcagtccagcgacttcaccacaacgacctcggtgggcacgttgcccgcggtggccttggagtaggggcacagctcctgcgtacgctcgacgagcttggcggcagcctcatcgtcaagatcgggcagaactacctcaatcttgcccttcaggccgaaggactcgccttcaggaccgagcgagatgctggcgcgcacctgactcttggccagcttggtggccgccacgcgctgctccttggcggcaagcgccaacgctccttggaagcaggcgccccagccgatggcgaacagctgctcggggttcgtgccctgacccttgccgcccatggcgaccggcgtgtccaggtcgaactccagttccggctcatggctcacggcgtggccgttgcggccgcccgtaacctgcgccgtagcggtgtagacgatttgcgatggttcgttaccttgatatgtgctcatgctttcatctcagcacgtgttcatgcccgccacaaggactgtcccaccgtagacgatgtgacatcatccacactgtgacttcgcgcacagagtcccgacaccgtcctcacctcgtttatcggcaccatgcgtgtataaccgcatatggcattatcggcgaatatcggccggcagaccagttgcacaaggagaacatcatccacatggcagacaccgccaacaccaacgcctggttgccggcgctcaaagcggcgtttccgctgaccataccgatttgcctgggattcttgtttctcggcgcctcatacggcattctcatgggcaccaagggcttctcgtttgtatggccgatgtgcatgagcgcgttcatcttcgccggttcgatggaattcgtcacggtgaatctgctgctctccgcgttcaacccactcgccggctttctgctggccctgatggtcaacgcccgtcacctgttttatggactatccatgctcggcaaattcaaggggctcggctggaagcgtccgtacctgattttcggcatgtgcgacgagacctttgccatcaactccaccgcgaaaatccccgccggtatcgaccgaagctggttctacttctgggtcacgctgtgcaaccagctgtattgggtgaccggcgccacactgggcgggctgattggcgcgcatctgccgttcaataccgacggtcttgatttcgtactgaccgcgctgtttctggtgatcttcctcgatcagtggctcgccggcaagcatcgcgagcgactgtccgccgtcatcggtgtgctgacgtcgctggcctgcctgctgatattcggggccaatgatttcatgattccctcaatgatcgccatgctgatactgttcgtcgcgttgcgcccgcatctggatgtgttgcggccggccgccgacgccccggaagccacggcagaccgtgccatgagccacgcagcggaccagcagaaggaaggacagacgcgatgacgatgaccatctggcaaggcgcgctcaccatcgtgacggtggtgctggggacgatgtgcacccgttttctgccgttcctggtatttcccgaatccaagcagccgccgcgcgtcatcgaatatttcggccgagtcctgccctatgcgatgaccggtctgctggtggtatacgcactgcgcaacaccccgattctgaccggttcacacggccttccggaactcatcgcctgcaccgtcatcgtgctgctgcacgtctggaaacgcagtatgctgctttcaatcgccggcggcacgatcgtatacatgctactggtgcagctggtgttctgaggttgggctcggcttctccttcgttgatctctccctccagtcgccttcggcgaccacctccctctgtgagggaggtgctgaacgcagcgaagcggaggtagagacccgcggtcgtaagactgcgaaacacacagcatcggccacaggccgattcctacagctgcttcgccacccaatcgacgatgtacggagcgacttcctcaatctggtcgatggcgacctcgaactcgtgcttgccgccgtaccacggatccaccaaatcaatctgatcctcgcggccgggcttcggcttgggcagattcgggtcgaagctgcggtacatgtgcacttcggcgcgcttgccggccggcagcatgcgcagcagggcgcgcatgtgggaggcggtcatcggcaggaacaggtcggtacggtcgatttcctcacgtgagatgcggtgtgcgaagtggtcacgcggaatctcatcaccatagccacgttcgcgtagcacgcgcacggcacgcgggtcgatcgggtggctccactcctcgtcggacacaccactggattccacgttcacctggtcgccaagaccgcgctcattaaaaaagtgacgcagaatgatctcgcccataggcgaacggcagatattgccggtgcagacggtcattacggtgtagggctgggtattgctcatagctttgaatcaatcctcaatcgggcttcaccgggccgcacacggcccgaatgtgtttttggggtcgaatgaatatgaatccggctcatgccgccataaaggacacaagccggattcgcatgcttacttggttttgaccaagatacggaaacgataggaatcgatgccggactcctccttggcgggcgtacgccactcacccacttcggcttcccgccacatcccggcctcgaccagcgacgccatatcgggcgcatagctgtcggcatccacagtgacggccagatcagtcacataggctttgtccgcgaacggcaacgcctcggcgaacagctgggcgccgccggtgatccaaatctccgaacgatccagaccgtcgtccggaatcgcctcctgacgggccatatcgagcgcgtcgtcaagactggtgaccacagtggcccccggcgcacggtacatcggatcgtgggaaacgacgatgttatcgcggttgggcagcggccggtacttgacccccagcgattcccaagtcttacgacccataatcaccgggtgggagacggtcagctccttgaaatgcttcatatcctcggcacagtgccaaggcatgccgccattgaggccgatggcaccggcgcgaccttccttgtcgcgggcttcggcccagataagattcaccgagaaggtcttgggataatcgtcaccccagtcttcttcagtggcagacagcccggcagatccgggctcgggttcgtgatagccgctacggctactgtcatgctccatttcgcttactcctcctggattgcggaactgggccttagtgtagtggacagcgaagactcgaggcccgtcgcctccacagtcttcgctgtccacgaacaacgctcagaccgcaacaggtgccttaatagtggggtgatgctggtagccgacgaccttgaagtcctcatactggtagtcgaacagggaatcggccttacgaatctcgatggtcgggtacgggtagggcttgcggcccagctgctcaaggaactggtcgacgtggttgtcgtagacgtggcagtcgccgccggtccagacgaattcgcccggcttgagcccggtctgctgcgccatcatcatggtgagcagcgagtaggaggcgatattgaacggcacgccgaggaacatgtcgcaggaacgctggtacagctggcagcttagcttgccgtcggccacgtagaactggaagagcgcgtggcagggcggcaacgccatcttctccacctcggccggattccacgcggagacgatcatgcggcgcgaatccggatgatgcttgatgaggtcgagcacattggagatctggtcgatggtgcgattcgggtcctcgggggtcggtgcgggccaggaacgccactgcacgccatagaccgggcctaggtcgccgttctcgtccgcccactcatcccaaatatgcacgttgtgctccagcagccagttgatgttggaggaacccttcaaaaaccacagcagctcgtaggccaggcccttgaagaacacggtcttggtggtcagcagcgggaagtacttcgacaggtcgaagcgcatctgctggccgaacagggaaatcgtgccggtgccggtgcgatcggacttcagcgtgccttcggtcaggatcttgcgcaccaggtcctcatagggcatcggaatgtccgtttcgggacgtgcggggatacgggagcgaatatctgcgagttgttcttcggtcaaagccatgtgcaccagtgtagcttaggggcataatagagaagtccgatgatgcgggagagcggccaggtgccgcgctcccccgctggcatggcgatgggccagatcgccggcggctgaaaataaaggagcagctatgggtaagcgactgtgggttgaacgcaacaaggacggttcgtgggatgcgttcagcgacgatggcgcgcacattaagttcggcaaggatcgtggccagttcacgccgggcgatctgatgaaggtcgcgctggccggttgcgccgcgctgtccagccagttcgccatcgaacatacgctgggtgagggcaagggtgccaagatcgtggtggatggcacgtacgaccccgagaacgacgcctacaccggtttcgaggagcaggtggtgattgatgcttctgacgccagcctgtccgaggaggatgccaacaagctcaaggaacgcgtcacccgccatatcgacaagggctgcacggtcaagcacacctacgtacaggagaccccggtgcgcatgaacgtcaccgtcaagcactgacgtactaataaaccgacgtactaataaattgagctccctctgatgagggagctcattgtatacccggactttactgcctgtcgggatcgatggtcttttcgatctgctgggcgacttcaggctcggctgcggacaccggaatctcctcgacgccggcaatctcctccagcgacttggtaggcacttcggcgggcgagctcggcacggtgtcgagacgcgattccgcagcctcaacatacttgcgtggcaccacgtacaccgggccggccgcatgctgcagcagtccctggctggtggagcccagcagcagaccggtgaagccgccgcgaccacgggagccgacaacaacaacatcgtgatcgtagctggccttggtcagtgcgctgacggccgggccggaaacgatctgcttgttgattttcagatcaggatgcgattcctgcaacggcttgatacgcacctcaagatcgtccttgtaggactccatgatggcatcctcgccatccacgcccttcaggttcggcacagcggaaatcacgtccagttccgcaccccagcacgtggcgaagtcggcggcaatgtccagcgccttcagaccccacttggattcgtcggagcctacggccaccttggtaatcgtgttgttcaggtgcatcaggttgccgtcatcatcggtgtacggcaccactacaatcgggcagtaggcgtatgccggcagcgacgaggacgtggtgcccagcagacgctcggccagaccgcccttgccacggttaccaatgacgatcagattgtagttacgcgacaattcgacgaacaccgatgccgggtctccggtaacaatcagtgtggcggcttcgacgccctgctcgtctgcgatggccttggccttggccagaatctcctgagcatcggaatgcgcggcgttatcgtcccccatcgccgtgtaagttgcatcgaacgaaacggcggcatagctcggcagggaatatgcgcagacaatctgcagcgtcagccccgcgtgctttgcataattcgcggcccaccatgttgccttgtaactggcatgcgacccgtcaacgccgacgagaatggccttgtcgttaatcatgacgacctccttgaagttattgtggcacgaataccgcgtacctccaacaataccccgcgacactcggtttggccggtatcctccgctcaaaaagaaatccgcgtatacgaaaaaggcacatcccaaaggacgtgccttaatacgaattcgcttaccgcataattcttgttacatcacgcggcgaatggaatatccagctccaccgaacacggaaacgttgcttattgccgttccctgcaccgggttcatagcattcatcacctgtccgttaccgatgtaaatggccgcatgagtaccattcgcaagaatgtcacccggcttggcatccgccaagcttgcgaccggagtacccacagtggcttgagcaccagaggttcgcggcagggaaatgccaaactgggagaagacgtactgtacaaaaccggagcaatcccatcctgccggagtgttgccgccggcaacatacggatagccttggaacttcagtgagaagctggcaagctcagcgccagtgccagtcattttacccaagtcaacctgtggaatcgacgcacgctgttcagagcggctggctgcagcagcagcagcggactgggctgccgcagcttcatcagcggctttctgagccgccgccgcagcagcagcttccttctcggcctgagactcggtctgtggcacatcaagagtctcgatgccaccccatttagagttctcgtcaaccgaagtggaggtggattcggcgaacaaattcttcttcaccgaactcgccttcgggaaagagcgtgaggacaccacagcactcgtctgcgcggaatcggcagaggcaaacggggctacgcatgcaaacatggcacccgtggcgataaccgccactgatgtggaaataatattcttaacgttcgtcatcagcgccttaccttagcacacatgggtcgatttcataacagaaatgtcttttcgaagatgatgtcgcgggtgtatcactcggcaggagaacgcaacgggcctcggataccgattggcatccgaggcctgcaatatatcaatcaataagactgcatcacgggatacgtaccacgatggtgagtttttcggtcatggcgctagcgagagccacgctgtagccgttccagccaccatggaccgcctgaccgttgccgacatacagcgccacatgatcgtagtgcgcgccgccattccatccaccggtgttggcataaatcagaatatcgcccggctgcagggacccgtctgtaactacgtggccaccgggaacattgacgtactcttcaggccaaccgtggaagttaataccacgggccgccaacgcttgactgaccaatgcggtgcagtccatgctctgtccgatcaaagaatacgcacggtcgatagaggcaccggcaccagcggaaaccgaaccactggcatcggaataagtaacagaagagcgagactcattacggctcgcggcgttggcctgcttctgggtcgcctgagcctcggcctccgtctgcttcttggcctcctcttcggcagccttcttggccgctgcggcatccttttccgcctgagattccgtctgcggcacgtcgaggttctcaatgccgccccaatcagcattgtcctcaacattcgtggcagtggcttcagtcgtcagatctttgcgcacctgggtgtacgaggggaaggacttggtggaagtcacagtaacaccctcagctgcagtcgctgtaggaacaaacataaatgagcaagcacaggagacaatcgcggcaacaatggaagaagctacagttttggtcttcatagaaccatcaccttacacggtgcgcattaactcgtacaggatggaagaaataaaacaccccggagctattgggatatatcggcgtgtcggcacaggtcagttcggactaatacgcggtcgcaacacttgaaatgtcatttcgcgcgaacgattgccgatagggcgacgtcacatccgaacagtaatcaccgaatgtaagccaatgaaatgaatcagtagtggacgtactggaacttaccggcttcggcggcgctgaacgtacgggtcgaaatcacacccaatcccttggcattggattcggagatctcaatggagccgtcggcattgatcttttccagaacggcaacatggccgtatgtgccatcggcattggcctggccaggagcgaacaccacagcatcaccgacatggcgaggagtgttgtccacccaatagcccagagcggaagctgacgccgcccactcgccaccattgccgaagttgccgctggaaggcagtcccagttcggcacgacgctggtacgcgtaccacgtgcactgaccccacggatagttgttggagttggtgccaacggcatggttcgggttgaagccagccggcacagcatcgccatcggcatccatgagagccgacaccacaggattgttcgcattattgcgattcatcagcttggcgtccaaggtgctgtctgaattgctcagcccccaaccgccttcattggtggactgtgcggtaacggaggatgaactcagatcagtacgtgcttcggaacgagaagccgcaggcacatcgctgatgcgcttaatctgcgtggtcgtcgtggccggatcagccacgaacgagttcgtggcgtctttattgttggaaaatgcgagagcacctgcggccgtgccgaccagagcggccagtgaggccgaggcaagaatatggctacggcgttcagcggcacgagcggcctcacgaatggaacgacgagtctggggagcgatttcattgatcttctcggcaatggccggatcaagccccaaaacaacggcgtcgctgccagcggattgcaccgcgcgcacggcacgaacggaatgagaacccttgccggaggcaaacaatgccttcgctaagctgaacttctggcgcgagaccgtggtcgctttatgcgaagcatgcttcatactacgttaactccttggatgggttcggcggggtcattgcgatgacctcgtatgaccgtcacaactgagtactgtacaacaaacagaggtcaatcctcaatgcgatcccccaccatccgggcatgtcaaacgatttacgtaaccgtgcggcagggtgaaagactgccttgtttccgcccgttcccgaacctcactatccggttatcggaagaatcactaactcatgtcattccgacacaccgtagccatgatgtgctgcgtacattctgcactgcattccgcattgccgctactaccgcccggcaccccggaattctgcagtagccccgcagcaatcccgcacaccgagcattatccgcgatattccccaacactggtctacccttgaaaccatgactatcacactgagtattcccgagtcgctgaagcccgaagatggtcgcttcggctccggtcccagcaaaatccgccccgaacagatcgccgcgctcgatgccggcgccaccaccctgcttggcacatcacatcgccaggcaccagtcaagcaactggtcgcttcgattcgtgaaggtctgcgcgagttcttccacctgcctgaagggtatgaggtggcgcttggcaacggtggcgccagcgcgttctgggagattgcctgcgcttcgctgatcacccgtcgcgccgcattcggcacgtatggctcgttcagtgccaagttcgccgcgtccgccgcgaacgcacccttccttgaagacccggtgctgttccccggcgagccgggcacttaccgtctgcctgagctcaccaagggcgtggacacatattgctgggctcacaacgagacctccactggcgtggccgccccgattcgccgcgtgcccggcagtcgtgaggccggtgccctgaccgtcatcgacggcaccagcgcagccggcgctttgcccgtggacatcagccagaccgacgtctactacttctcaccgcagaaggccttcggtgctgatggcggtctgtgggtcgccatcctctcccccgaagccatcgatcgtgcggcatgcgtcgaatcaagcgctcatctggaaggcgcacatcgctgggtgccgccgttcctctcgctgaccacggcactgaacaactcccgcaaggatcagaccctgaatacgcccgccgtggccaccctgatcatgatggaaaaccagattcgctggctcaacagcaacggcggcctcgcctgggccaccacgcgttgcgccaagtccgcatccatcctgtactcgtgggccgagcgctccgaatacgccgctccgttcgtcgtcgatgcggacgcccgctcgaacgccgtggtcaccattgatctggacgagcgcgtccaggcctcccagatactgtccatcctgcgagagaacggcatcgtggacgccgccggctaccgcaagctgggccgcaaccagctgcgcgttggcgtgttcccctcggtggaaccggctgatgtcatggccttcaccaagtgcgtcgactatgtggtcgagcacctgtgatggcggtctatgcctcgcatggccgaccatatatgccatgcacattgatcggtctcaactgataccgattgaataaatcgtagggagaggtgtttgacgcccctccctactcttactacagtgcatgagtatgaagttcgcgcctctcattgaccctgccgtccgcaaacccgcgcccaagcccgtacgggtggacctgcgtaaggtgtttgccatcggtaccggtctatggattgtggcgttgattgtcgtgctgattctgctggccgtgggctacagcgtaatgccgttggtgattatgtgcgtggccggtgtcattattggcttgctactgctgatttgggaatacttcgaccgctgggactaccgccgcctcggacagtaataaagttcactgcgccaacggcaacgtcaggctgaacgtactgccttgcccaggcgcgctccatacggtcacatcgccatgatgggttagcgccacatgcttgacgatggccaagccaaggcccacgccatccgccgtgcgattgctctgttccgcaccccggtagaaccgctcgaagatgcgcgcctggtccttcttcgcgatgcccgcgccctggtcgatcacgcgaatcaccgcacggtcgccatccttgtctttggatgcggacacactgaccacaccattttccttggaatagccgatggcgttttcgatgagcttggtcacggcgctgtcgatctgatccgcctcaccattgatgactagatcatcgtcgcccttgatgttcagctgcacgccagccgcggccgcctgcggctccagtcgcgccaccgtggcctcgagctgttccataacgttcagtcggttggcggaagacggcgtaatcggctcctgtgcgcgtatgagcagcagcaaatcggacaccatatggttgagcttgctgcagctggaacgcacccggcgagcatcggcagccacctgctgttcgtccagattgccggactccagcgaatcggcgagtttggccagagcttcagtggggcccaacaattgctcggatacattggtaataaacgagtcacgcacttgagcgaaacgaatcacgtcactgacatcggtaatcaacacgatgacgaactgctcgttgatacgccctacagtcaccttcagccagttggggcggtggacggactgcgtggcgacgtgatcgcccttgttctggtctgcgacgtaccgctccggagtatcggtggtcaagtcgaactggcgcttgccaccagacttgcgcgcctcgtgaatggcatccagcacctgctgctgggcgatggcgtcatctgacaccacacccaggcggtaggcggcgggattgcagcggaccacctcgtcgtgctcgtcgaccaccacggacgcacccggcagcatggacagcagcgtggcggtgtcgtcggacagatcgtcattgtcgtcatcatcggccagcggcgattccacggacactcgatgtgtcgcaaatcccacgatgagcgtgatgattcctaccacaaataaaacagccgcgacaataagagcaatcgcggcgacgagcggcatctgtgtcatgcccccattctttcacaccacacgctgggattgcggtttgccggcgcgccggtaacatgaatttcaggtgaacaacccaatgaacagtagaacaatttgaggttgccattacctacgttgaagtggggaacaagtactggaataatacactggtacaggttgcaataagcaagcatgaaaggctagagaaatgcgcgttattttcaacgaggagctgaagcaggttgctgacgacctcgaccgtatggcgcagaacgtgcgcaaggcgatcaaaggcgctggggaagccctgctgaatcaggacgttgaagccgcacagactgtgattgacggcgacatcgagattgatgccctggagtcctctgtgatcgaccagtgcgtcaagctgctcgccaagcagaacccggtggccaccgatctgcgtgtggtcgtttccaccatgcgtctggcttccacgttcgagcgtatgggcgatcttgcccgccacgtggccgaggccgctcgccgcacctacccggccgccgcgattcccgaatccgctcagccggtgttcgccgagatgatcgacttcctggacaacaccgctgaccagctggtggccatgctctccgatcgcgatgccaagaccgccgaggccatcatcctggccgacgacaagctggacaacctgcaccaccagaccttcgatctggcgctgtccgatgacatcacccgtcagcagaccgtggatatcgtgctgctgggccgcttcctggagcgtctcggcgatcatgccgtgtccgccgcccgccgtgtggtgtacatcgtctccggcttcgaccccaccaaggagccgacccgcgacgagggcaccgacatcgactgattggggcttgtcctcacattgggcgaataactgaacacttgtcctcctatggtttgaggaggatgcccgaaagcggcgatccggctacggctggacgccgttttttgttgcttctgggcggtacaccggcgtatccatggggcggcaaaacacccatagggcggtaacttgcccatggggcggtttgaaggatatgtgaaaccgcggaattaagccattctggcataccgccccatgagggttttaccgccccatgagggttttaccgccccatgagagttttaccgccccatggggtaatcaccgccccatggggatttggcaggcatagcaaaggggagccacacattatgcgcgactccccttacagcttgtaccgtgttagcggcttaggctcacttctggccttgagcggcgacagcggcggcaccggcagcagcagcctccgggtccaggtactcgccacgcggcttgatcggcttgaagttctcgtccagctcatagagcagcgggatggcggtcgggatgttgaccttggcgatctcttcctcagacaggttgtccagcatcttgacgatggcgcggagggagttgccgtgagcggcaatcagcacggttttgccggccttgagctccggctcgatggcggactcgaagtacggcttcacacgctcaacaacgttggccaggcactcggcttccggaaccggatcgccggcgtagcgcgggtcgttgttctgggcgtactggtcgttcgggtcgatctcgggcggcggggtggcgtaagaacggcgccacagcatgaacttctcgtcgccgtactcttcgcggatctcggtcttgttcttgccctgcagagcgccgtagtgacgctcgttgagacgccagtcacgctgaaccggaatccacagacgatctgcggcatccagagcgatgttggcggtgttgatggcgcgacgcagcagggaggtgaacacgatgtccggaaggacgttcttctccttgagcagctcgccgccacgcttggcttcggcttcaccctgctcggtcagcggtacgtcgacccagccggtgaactggttggttttattccatgcgctctgtccatgacggagcagtactagtttataagtcatacggttcagtctacagccgcgtgcgcccaaacacgagtattcgtcttattatttcgctctcatagcgccacggcaaccgccagcaccaccgcaaacagcaaggtctggaagctggcggcgggcagagccgggcggaattgacgtttattcacgctggagaccatgcgcacaggtattccggtgcccgagagcaacagcaccgcaccccacggccaccataatgtaccgcacatcagcagggcgatgatccatgcgatgacgcagcacacaatcagcaacgtacgcgcgccggactcccccagccgtacggccagcgtgtgtttgccatgctcacgatcctcgtcgatgtcacggatattgttcaccatcatgatcaggcaggagaacaggccagccgccacagcacccaatagtccgccgacgtccaccgtgccgcacagcgcgtattcggtgcccaataccgcagccaagccgaagaacaggaacacgccgacttctcccagcccgacgtatccatacggatgcttgccaccggtgtagaaccagccggccagcaaggaggccgcgcccacggccagcaaccaccatgcttgggcgagcacgaccgccacaacaccgcatatgcaggcgatggcggcgcaaatcatcgccgcgaacagtacatgcttggccggtaccagtccggatgcggtcagtcgctggggtttgcctgatttcgattcgtccgtgtcacgcccggcgtcagtgccgcggatgccgtcggaatagtcgttcgcatagttgacggcgatttgcaggaacagcgcgactagcaggcacaggatggtcaccggccagaatcggtccatcagcaaggtctgctgttcacgggccgtggcgcaggaggccggttctggatatattgcgatgcaggtgcccgaccgctcgatatgcacgtacgccatcaccgccccaaccatcaccgacgcgatggaagtgaccaaggtcttgggacgcgcgccccgaacccacaagccgatagacataagcaatccctttcatatataactctggctcccctctctgaggggagccagagtatgcctaatcagccaacgagcggcttgaccagcgggaaggtgatggtctcgcgaatcgtggcaccggtcaaggcgataagcagtcgatcaatgcccatacccataccgccggccggaggcatgcccacgccgagagcctcaaggaagtcctcatcgatgtcgcaggcctcttcgtcgccggcgagtgcgtccttggcctgggccacgaaacgctcacgctgcacgatcgggtcgttgagctcggagtagccggtagccagctcgaagccgcgcacgtagagatcccacttctccaccacgccgggcttggtgcggtggcccttgaccagcggggaggtttcgaccgggaagtcacgcacgaaggtgggctcgtaaagcttgtcctcgtagaagtgctcccacaggtgttcgacgagcttgccgtggttctccacgtcgtcgcgctccacgccgagcttgtcggcgatggcgcccaaatgctcaacggaggtgccgggatgctcagggccgccgttcggcacgatttcctcgcccaatgcctcggacagcgaatcgtacatgctgatggtcttccattcgccgccgaagtcgtattcggtgccgtcgagcagggtgaccttgtgcgagccgtagacgtccatggcggtcttctgcacgagctccttgaccagctggccgatggaatcataggtgccataggcctggtaggcctcgaccatggtgaattcgggggcgtgcgtggcgtcgacgccctcattgcggaagtcgcggttgatttcgaacacgcgatcgatgccgccgaccaggcagcgcttgaggaacagttccggggcgatgcgaaggtacaggtcaaggtcgaaggcgttcatgtgcgtggtgaacgggcgggcggccgcgccaccgtgcagggtctgcagcatcggggtttcgacctcgaggaagtcgtggtcgtcaaaggtgcggcgcagggaggccacggccttggagcggttgcgcaccatgttgcggatgttctcgtccgcgatcatgccgatgtacggcttgcgggtgcgggtgtcttcgttcaggtccttgtgcagggccggcagcggctgcagggccttggaggcgatagcccactcagtggcgaatacggacagctcgccggtcttggaggcgatgacgcggcccttgaggtacaggtgatcgccaaggtcgacgagctgcttgaactgcttgagcgagtcggcgccaatctccttcttggagatcatgccctgaatcttggtaccgtcaccggcggacagctgcacgaagcacaggccgcccgcgttgcgcaggaacagcacgcggccagcaatgccgaccatgtcttcggtctcttcgccagcctcgagcttgccgtcatacttggcgcggaccgcctcgatggtgtcggtgacgtccaagtgcaccgggtagggggcgatgccggcctcaagcatcatcgcgcgcttggccacgcgcatctgcacctgctcggggtgagccagcgggccgaactccttgttggaggggtccacggcttcgtccagcgtggcaccggacttgatcttctcgcggatggtggcgtcctgctcgagcagcatttccgcacgttcgacggtgctcatctgcgggacggccggggtttcattctcagtgttttcggtattttcgacaacttcagccatgattcatcagtgtacgcaaggccggcgattatgagcccggcagaccgtacggccatctgaacacccgctcacatgacgcaaaaccggctctgcacaaggcttgagagacctgtacacacggcgaatccaccatcacgcaacactcgcgacatgccgatttgcattgtccaccaccacaatgtaatatctacgtctgttgccaaacgggctgtagcgcagcttggtagcgcgcttcgttcgggacgaagaggccgcgggttcaaatcccgccagcccgacaattggaccggattgttgagaaatcagcaatccggtttttcgtttcctaacccaacaatcagaccaagcgatcggacagcggtaaacaacccgccgcgcacagcgacaaaccgcgtcgcggcaaggcccgtatttgttggcggaccaccgtaatatatcgctcgaatcaatcgattgccgcactgtttttgtaagtaatactgaagtaattagaggaaccatgaagaagagtctgcttgcactggcttcgggcgcgttcattctcggtgccgccgagttcgtgatgatgggtattctgccgcaggccgcggccgccaccggcgtgggcatccccaccgcaggccattacatttccgcgtatgcgatcggcgtgtgcttcggcacactgattctggtattcggccgcaaggtgccgccgaagaacctcatcatattgtttatggtgattgcgcttatcggtaatctggcctccgcgttctcggtcaatgccgccacgctgattgtcgcgcgcttcattgccggcctgccgcacggcgcatttttcggcaccgccacactcatcgccaaaaccttggccgacaagggcaaagaagcacaagccgtatcggtaatggtcaccggccaaaccgtagccaatatgctcggcgtaccggcgggcaccttgatggctgagttcctatcctggcgcctcgcattcggtattctggctgcatgggcggcaatgacgattgtgctggcgttggcgtggattccgtacgttgcgccgattaaggacgccggcatcgccggtcagttcaaattccttactcgtcgtggaccgtgggtgattctggccgccgtattcaccggcaacgcaggcgtgttctgctggtggagctacgtctccccttggctgca

SEQ ID NO: 2100 - DNA, 21976 bp, Unknown
  R51_24m  MAG No. k141_1611
tggataagttccagaatcacagcagccaccggacccttgccatagcggccgagaccggtctgtgcaaaagcgtcgtgcagggcgaccttgtcgccggcgcgcacgaattcaatgttcggcaccagcggatcatacggcttgcggataccgggtttccatgtggcggacagcgcacccatcgtacggccatggaagccgtgagtcattgcgagaatgcgtgcgggcttgccgccgatggaaggcagggcaccaggcaaggtgcggccatacagcttggcaagcttgagggcagcttcattgccttcagcaccggagttgccgaagtagactttggagccttcaggtgcaccagccagcttgaccagtttggatgccagctcaatttgcggctcggacgcgaaatagttgctgatatgagccaccttggcagcctgatcggcaaccgctttgacccacttggggtgggcgtatccgagggaattgacggcgatgcctgccaggaaatcgaggtattcgttaccgtcaacatcccagatgtgggcaccttggccgtgatccatgacgcgcaacggcgtaccgaacacattcatgtggacctgagagtactctcccagccacttgctgtcttccgtacctagtttttcctcatgctcagtagccataagagctcctcatttccagtccttcatcgggcataaccatggtaccgatgcctgcggaggtgaatatctcattcaaaatcgaatgcggcttgcgcccgtcgatgatatgggcttggggcacgccaccgtcgatggccctgacacaggcctccatcttgggtcgcataccggattccaggtccggcagcatatcgcgcaggttttccacaccgatccggccaatcagagaattcttgtccggccaatcggcgtacagaccatccacatcggtcaagataacaagcttgcgtgcgcccacagcggcagccaaagcggcggcggcggaatcggcgttcacgttgagcacttcagtggcatcttcttcgttcggagccacggaagagacgaccgggatacgaccggcggccaccagatcctcgactgccgaggcatcgacggaaaccacatcgccgaccaagccgatatcggtgggcttgccattgatgatgggcctgcgctgcatggccgagaacaggccgccgtcttcaccggacaggcctacggccagcgggccgtgcgcgttgatcaggccgaccagttcgcgtgacaccttgccggtcaggaccatgcgcaccacgtccatggcctcgggggtggtgaccctcaggccgcctttgaattcggatttgatgccgagggccttgagcatgtgggagatctgcgggccgccgccgtgcacgacgatcggatgcaggcccacctgacgcaggaagaccatgtcttcggcgaagcactgcttcagatggtcatcgaccatggcgttgccgccgtatttgacgacgatacgctggccggcgaactcctccagccaaggcagcgcttcaataagcacttctgccttctgatcggcgcgcaaatcggtgtgcacgtcgaaatggaacccaggtcccttcaattctgtagccaatttttctcttttctgcgacgccggcgacgctatcgctgccggctgctacaaacagcccactgggctgtttgcgttatatgcgacgccggcgacgctatcgctgccggctgctacaaacagcccactgggctgtttgtcagctttcgtagtcggcgttgatgtggacgtattcgtgggtgaggtcgtcggtccagacggtggcctcggcgtccgagccggtgttcaggtcgatgtcgatgtggacttcgcgcggggtcatgtcgacctcgctgcggtcgcggccggcgccgccgttctcgcagatgcgcacgccgttgacgtccacggtcaccttgttcgaatcgtaaggcgcgacttcagacggcacagtgcccaaggagctgacgatgcggccccagttcggatcgttgccggagatggcgcacttgagcaggttcgaggcggcgacggcacgaccacaggcaagtgccgcgtcttcgctggtggcaccggtgacggtgatacggatgtcgtgggaggcaccttcgccgtcgccgatgatttggcgggacagggatgcgcaggcctcacgcaccagcttgttgaattcgtccttgtccggttcgacgccggaggcaccggaggcgagcagcaggaccgtgtcgttggtggacatgcagccgtccacgtcgatgcggttgaacgaatgttcggcggccacggcgagtgcggcctgcatctggccggcggagacgaccgcatcggtggtgatgacgcacagcatggtggccagctgcggggcaatcatgcccgagcccttgaccatgccgccgatcttccagccgttggagccggtcagttcgaccgttttcggcttggtgtcggtggtcatgatggcgtgggaggcggcggcgccggcttcggcggtggcggcaagagcctcatgggcactcttggcaccagccagcacgttgtccaacggcagcagttcaccgatgagaccggtggagcagacagccacatcattcggttcggcgccgatgagaccggcgaccgtttccgcggtggcgacggactgggcgtaaccggcctcgccggtgcaggcgttggcaccgccggagttcagaatcacggccttgacgtgaccgtcggcgacgaccttacggctccactgcaccggggcggcgcagaaacggttcgaggtgaacacgcctgcagccgcgtcgagcgggccgttgttgaccacgagggccaagtccttcttgccttcgacggatgaaataccagccgccacgccggcggcggagaaaccttgtgcaaatgtaacgctcacggtgctactccgatcttggtcaggcccgcgtcttccggcaggccgagtgcgatgttcagtgattggaccgcttgtccggcggtgccacggttgaggttgtctatggcggcaaaagcgtagatgcggccggccttgcggtcggcgacgacctgcaggtgggctgcgttggatccgatgatgttgccggtggcgggcagtgtgccctcgggcagcagcaccatgaagtcctggccttcataggccttggaccatacggcgcgaatctcctcatcgctcagtgccttggccttgtccgtcatgcgggcggacacggtggcgaggatgcctcgggacatgggggcgagaatcggcgtgaagccgagcgtgaattcgctggcttcggccgcgctcttgccggccgcgtgggcgaagttctgcagaatttcgggaatgtggcggtgcttgccgcccaccgaatacggcagggcggattgcagggcctcggcggcaagcaggttggtgcgcttgagattcttgccggcacccgagtatccgacgaccagatcggccacgatatcctgcgattcaaccagtccttcggcgatgccgggctggagggccagcgtggtggcggtgacgttgcagccagggcctgcgatgcgcttggtgccaggaagcgccgcgcgctggcgggtgtatgagccgtccgcggctttgccggtgatgagctcgggcatgccgtaggtccaatgctcatagaaatcgccgccgtagaactcatcccaagcggcctgttcttcgagacgatggtcggcgcccaaatccacaaccacggcattcggatcgagctgcgaggcgagcttgcccgaagcaccgtgcggcagtgcgaggatgataacgtcatgcccgttcagcacttcgggcgtggtatcttcgacgaccagattggccagttggggaatatgcggcatgtgcttggccatcgactcccccactgaggaatggcctgccacgcaggtgatgtcgaagtcggggtgcgcggccagaatgcgcagcgcttcaccgccggcatagcccgtggcaccggccacggccactgtatatttcgccatactcatctcttttcactgatgtgtcttgggatgagtatacgcgattatgcagactattgcatatttatgcagtgggtgtgttggtatgtgaacgctacttatgcggagatggagtcggaggaggagccggtgccgccggtgagttgctggagggcttcctggtagaggctcatggcgtcatagccattgaaggccatccagatgacggcgatggtgtacagcacgttgatcaccacggcggccacagccaaaccgaagcctttcatatggaaggtgcgcgtgcgccacattgccaccgcgcccatcagtgccgagagcactggcaccgggaagaacagggcgaggataaaggagatgatcgcatacgaatcccagtgcccgtagagtgggttctggtttggatcgttcaggtcgatgccgtggtaataatgcggctggtgaggctgaccgttcggctgttgaccatacgactgcccctgcatgcccgggtacccgcccggatatgcgcccggaccggactgttggccgccttgagcatacggccagccgcccgcctgctgattgccgggccacgccggctgctgaccgtacggctggccggcctgctgggattgcgccgcgccaccgttgatgccagcggctgcggcggaatccttcttggtatccggctcgggagcgccataaatatacgggttgtaattcggcccgtattggccagacatagcaccatattcaggctgctggtactgcccgtatttcggcttgtcctgctccggttggctcatgacgctcctcgattcggatgatcggttgggtcaggcgcgcagctgggcgccgatttcggcggcctcagccacgatggccttgcggatggcgtcgctgtcttcggcggacagcgtcttgctcggtgaacggaacaccaccgcataggccagagacttcttgccctcgcccacctgttcgccggtgaacacgtcgaacagttcgatggattcgaggttcgcgccggcggccttgcgaatcacgttctcaagctggcctgcggtcacggtctcgtccacggtgaaggccaaatcctgcttgaccggcgggaacgtggagatcggcttggcctggacgggcttgccggtcagcgtggcgaacagcgcggtgaggttcagctcgaaggccgcggaatgggccgggaagccgagcgcctcgttgacgcgcgggtgcagttcaccaacccagccggtgaagacgtcgcccaccatgacgcgggcgacgcggccggggtgccattggacgggcacatcgtcggcggcgggctggtcgagttcgattgcggcaccgatacggccggcgatgcggcgcacggcctcgacggcgtcggaccagtcgaccgggcgcttgccgcccatccagccatcgtcctcggccagaccggtcaggatgccggccacatggtcgggctgttcgggcagaccggcgtcaagcgcggcgagctgttcgtcggtggggcgcacgccgccgggcagtgccgggatggcgggcgcgttcggatcccacaggtagacgtggccgagctcatacagggacacgttttcgatgccgcggcggatgttgcgctgcacggtggtggccagggtcggcagaatctcgcgacgcaggtacggacggtcgccgtagagcgggttggcgatctcgacgctgaccttcttggtggcttccgggtcgaagccgaaggccttgtaatcgtcgtcgcccacgaacgggtagctcagcgattcgaccatgccgaactcggcgagctcgtccgccacgcgacggcgacgctgctggtccggggtcaggcccaccagaccctcgaccggtgccggcggcacggtgatcggaatctggtcgtagccgaccagtcgggcgatttcttcgaccaggtcgcacggctcgttcaagtccggacgccagctcggcgcggttacggcgaactcgccgttgccgccgccggccaccgtgcagccaatgtcggtcaggatgtcggagatgcggttgatgtccacgtcgaggccggccacgcgggccacttcggaggccttgaagtggatgaccttggcgcgcggcgtgttgttcacgtcgttcgggtgttcgctgggctcgccgttgccgtacttggccatgagctcggcggccatctgggtggcggcgggctgcagcgcggtgtcgacgccacgttcgaagcggcgggaggcctcggatggaatcttgtggcgacgggccgaacgggcgatggtcacctgatcgaagtgcgctgcctccagaagaatgttcttggtgtcagcggtcacttcgccatacaggccgcccatcacaccggcaagaccgaggatgcgcgagccgcgttcgccgttcggcgaatcggtgataagcagatcttcgacgctcaggtcatgttccttgccgtccagtgtggtgagtttctcaccctcgttggcgcggcgcacgacaatcgggccttcgagcttgtcgaggtcgtaggcgtgcatcggctggccgaggtcaagcatcacgtagttggtcacgtccacggccaaggagatggagcgcatgccggcgcgaatcaggcggcggcgcatccagttgggcgtgtgggcgttgggattgaagtccttgacgatacgcgcgtagtagcggtcgcaaccgggcacgccgtgaatcggattgttatcgtcgatttcaacatcgatgtccaccggggtgccgggctggtagtcagcaggttccggggccttctcgttcagtgccacggccggatcggtgtaggcggcaccggtggagtggtggtattcgcgggccacgccacggtaggacagcgtgtagccacggtccggggtgatgttgatctcaagcagaggctggtcgaggtgcagcaggtgcatggcgtcctgaccaggcttcagagcctcatattcagcctcggagaagccgtactgacgcagcagaatgatgccattgtggttgtcgcccagacccagctcacgttcggaggcacacatgccgttggagatgtggccgtaggtcttgcgcggctcgatcttgaagtcgccgggcagcacggcaccgggcagggtgacgacgaccttttcgccggccttcatgttgggcgcgccgcagatgatgccgcgcggcaccttgttgccgtcttcgtcggtctcgttccattcgtcgccgcagtccacgtggcaccagttgatggtcttgccgttcttctgcggttcgggggtggcgtcgaccacgtagccgaccacaatcgggccggtcacctgggaggagtggatctcctcttcctcaagacccaccttgacaaggtccttggcgagctgttcgtaggtcaggccttcgggaacctcgacatggtccttgagccaatcgatatcgatcataggcatggctgaatcactcccccatcacaaactgttcggcgaaacgcacgtcaccttcgaccaggtcgtgcatgtcgttgatgtcgctgcgcagcaggagcgtgcgctccatgccgacgccgaaggcgaaaccggtgtagacgtccgggtcgatgccggcggacttcagcacgttcgggttcaccatgccgcagccgccccactcgagccagccggggccgcccttcttgtcggggaaccacaggtcgagctcggcgctcggctcggtgaacgggaagtagctcgggcgcaggcgcgtcttggcttcagggccgaacatggcgacggcgagcttgtccagcacgcccttcaggtcggccatggtcaggtgcttgtcgacggcgagggcttcgcactggtggaacaccggagtatgggtggcgtccagctcatcggtgcggaacacacggccgggggacgcgatgtacagcggcacgccacgggtcaggagggcacggacctgatcggaggaggtctgcgtacgcaccaccatgttggagccgacgaaaccggcggcgtccttggcttgattgcccttgacgtagaaggtgtcctgcatctggcgggccggatggtccgggccgaagttcagggagtcgaagttgtaccattcggcttcgatttccggaccggaggagatctgccagcccatggagatgaagaagtcctcgacgtcttccatcagcttgggcagcgggtgacgggcgcccagaggcttgcggttcaccggcagcgtcatgtccacggtttcagcggcgagtgcggccttctcggcggcttccttgagctcgacctccttggggccataggcacggccgaagtcggcgcgcagcttgcccatgagcttgccggcttccttcttctggtcgacgggcagggagccaatggccttgctggccttggtcatcgccgaatcggcacctgcgtacgttgtcttgatggccttgagctcctccaggttggaggcgttctggattttctcgatgcccttggcaacctcagcggtcacctggtcggcgtcgaacaccatttgttctgccacgagaaccctttcgtctgatgttttctcagcgtttcacagcgtttttaccggtttcacattctttcaacatgacccgacatagacagcgacatcaacatcaccgcggccgaggtgccgaggttcagcgattcggccttgccgtacaacgggatggagacgatgcggccgcagcgtgtgaggatgtccggttccaagccacgcgcctcattgccgaacagcacggctttcggagcctcgaccgccgccttgtccgccagtactgcgggcaggctttccggcttgcattcttcggtgccgtatacgtcggcggcccagacgcccatattatggtcgcctgtccaggtgaagaattcgtcggtgctcatggcgagtaccggcagatggaacagggagcctgcggtggagcggatgaccttggggttcagcacgtccacgcagtcgtccacgaagattacggcgtcgcagccggccgcatcggccgcacggatcacggtgccggcgttgcccgggtcgcgcacctgccagaaggcggcgatctgcgggccccggccgttcttgccaagttcgacgtcatcggcaccggcgtgcatggactcggcattgccgacggccacgatgccctgggcgtccggactgatgcggtgcatcacgtcgccggtgcagtagtgcacataaatcgtggcatcctgcgaggtttcgacgatcttctccaacgtggaggagatgatacgcggatgttccaacgcctgcgaaacctccacatagaggtcctgcaccacgtccggccgccaagtgacggcctcgcgcacggattgcgggccttcgataagaaaacggcccgaacgttcgcggcctttggcgcgggtcagatcggcgatgcggcgaacgcggtcggatttcggattatcaagaatctgggcgttgatgggcatagccactaccctactgccgggtcattacgtcagtcgtggctcgctcccgctggcggaggcatcgtaagcctgaaaggcactgtgccagtctgtcgcctttcagacaccttgaaaggcgaagtgccaattcccggtgccgatggctacgcctatggaggccagcgggacagccagacagatgacgtagaagatccagtcgataggcttcagacgcgagatacgggcttgggagcgtggggcgctggagccgaagccgcgcgcttccatggcggtggcaagtttggtggcgcgccggatggagagcaccagcagtccgaacgcttgggagagggcacgggcgatggcgttaccgtcgccaaggccgcgcgaacgctgggacaagccaagtgcgcgccaatcttcctgcagcagcgtaaacatgcgcaatccagccaacccgccgtatacgaatcgcggtgagaagtgcagaatctcaaccaaaccgtccgccaaatcagtgggatcgaggcccagggccagaatcacgccgggtacggcaatggccgccaccctgatagccgtggcgatggccagattaacggatccctcgctgatcacaatccagccgccctgccacaggatctcgcccgaggtgcggccgtagagaaacacggagataaaactgccggcggcggcgatccataccggccaggtcttacggcatacggtccacggagccacgccaccaatccacagcagcacgaattcgatgccgagcgccgtggatgcggataccacatccagactgatgaacatcggaacgcacagcaacagcgcaccgatgatgcgactgaccgcgttgatgcgcgctatgaaccatgagggcgatgaggctttgaccggctccacgcgcgtttcctgcgggctgacggttaccacgtcactcatgcctcgcctcctcgaacatcacgcgtcgtgcgcccagcgcatccaccagcgcctcatcgtgcgtcaccatgaccacgcacgagccttggtcgcggatggcggcgatcagcttgaccatttcattccacgtactgaaatcctgtccgaatgtcggttcgtccatcaccaacactttgggtgcggcggccagcatggaggccacggacagtcgccgcttctccccgccagacaaggtatacgggttggctttggcgaagcgcgtgagattcatctgctcaagcatgcggtcggcggtccgataagcctcgtcttggctctgccccatcgacttggggccgatggcgacttcgtcacgcacgaaattggcagcgaactggtgttcgggctcctggaacaccatgccgatacggcccagcagttccttgcttttccagtcaatcggctcacgcccggcatgcgcgggcttgaggttgtcggcgatgagcaccttgccggcgataggcttgagcagcccggccaaggtcagggccaaggtcgatttgcccgcgccgttcggacccatcagagccgttacttcgccgggatagaaatccagattgatgccaacgccaagagcggtcccacggccaaagcttaagttctcggtgctgagcaccggcgcatcgtgcgcaggctcccgcttcggcgagtaatcgggaatcgcacggcccggcacccacgcgccaccggcggccaatacgtcgcccatctcggcgaacacctcgtccggcttgccgtcggcgatgaccgcgcccgtgggcgaacttgcatcgggtcggccgagcacgatcacgcgatcgaccagatcgagccatacatcgatatgatgttcgaccacaaccatggtctgtccggtggcctcgatgacctttttgaccgcgtcatgcacctcgaccacgccttcggggtcgaggttggcggtcggttcgtccaacaacagcagaccgggcttcatagccagcacgccggccaacgcgagacgttggcgctgaccgccggacagatggcgggtggaccgatccagttcgagtccgccgagtcccaccatatccaatgattcgcgcactcgctgccgaatctcctcgcgcggcacgttgaggttttcgcagccgaaggccgcgtcatcgcccagtcgttcaagaatgatctgcgagtccgggtcctgaagcaccagtcccacgcggcctcgcgtctcgcgcgcatcgacgccatcgatggtgagcgagccctcctgctcgccttcctcatcgccgccaagtacgcctgcgagaccggccatcatcgtgcttttgcccgcccccgaagcaccgagcagcaacacacgttcacctggccggatggtgaaatcgacggcacgcaacgcgaagtccttacgcgtggcgtgccgccatccccagccgctggcctctaccgcagccggattaacctgcatcagacgcgcgccttgctgcggccggattcaaagcgttccagagcgccggtggcggcgagcgcacgagacaagtaccagaccaccacgccggcgatcacgacgccggagatgatggagccaaccagataccaagtgacgcgcaggccgttccagcccgggttggtggcccagtagtaggcccagcagcccacgccggcgagcgcaccggacaggatggtggtgccgatgttccacttcttccaggcgaagacggcgaaggcgatttcggcacccagaccctggaggatgccgacgatcagcgagccgccgacgccccactggttgcccagcgtaagctcgaggaaggcggcgagggtttcggcaaacagtgcggcaccgggcttgcgcacgatgattgcggcgagcgggccggcgaacagccagaatccgttgagcagaccctcgaaaccgggggtcacgccttcgaacagggccagcggggcggagcagacaatgtcccagccccagaaaatgacgccggatgcgacggcgatgattgcggcgacgacgatatcgacgacgcgccacttgtaattggctttggccacagcttcagtcatgaatgtgcctttcttctgctcgtacgcaggccgaacatacatggatatatgtacgcacatgatgcacatgttcgtggccacgcgcgggttggttcaggcacgggtgggtaagagcgacatttccgtgcgccggcattatccggtcacgttccatcggtcgagactatgaatctcctctcagccgcctaacggcagctcccgtgtcaactccccgactataaagcaagccgccgtcaaaggcaatagccacatccgtgacctacctgacggcagctcgccaccattaccgatgcggttcggttacttgccgagcttgtccagcagcaaagcctcggtgatcacgttgttcttgaggccgggcagggagatggactcattggggctgtgggcgttggccttcgggtcttcggggccggtgaccagcacctgagcgttggggaaaatgcgctgcagttcggggatgaacggaatggagccgccctcgcccttgttgatgggctcaacgccgaaggcctcggtcatggcttccagcgcgtctttggtggccacggctgtcgggtccatggcccagcccatgccgttttcgccgcgttcgacagtgaccttggcaccgaacggcgcgtgggattcgaggaatgcagccagtgcttcctgcgcttcttcagggcgctgggtgggcgcggtgcgcagcgacagacggaagcgggtctccggggcgatcacgttgaaggatccctcgaccgggtgggcgtcgaagccgatcacggtcacggacggcttggtccacaggcgtgaggccagcgaaccggtgccggcgaactcgtaaccggccaccacgccggaatcctcgcgcacggtggtttcgtcaaggtcgcgttgcaaaccgccgattggctcttccgcggccacgccgggcacggccagatcgccgttctcgtcgtacatggaagcgatgagcatggcggccaacgtgttggagtcaagaatcgggccgccgtactgaccggagtgcaccgggtgctcaaggccctgcacggtcacgtccacgcaggtgttgccgcgcagcgaggtggtcaaagaaggaatgtccgccgaccagttgccggaatcggccacgataatcacgtcggcggcgaattcgtcgcggtgagcctcgatgaagggaatgaagcttggcgagcccatctcctcttcgccttcgatgaacactttgatattgacgttgaggtcgtcgcccaaagccttcagcgcaccggagtggatggcgatgccgccgccgtcatcggcggagccacggccgtaaaggcggccgtcgatttcggtggccacgaacgggtcggtgtcccattcggccgggtccggaacaggctgtacatcgtgatgggcgtagagcagcacggtgggggcgtccggagaaacgatatgcgagccgatgacctcccatgcgcccggagtgccgtcggcattggaagcctggaccaccttggcatccacacccacgaggcgcagttcgtctgccacgaattcagcggagcgcttcatatgttcggcggtgatgcccttggcggagatcgactgcagcgcgaccttttcggccagcaccttgacgatgcggttccaatcggtttcgacgcgcgaacgaatctcgtcagcggtgagcgttgccatgatggtcctcctttatatatgtgcgtatatatgtgcgtgagcggcgtcattgcaatgactgcgccagtgtacaagtgtctgaacgtcaccgtaacctcaaagcatgacatggaatccgtttaggaaaaaagaagaggcccaagttcctgttgagcaggccccgaagaaggccgccgatccttctgagaaaaaaggccgtcctaccccgaagatgaagcaggctcaggccgccggtatccgtccgctggttccggtggaccgcaaggccagcgccaaggccgccaaagcccgtctgcgtgagagggagaacgccgagtacgaggcgatgcagaagggagatatcaaccacatgcccaaggcggaacgcctgccttggcgtatctacatccgtgattatgtggatgcccgtttcaaccttggcgaatggttcatcccggtggccttcgcgattctgatcgtctccatgttcgccgcctcgttgatgcgcaaccagtgggcgtcggtcaccatgatggcgctgatgtacggctatctgatcgccgtgatcatcgacgtgtggctgatgtggcgcaggctcaagcccaagctgatcgccaagtacggcgaacagtccgtgtccaagggctcccgctccttctcctacgcttggagccgttccatccagatgcgtcgttggagacttcccaagccgcgttacccgaagcgcggtcactggccggcggactgatttttcatatatactctggctctcctcgttgaggggctgagccgtaaagaaaacagtccagtggactgtttttaggcgaagtggcggcgatagccgcatatggctccctagcatgggagccatacttatatgtatcaaggaggcaatcatgagcgaacagtttgatctggtcatcatcggggccggccccggcggctattccacagctctgcgcgcggccgaactcggcatgaaagtggcactcgtcgagcgtgacgccaccgtgggcggcacatgtctcaaccgtggctgcatcccctccaaggcgctcatcaccgccacccacaccatcgacatcgtgcaccgtgcagccgaactcggcgtcaacgcctcggtgaatggcatcgacttcggcacgctgcgcgactatcgcctgcgcgtggtcaagacgatggtgggaggactggccggactgctcgcccatcgcggcatcaccgtgttccgggccaatgccgcgttccatgcggatgagatcgctccagcaacttccaaccacatcgtccgcctcgtcccctcccccggccaaaacgacatcctcacctatcataaggccgatgtccccgaacccagcggcccaacgatggacctcacggccacgaacatcgtcatcgccaccggtgccaagccacgcccattgcccggcaacccgttcgccggcgccctcatcgactccacacaggcgctggaagtcaacgaatttccctcttcggcggtgattatcggcgccggggccatcgcccttgaattcgcctcgatatggaacgccaccggttcgaaggtgaccctgctgattcgcaaggaccgcgtgctctcagcctgggaccggagagccggcaccacgctgacccgtgagctcaaacgtcatggcgtgaacatcatcacccgcgccagcgtcacccatgtggacaccggcgcgaaccttggtgccaccgtgcactacacgcgcgaaggccaggacggcgaacagagcgtttggggcgaaatcgcccttgtcgccatcgggcgtgacccgatcaccgacccagcatggggcgtgacgattgatgaccacggacatgtcgccacggatgcgtacggtcgcaccgacaaaccgggcgtatgggcggtgggcgacgtgacggccggtcacgcactggcgcatcgtgcttttgagcaaggcatcgtcatcgcggagaccatcgccggactcaatcccaagccggtggacgaagccgctgtgccgcagatcgtgttctccttccccgaagcggcgtcggtcgggctcaccgtcgaacaggcgcaggcaagagaggacctcgtcgaaatcaaggagaccaactatccgatgctggcgaacgcgcgcatgctgatgagcggcacggccggctcattgaccatcgtctccggctgcgacgcggccaacccgtgcaccccgcgcgtgctcggcgtgcacatggtctccccgatggcctccgacatcatcgccgaagccgaacagctggtcggcaaccatgtgccgctcgccgacgcagcccgcctcgttcacccgcatcccacattcagtgaaacgctcggcgaggcgctgctcaaggccgacggacgaccgttgcacacacgctgagaccaaccagcacaagcaagttcggaccagcgcacctgataggatattgcccagtgtgtttcgtcccaacaaaggaagaagtgatggcggaaaaggacgcgaagccgaagaagcagagcacaatcaagcagatcatccagatctacaagtacacggctaaggaagacaaggccctgccgtggcttgaggccggtgctttcctgctgcctgtagtcgtgatgatcatcatcggtctgattgtcaagtggacctggctgacctggatcttcaccatgattaccgccatcatgctcggcattctgctggccaccatgatgctcacccgccgcgcggatgcagtcggctacaagcagattgatggcaagccgggtgccgccatcggcgtgctgagcaacatgcagaaagccggctttgacttcccgcaggaaccggtgtggatcgacccgaagaccaaggatgccatctggcgcggcacttcgatgaacggcatctacctgatcggcgaaggcgaatacggtcgcgtcatgaaggcgatggatcgtcaggaacgcgatatcaagggcgtcaccgccggctcctccattccgatataccgcatcgccgtgggccacggccccaagcaggtgccgctgaccaagctgcgtagcacggtgatcaagtccaagagctatgagcccacggaccacaagaacgcactgatcgccaagattcatccgcgccgtcgcttcctgctgaccaaggccgagatggaaacgctgaacgatcgtcttcgcacgctgcaggccaagaagggctatgccatccccaagggcatggatccgaaccgcccgcagaagatctcccgccgcgcgatgcgcggtcgctgatcggcagcacaccaccaaatcgcacagaagccccggaatccgttcaatcggttccggggcttcgtcatatgtctcataatcgcgtccacttacatccacctacgtcacctgtcaatacccactgtccacgttgcggacatctctacctactcccccgatagtctccgtttccattctgtaatgatgtttcgttgaaataacgcgcctgcgcgattgtcggccacagtcacgaaacattctcgtaacccaagtttcgagccggcgaaacgcgctattttacgatatataccgttatatctcatacgaaaggagcggtcccgtgaccgaactcaagtccaaggaagacgtcgaggcccttatcaacaaggaaggcatcgagtatgtctccgtccgtttcaccgatcttatcggcgttcagcagcacttcaccgtgccggctagcgaattcctgaaggacgctttcaccgacggcatgccgttcgatggttcctccgttcagggcttccaggccatcaacgagtccgacatgaagctggtcccggacgttgagacctctttcgttgacccgttccgcaagcacaagacccttgacgtggccttctccatcgtcgacccgctgaccgacgagccgtactcccgcgacccgcgtcaggtcgccggcaaggccgaggcctacctgaagtccaccggcatcgccgacaccgcatccttcgctcctgaggccgagttcttcatcttcgacaaggtgcgtttcgagaactccatgcagcgctccttctacgaggtcgactccatcgaagctccgtggaactccggcgttgactccgaagaggacggcaccccgaacatcggtttcaagaatcgcgtcaagaagggctacttcccggttccgccgattgaccacacccaggatctgcgcgacgatatggtcgccaacctgcagaaggtcggtctgatcctcgagcgttcccaccacgaggtcgccggcgctggccagcaggagatcaactaccgcttcaacactctgcagcacgcaggcgatgacctgatgaagtacaagtacgtcgtccacgagaccgccgctctggccggcaaggctgcgaccttcatgccgaagccgatcgccgacgacaacggcactggtatgcactgccaccagtccctgtggaaggacggcaagccgctgttctacgacgagaagggctacgctggtctgtccgatctggctcgctggtacatcggcggtctgatcaagcactcctcctccgtgctggccttcaccaacccgtccctgaactcctaccaccgtctggtcccgggcttcgaggctccggtcaacctggtgtactccgctcgtaaccgttctgccgccatccgtattccgctggccggcacctccccggctgccaagcgcatcgagttccgcgctccggatccgtcctgcaacccgttcctggccttctccgctcagctgatggctggcctggacggcatcctgaaccacatcgagcctccggagccggtcgacaaggacctctacgagctgccgccggaagagcacgctggcatcaagcaggtgccaagctccctggccgaggctatggacgccctggaagaggaccacgacttcctcaccgccggcgacgtgttcaccgacgacctgatcgagacctggattggcctcaagcgcgacgagatcgaccaggctcgcctggccccgaccccgctcgagtacgagctctacttccacatctgagtttgagagcttagcaacgttgggatttcgccattgctcttctcttgtgggagtctaatgggagtcattcagcgtaactagaaagaacctcgtgaaattcgtttcacgaggttcttttttgtatgttgcgttgtatgttatgcgatgtgtgttgctcctggaatattccaagggcgggccgctacttagtctcccaacgctccttgagtacataggcggcggctttgggctgacggtcgcgagcgaagacgctcttcttgttgccgtcgacgcgcatgatgccttcaccggtttggaagtcgcagaggttccatacctgctcgcccaccactgcctcgaacatgtcgaacacttcgtgctgcatggtgaggtactcacactggtattcctcactccactgcacgcttggcagcttgtgcgcaccggcatcggtgtccgcaccgtattcggtgaacaggaatggcttgttgggttcggtgttcatccattggttcatctcgtcgatgaaggccttcttggctccgatgagctgatacccgcattgcatataccagccgtaataccagttcaggcagatgacatccgcgaattgatggcacttgtctttgcctgcggcggccatcatcagattggtgtaggtcagcggacgatgctgcggatcgagcgtgcgcgcgtaatcgaatatctccttgaaatacggcacggccgcctcggatgccgagtcgttggcggcgtcgatgaaattccaagcgccgaaggccccggcattcttttcgtcgaaggggacaattcagaacacgaccgccgacacaatcgtcagggaggccagcgagaacagcgtgcttacgagcacgaagccgaccgcatactcgggcatgttgttcttgcgaccggtgaacatggcgatggtggtcatggtcggcagtccggcgatgaccgtgatcatcagcaccatgtcatgggtgatcgacagctgcggcgatgcgccggtcagcgcggtcagtagcgcgtagaaggcgagcgggaatgcgatcatcttggcgactaggccagcatagagttcgtagcgtttgaggacgccccaccacttggtcagtgcgaacaggccgcccaagtagattagcgacatcggcgtggccatattgccgatggtgtgcagaggcttcaggatgatgtccggcaccttgacgccgagcagaatcagaatcagggcgagcatcacgccgatgaaggcgggattgacgaatcgtttaagcaggccgaggacgcgggtacctagcgaggggcggacgacggccggagaaccaccgtttgcggcattgctcgccgaaccagcctcccccaccgaaccggcgccgttcaccgaaccgttcgcgaccgcacctcgcgcgccaatcgcgttgccgtcagtcgcttcgacgaccggctcgcacagccatacgccgtacgtccagagcagcgtctggtcgatgatcgacatcagcgccacgtaaatcgcgccgttctgcggccaaagtgccatgatcaacggaatgccgatgaatccggcgttgccgaaaataagcgacgcctgaaatacatggctacgcgaacctttgagccgcaacagtttggcgaccagccagaacaccaggatgagcagcgcgtacatcacggcggtcagcagcatcacaccccagttggcggcgagctgcgcgcggtccgcgccgtcgacggcgttcgagaacacgagcacagggatgagcacgttgagcagcagcgaacacatgccgtccagcgccgtctgaccatagaaccggagccttacacatccgtatccgaccatcagcatgatcagaaatccgaccaactggccaatcatgacaccgaactgccccatgcacactcctctcgtttgctctcccgcgatttcctgtcactggttcatataggcagccatctggacaggctcggcggcacacgcatcagtatgttcgataccaccacatgccaatccacttctcgttcaaccgttccccgtgctaatgagtcgcctgccaccccgtgttgcctgtgctgcgcgagcaccgctacgtgtattgcattccggtggccctcgggcgcaacgtgtgggtcggcgcgaacgtgtcgattctgtcgggagtgaccatcggcgacaattgcgtgattggcgccggttcggtcgtgacacattccatccccgccaactccgtcacctacggcgcgccctgcgaggtcgtgcgtgaaatcggcgacaaggaccgcgagtatttctacaaaaatcgcaagctcgacgtgtgggagtgagctttcgcgctactgctctttgagcttaaaacgctcactgaattggcggtcgcgccagtagtagacgtcgtcgcgttcgttgatttcgcgaattaccttgcacgggctgccataggcgaccgtgttggcggggatgtccttggtgaccagcgagttggcgccaatgaccgcgttgtccccgatggtgaccccgggcagcacggtgacattcgcgccgatccagacgttctcgccgatgtggactggcaacgaatactgggcaccctgatagcgcaggtccggacgcacgggatggccggtggctacaagcgtgacgttggggccgatcatggtgtgggatccgatgaagatctcaccatcgtccaccagcgtcaggttgaagttggcgtaacagcgctcgccccaataagtattgcagccccagttcgcatacaccgggcattcgaggtacagaccctcccccgccgcgccgaagaacgcctgcatgagttcggtacggcgcttcgggttggtcagcggcgtggcgttgagttcgagctggagatcacgctgggcggcctgcagatcaaaaaa

SEQ ID NO: 2101 - DNA, 5792 bp, Unknown
  R51_24m  MAG No. k141_1748
gcccttggcgtagtagccgtccttgcccatcttgtagccgtcggcctcaagggttttcttggcgttgtccacgttgtacttggcctcggcgggcaggttgttctcgtagcccttctggaacggcagcagcagctcggagccgggctgctcggccttccagttcaggccctggaactgcacgttgttgtaggtgttcacgtcgaaggcctgagtgatggccttacgcacctgcaggtcgtcaagcggcttggacttgccgttgtactccagcacgcgggtcttggtgctgtagccgatgcgcagctgggcgtccttgacggaacggatggccttgatgtcgtccttggtggaggcctccacggcgtcgatctcgccgttctggaaggcgttgagggaggcggtgtaggccatctgcttgtagacgatcttgtccagcttcggcttgttgccccaccacttctcgttcggcacgaaggtgacctgggagtcggagaaggagtcgaccttgtacggaccggcggcccactcgttgtgcgggttcttcacccagccctgggtgaaggtcttcgggtcggcggccttcgggttcaccagagcgccgaagacttcctgccacgggtagtacggggtcttgtaggtcaccttgacctgcttcgggctgtcgccctgctcaacgctagcgatacggtcgaagccgtcggtgctcggcgggttgtagtccgggttggagccgttgttggcttcccacgtggccttgaaggcggtccagtcgatgtcggagccgtcgttccacttggccttcgggttgatgtcgtactgcacgaccatcgggtccttgctcacgagcttcatgtcggtcaggaagtccgggttcaccttaatcggggagccattgacctggtcggtcatgagcaggctgggctggtaccagctccacagctcggacatgtagccggtgttgccgtcggaagacaggtagttccagttcgggccgatttcgacgatggacagggtcagcgtgccgccgtccttgacgttgtcacggctctggtggttgtcgtaacgctcggtgaccttcggcatgggcaggtcgccggtgtacgacgaatcgatgccggccggcggttcggtggcgctcgaggcattgctggaaccgttgccattgcccgcgccgcagccggcaagcagcatggcaagcgccgcagtggccgcggcgagcgcggtcagcttacgtgtcttgttcattgttatttcctcctctatatggttccgaccgtcatgcgaaatggcatgcaacctgatggccgctcggtcgggaagtgtcatacggccgcagcgccgggcgttcgccgcggcagcgggcctgttgttcggcgctcagcttgggcatgagcgggcagcggcccatgaacgggcagccttcgaacgtctcggtggggctgggcacctcgccctgcagcacgatgcgctggcgggtgcgttccgccttcgggtccggcaccggcacggcgctgatgagcgcctgggtgtacgggtgcaacgggtgctcgaacacgtcttcggtgtcgccggattccacgatgcggcccaggtacatcaccgccacgcggctggagatatggcgcaccaccgacaggttatgggccacgaacaggtaggccacgcccagcttgttctgcaggtcctcaagcaggttgatcacgccggcctggatggacacgtccagtgcggagaccggctcgtcgagcagcacgagcttcgggttgaccgacagcgcacgcgcgatggcgatgcgctggcgctgaccgccggagaactgcgtggggaagcggtccacctggtcggggttcagctccaccagacgcatgagttcaccgatgcgttcgcggatctgctctttggagtagtgctggaccttcatcggctcggccaggatgtcgtagatcggcaggcgcgggtcgagcgaactcatcgggtcctggaagacatactgcacggccgaacgcagctcgcggcgcttctcgcgcggaatcttgtgttcgagcttggtgccgaacatctcgatctcgccgtcctgcggctgcttgaactccatgatatccatgagcgtggtggacttgcccgagccggactcgcccacgagcgccacggtctcgccttcgcgcacgtccagcgtcacgtcgtccacggccttgacctcgccgatcttacggcgcaggaatccgccggcggtcagcgggaaggtcttgcgcatgtgcttgacgtcgagcaccatcttgcgttcgtcgcgcgggatgccggcgaacttcgacttggcggcctcggccaccgtgtacacgtcgtggaaggtcaggcccttgtccacgatctcctgggtgcggtggcaggccacgaactggcccgggcggcccggcaccggctccatggccggctcggtggtgtggcatatgtcggtggccagcgggcagcgcggcgcgaacgggcagcccttgggcatgttgaccaggttcatcggggagccaggaatcggcaccaggcggctgttgcgttcgcggtcggaacgcggcacggcacccagcaggcccatggtgtacggcatggccgggtggtcgaagatggagtcgacgtccgccttctcgaccgggcggccggcgtacatgacgacgatgtcgtcggccacgccggcgatcacgcccagatcgtgggtgatgaagatgacggccgcgccggtttcacgctgggccttgcgcagcacttcgagcacctgggcctggatcgtcacgtccagtgcggtggtcggttcgtcggcgatgatcacgtccgggtcgttggcaatggccatggcgatcatcacgcgctggcgcatgccgccggagaactcgtgcgggaaggacttcaggcggtcctccgggtccgggatgccgaccaggttcatgagctcgatggagcggtcgtgaatctgctgttcggtcatcttcggattgtgggtgaccagcgcttccttgatctggtcgccgatggagaacaccggggtcagagcggagagcgggtcctggaagaccatggcgatgcccttgccgcggatctcgctcatctcaagatcggacttgttgagcaattcctcgccgtggtaggtgatggagcccttgacgctggcgttcttgtccagcaggcccatgatggccatggaggtcacggacttgccggagccggactcgcccacgatgccgagggtcttgccggggtacaggtcgaagttcatgccgcgcaccgcgtgcacggtgccggcttcggaggcgaagctgacggtgaggtcgcgtactgaaatcaccggttcggatgccatgccttgcgctcctgtggtgttggggttggtgttggttgttacgttgcttgcgttgcgttcgtcgctcatgatgcccgtctcccctctcactcggccttgccgccagaacgggagtacgggtcgatggcgtcacgcagtccgtcgccgatcagctgcacggagaaggtcaggacgaccagcaccacggacgggaagatcagcacccatggcgaggtctgcaccacggactggccggcgttgagcagcgtaccgagcgaggtgtcgggcgccttgatgcccaggcccaggaagctcagcgaggtttcgctgttgaccgcaccgatcacgccgagcacggtgttgatgaccagcaccgaacccaggttcggcaccagatgacgcacgatgatggtgaaggacggcacacccatgaacttcgccgcgcggatgtattcgcgatcgcgcaggctcagggtcagcgtgcgcagcgtacgggcgtagccgatccaaccgaatgcggtcaggccgatggccagccacagccagtcgctgccgccggccgccatgccgacgatcagggcgatgagcaggaaggacggcacgacgagcagcatatccagcagccacatgcccacgcgctcgaaccagccttcgaagaacgccacggccgtgcccaccagggcggcgatgatcgtggtgccgaacgagctgaagataccgatggtcaacgaacggccgaggccgcggatgatcatcgcgtacatatccgagccaccgaccgtggtgcccagccagtgctgggcggacggcggcgaggcgagggcggcgaaatcgggctcatcgtagctccactgggagaatttcgagccgaaaatcgccaaaagaatcagcagaatcagcaccaccagacccaccacggccgaggggcggcgcatgaagcggcgcacgtacagctgcatgcggccggtgcggtggaagtcgtcggcgctggaagcctcctgggcgttcctggcgtcggcagactgcggctcgctgccctgcggatcggtgagttccatatcctgggcggcggcgtcggagaccatgttctcgttgtcgttcatcatgtttgatcgtcctttgcgcggggctcagctcagtcggatacgcgggtcaagccaggcggagaagatatccgccagcagcgcgccggacagcgtgcacacgccaccgaacgcggccacggccacggcaccgttgatgtcgttgttggcgatggtctgggtgaagtacatgcccaggccgttgatggcgaacacgttttcggtgatcaccgcgccggtgaacacgccggcgatggagaaggccacatccacggcggtcggaatcagcgaggtgcgcagtgcgtggcggcgaatggccgcgttgagcgtcaggcccttggcgcgggcggtgcgtacgtagtcggcgttcatggtgtcgagcaggtacgtgcgctgggtgaggtggtagcccaccatgcccggaatcgtcatcacgatggtgggcaggatcaggtgctgcagatagtcaaacacccaaagcaccgggttggagccttggtaggagtgcaggccggtcacgtagaacgcgcggctgcccacgatgttgttgaagttgatggccagcagcaccaccatcaggcccatgacggcggccgggaccaccaggaagaacgttgcggtggtgttgagcacgcggtcctgccacttgtactggcggatggccgtgtacacgccgatgctcacgccgaaaaggatggagagcacggtggcgagcgtcaccagctgcagcgaagcggagatacgggaggcgatggccggcgccaccggcgactggtccgggctcaggccccagttccactgggtgaggatgcccttgagccagcggaaatagcggatgacgaccggcgtctggtcgttgatgttggccagatcgagcgaccggttaatcgacgcgatcggcggatgcggattgcgcgacatgtagttcgaacgcggatccatgaatgcgctggccaggaaatacgtcatcgatactgccacgaacagcatgatcacgtagttcacaatgcgcttgatgatgtacttgaacacccaaccacctcccagataactgggaaagtgatacccccccccgctcaaaaccacaaattaagttcaatatatggaatatgggtattgacttttccgactttttcctgtacggaaaaccgcgaaaacacttactgtatattgggcaaacatccgtttgttaattttgtatttcctgagcctttgctggacatgccttatactttcgtgtcagcagtccgccggcccggatggtgacagtccccgccgccggcaacggattatccatcagcatcatcagcatcagacaggggcatcatgacgacagacgccagcgcacgggccatcaaacccgaacttctacgtacgtacaccga

SEQ ID NO: 2102 - DNA, 13674 bp, Unknown
  R51_24m  MAG No. k141_2211
gggccggctgccgcgagcccctcgtcgaggaacatgaacggttggccctcccggatgcgcctgcggatcatgcgccgcgccttgacgagcctttggtgcatgtcgttcacgctgccgcaatcaacgacatggtttgcgtgtacctgacgatgtacaagtggtcggcttcgataacgtgccggaagccgagtactcggcgccggcgctgaccaccattgatccacatatcgacgattatgccaagcatgccgttgacatgcttatcgaccgcatcgaaggatactcaggcccggcccgtacgtacaccaccgatttcacattggtggaacgtgcctcaactcgacttgcccactagcatccaacaagttcgcatcggcttcgtgaggagtgtgtgtctactcgaacaatgtggcgtcagtcgctgggtagccaagttggaacgcggtgtaggcgtgcttggcggccagtgcggcgaggatgagcagcgtatcgctctcggtggaagatttcgattcggtcacggccttgatctgcgcgcgggcgcagtccatttcgacggcggcggcggtcggtacggtctggccgcttgccttgtcggcgatggtggtggggttggccagtagttggtcgatggcatagaccttttggcgggggtcgctctggccggaagaactggactgtgcgccggaatcatcaaaattgccgttcgccagcgacaccagctgctgcccggcggtcttatgcatatcgctcaacgccaacgtagccccagcggtctgtcctcgtgcggccaagacctcgatagcgaatccggcgcgatcctcggccacggccatcgcatccaataccggtcggtcaacgttggcggacgtgacgccatcaagacgcgccggcgtcacctcaggcgcggactgcccgaatttatcggccagaaaagccagccattgcttggtctgcgcgtcacgtaacgttccctcggcaaaacgacccgaacaatacccggcaacgtcaatccaagtcaggggagcggccaggccggtggcatactgctctaataacggcgtgccttcagccggatgggtggcgtagtccgccaacgtcatcgctttctcgcaagggctcatttgagcttccgcctcggcccgtccggccagtcgcggcatcgaacacgccgaaagcgaacacagcatcgcgctcgcgcatagtgcggatgccaagcgccgggtaaaccgtcctgaagagaagcgtgtctgcatggaaacctacactaatagctaactgtgaccactcataggccatgcgccacataacttcataggaggtacggatcgatggaactggacctgacaggaatacacaagctcgccgccgagcaaggaatcgaccccggaaccctggatgatgcgctggcagaggccctgcgcctcgcctacctcaagaccccgcacgccgccaggcacgcgcgtgtggagcttgacgaacgttccggcaacttcaccgtctgggccgccgacgaaatcccggtcgagcccaccgaggacgacccgcaccccgctcccaagctgggcgaggaatacgacgacaccccgcgtgacttcggccgtctcgccgccgccactgcacgccaggtcatcacccagctgttccgccgcgccgaagatgagaaggtattcggcgcgttctccggtcagaagggcaagctcatcaccggcatcatccaacaggatgcttccgacccctccaacgtgcatgtcgcgatgggcgatgtcgaagccattctgcctcgccgtgagcaggtgcccggcgaacgttaccgccacggcgaacgcatccgcgtgtacgtggtgaacgtggcccgtggcatcaagggcccggaaatcgtggtgtcccgctcccacccggagctggtccgcaagctgttcgagcgtgaagtgccggaactggtctccggtgccgtgtccatcatggccatcgctcgtgaggccggcgcccgcaccaagatcgcggtcaaggccaacaccgatggtgtgaacccgaagggtgcgctgatcggccccggcggcgctcgcgtgcgtgccgttatggagaaccttggcccggagaagatcgacatcgtcgactactccgacgatccggccaagttcgtggcagccgcgctgtccccggctgtggccaccggcgtgcaggtgatcagcgagaagaacaagaccgccatcgccttcatccacgacgaccagctgtccctggccatcggcaaggaaggccagaacgcacgactggcagccaagctgaccggctggaagatcggcatcgaatccgccgaggcccacgccaagaaggtcgccgccgaaaaggccgtccaggctgcggccgaggctgctgctccggaagccgaataggccgccgggctcgaaggcgaatgatcttcagggcgcattatttcctgatacgagccgcgtcagcaatggcgcggctcgctgcgtctacgctatccagcgctatgagtatgcttgattggcgtatgtgggctggcgcagtgtgcgcgaaattgcccacaccagagacgaggtaacacgatcatggtcgcacgatgagacagggtaggcttgccgtcatcaccaactgaccacgcccatgcacgcgcgtggtcacagaataggagtaattagtggcgaaaccacgcgtatacgaactggctaaggttttgaatgtcgatagcaaaaccgtgcttgagaagcttaaggacatgggagaattcgtcaagtccgcttcttctacgattgaaccgccggtagcccggcgtctgaaggcagagttcgccaaggacaacgccaagggcgattccaagcccgcatcttccgtacaaaagcctgctgccaagcccgtgcagcagcgccgcccggccgcaccttcggccccggcttccacttcatcttccgcaccgactccggccgctcccgcacgtcaggcatcgcccgcctcggcacatcagcaggctccgactccgggcgcaccgacaccgcgtccgcagggcggcgcacgccccggcatgccgacccccggccgccacggtcagcacgacaaccgtgagaatggtcgcgataatcgcgaaggccgcgagaacggtcgtcagagtcgcccgaacgatcgccgtaacaacgatcgtcgtaacaaccagggccgtccgaacaatggccagccggggcagcatcagaacaaccgcgacaatgcttcggctccgcgcccgcacgctcagggcggcgccggtgccaatggcggcaatgccgcttcaaacgcgattccgcgcccgcacgctcagggcccgcgcccgggcaacaacccgttctcccgcaagcagggtatgcacaccccgacgccgggtgatattccgcgtccgcatccgatggctcgtccgactgctgatagcggtcgtggcggtcgtccgggccgtcccggccaaggccaggggcagggccgcggcttccgtggcggtcgtccgggccaaggtggtcagggcggtcctcgtcccggccagtggggccacaaccgtccgggtcagggcggcggctcccagggtgccggtcagggcggcgcacgcggcggcttccgtgggggccaaggcggcggcaataacttccagggcggcggcgcaccgagcaacggtcccgcacgtggcggcggtcgcggcggtcgcggcggtgccgcaggtgcattcggacgtcagggcggtaagtcctcgaaggcccgtaagaaccgcctggcaaagcgccatgagtatgaggagctgaaggcaccgaccatcggcggcgttcgcatccccaacggcaacggtcagaccatccgtctgcgtcagggcgcttccctggccgatctggcggagaagatcaacgtcaaccaggccgcgctggtcaccgtgctcttccacctgggtcagatggctaccgccacccagtccttggatgaggagaccttccagattctgggcgaagagatcggctggaacatccagctcgtctccgcagaagaggaagacaaggaactgctccagcagttcgacatcaaccttgacgaggaagaactgcaggatgacgaggatctcaagcctcgcccgccggtcgtcaccgtcatgggccacgtcgaccacggtaagacacgactgctggataccatccgcaagaccaacgtcatcgcacgtgaggccggcggcattacccagcgcatcggtgcctaccaggtcaccgtgaaccttgaaggcgaaccgcgcaagatcaccttcctcgatacccctggccacgaggcgttcaccgccatgcgtgcccgtggtgccgagctcaccgacgtcgcgatcctcgtggtcgccgccgacgatggtgtgatgccccagaccgttgaggccatcaaccacgctcaggccgccaaggtgccgatcgtcgtggccgtcaacaagatcgatgtgcccggtgccaacccggagaaggtccgcggccagctcaccgagttcggcctggtccctgaagagtatggtggcgacaccatgttcgtcgacatctccgccaagcagaacctgcacgtcgacaagctgctcgaagccgtgctgctcacggctgacgctgagctggacctccgcgccaaccccgacatggacgcccgtggtgccaccgtcgaagcccgactcgacaagggtcgtggtgccgtggccaccgtgctggttcagcagggtacgctccacgtgggcgatgccatcgtggccggcacttcgtacggccgcgtgcgtgccatgctcgacgagaacggtcagccgatggaagcggccggtccgtccacacctgttcaggtgctgggcttgacctccgtgccgaccgccggtgacctcttcctggtcgcctccgatgatcgtgccgctcgccagatcgccgagaagcgtcaggccaccgagcgtgccgcccagctggccaagcgtcgcaaggtcgtctccctcgaggacttcaagaagaagttcgccgagtccgagatcgacatgctcaatattgtcatcaagggcgattcgtccggttcggtcgaggcgctcgaggattccttgatgaagatcgaggtatccgacgaggtcggcatccaggtcatccaccgcggcgtcggtgcaatcacccagaatgatgtcaacctggccacggtcgacaaggccgttatcatcggcttcaacgtgcgcccgaaccgtcaggtggcggacctcgccgagcgcgagggcgtggagatcaagtactactcggtcatctaccgtgcgatcgaagacatcgaggcatccctcaagggcatgctcaagccggaatacgaagaggtcgtcacctctcactccgagatccgcgagatcttccgctcctccaagttcggcaacatcgccggcgtcatggtgcaggacggcgaggtcaagcgtggtacgaagtgccgtatcctgcgcaacggcgtggccacggtcaacgacctcgagatctcctcgctgcgtcgcttcaaggacgacgttcagtccgtcaaggaaggctacgaggctggtatcaacctcggcaccttcaacgacattgaactcggcgacatcatcgagaccttcgagatgcaggaagtcgagcgcaagtagtcattgttaagccctctctgacgagtgggctgtcagccgcaggctgactgggggagagacatggtagttccatgattttctctcccccagcctcactgcgttcggcagcccctcgtcagagggggctcaagtctagaaaaggaaattcctatggcaggaaccaacccgcgcgccgcacgtattgcggccttgattcagcgtgtcgtcgcctcctccattgagcgcgaactgcatgacaagcgactcgccagcatcaccgtcaccgaagttcgtgtgaccaacgatctgcagatcgccaaggtctactggacccagctcggccacgaaggccacgaggaaggcgaacgcaagcgcgcccagcaggcgctcgatcaggccaagggtcacctgcgttctctggtgggccacaaggctggcctgcgcctgactccgcagctccaattcgtgttcgatgaagtgcccggcgaggctcacgagatcgaagacattctcgctgtggccaagaagcgtgacgaagaactcgcccgcgcccgcgccaccgcccagtacgccggcgacgccgatccgtacaagcacgacgacgaggccgaagccgagggcgatgagttcgagtccgacgaggagtagtgtgcttcatacaacacctagcggcctactcatcatcgacaagccgcaaggcgtgaccagtttcgacgccgtcgccgccgtgcgcggcgcgttgcacatcaagaaggtcggtcacgccggcacccttgaccccatggccactggcacgctggtcatcgccttcggccacgccacgcgactgctcaacgccatcgtggcgcatgacaaaacctacgaggccaccatacgcctcggcctgcgcaccactaccgacgatgccgaaggcgaggcgcttgtcgatgatgaagcccgctcccgctggcaaacgctgtcagcgcagctgactgagggcggccagagcggcgaaccaacggcgtcaccaactgcctcatggcaaaacctgctcactcgcaccatcgccaccaatttcaccggcgatatcgaacaagtacccaatacgttctccgccatcaaaatcaacggccagcgtgcctacgacttggctcgcgaaggcaaggatgtggaactcaaaccccgcctggtgaccatcagcgaattcaccgtgctggatatccgcagcggattcgtagcaggggagcaggccgctgaaccattgcgggaagacgcgaacacgggaacgattcccgcacttgatattgacgtgcgggtcagctgttcatcgggcacctatatccgcgcgctcgcccgcgacctcggcaatgaacttggcgtcggcggatacctgacccgtttgcgccgtacgcgagtcggccgattcgcgttgccggacgataccagcggacttatcgcctctgaggcgatgcttgacacgcgaacccataccgtcaccgcacataccgatcagaagacgttcactaatcgggaagggcaaaccgtcacgcgcaacaagtgcgtattgaacactcctgaaggtcttgccggtgacgagcgccgcaactggctgcttgaccatgccctcaccatggaacaggccgctcgaggcgcgatgccggcgcttgacatcacacctgaggaagccagcgaattgcgcttcggccgccgtatcgagcgtacaatcagcgagcccactgccgccattgtgccgcaaacgcatgatgtggcggcgattatcgagcgtgccaacgctcatcaggccaagccggtcaccgtattccccctcgcgtaaagtagacgcggtgaaaagtgcagcttgatacaggccgcgcacaacaacgcctatattgcatgaataacatcgcacggataaaaggaacagcacactgatggatatcacgcacctgacccctgacgccgaaggttcgattgaatggccctcgttcagtaacgacaagaaggccgtggtgacattgggcgcatttgatggcatgcacttgggacatcaggcggtgatcaagcgtgtggtggaactcgcgcaccagcatgatgctttttccgtggtgattctgtttgacccgcgccccgcattcgtgcacggctgggccgcctcgcaccatggcgaggaacccgcggtgcagaacgtggatgccgaagccttgaccagtgtggatgatcgactgcaccgcatggaacagttcggcgtggaccatgtgttggtggtgcactacacgctggccttcgcagccatgtcatacattttcttccttggcagactcaccggcaagctgggcatgcgtacgctggtcctcgggcaggatgccgccatgggcaaggggcgagaaggtgatgtgaagcatatcgccaatcttgccgccgccaccggtgtattcgaacttgatgtggtcgatgaccgtggcccgggtgaagtgcgcattccgcgcgatttcaagccggaagccccgagcgaatggggagagcccgtcgacccgctggccaatgccaccaaggccgagcgccgcgcatggagcaagaagaaccaggccaaggcaatgcgcgcctggagctccaccaatgtgcgctacctgctggctcatggccgaatccaggatgccaacgccattctgggtgctccgcacgccatcgaaggcgaagtggtacacggtgaggagcgcggccgcaccatcggattccccaccgccaatcttggctccgacattgcaggctacattccggtcgacggcgtctatgctggttggctggtagatggtgagaaccgctggcctgccgccatctccattggcaccaaacccaccttcagcgagaaaacaggactcaacgaacgcgtggtggaggcctattgcatcaccgatgagtggattgatctgtacgaccataaggttcgcgttgaattcgtcggtttcctgcgcccgcaggtcaagtttgatggtcccgaccaactcgttgacgaactcaagcgcaacgtcgaagagaccaagcgtcttaccgcctgaggcatatctcagggctatttacgcactcccaaggcatctaaggcgtcggacaatgtgttggactccaccagccgaagtccctcgacatgcaccggcttgcgcagcggaggaatgactgccgtcgtaaagccaaggcgcgcggcctcgcgaaggcgatattccatacgcggtaccgggcgcacctgaccggtcagggaaatctcgccaatggcgcacgtggctcgcgcaatgggttttgacgtggcggcgctcgccagtgccgccactatcgccaaatcggaaccgggctccttggcctggcccccggcaatagtggagatatacaggtcgttggacagcaggttgagcttgctgtgacggtagagcaccgcgaccagcatggcgatacggctggggtccacgccattgaccgcacgtcgaggtgtgggcagcaccgacgtggtgaccagagcctgtacttcgataggcagactgcgatgcccatccaatgtgaacgtcacacaggtgccttccatgggtgccgcgttggccgcatcagggccgtctccagacaggaacaatccggcgggatcggtgacctcttcgatgccctcaccgctcatgtcgaaacagccgacttcatcggtcggaccaaaacgattcttcaccgctcgcaacattctcagcgcggtctcgctgtcgccttcgaattggcagaccacatcgaccagatgctccaatgtgcgcgggcctgcaatcgaaccgtccttggtcacatgaccaaccagaaataccggaatgtcaagcgtcttagcggtatctatcagcgcgcttgccacttcgcgcacctgagtcgaaccgccggaaatgccatcgacctcctgcgagacgatggtctgcgccgaatccacaatggccaaggccggcttgttctgttcgatcagccccaatactgtggacagatcggtggtggaggccagtaacaagttcggctccaccgcgttgatgcgggaagcgcgcaaacgaacctgcgcctgtgattcctcgccggaaatgtacagcacggtattggcatgtaccgacggtgcgttgccctgtaccgacaccgtgtttgatgtgccgccctgcgcccggcccgactgttgggcagaccgctgaccggctcctcggaatgtactgtctcccgccacaacgcgcgcgatattgccggccgtctgcaacagcaatgtcgacttgccgatacccggttcgcccgctatcagcgtcactgaacccggcaccacgccaccgccgagcacacggtcgaattcggaaaacccggtaccgagccgctcgacgctttccgtgcccacttcggtaatcggacgggctgcagatctggcgttgtcggcaaccgtaaccgactgcgtgcgtgatgttcggccgggagcggtcgtgcgagagcctgccgccggccgagcctcgtgaaattcctcgaccgtgccccactgaccacactcggggcaacggccgtaccacttcggcccgttccaaccgcattcggaacatacatactgcacacttgatttcgccatggtctcaccctaacccaaacaccagcggacggtaaatttttaccgttcacaagagtttcacgcggcttgcgcacaacgactaagattacggccgtctagcgtcacgcggctgtgagagaatcggggtatgactaatagtgagaactcctcgaccacacaatcccatggcaagttgattgcagtggtggttgccgcagctgttgtgattatcctggcagtgctttcggcctttgtgtggccgggttgggccatccagaagaatgatggcacctccactaccacccaaaacagccagcagaaaaccgaatcatccgagccgatcaagccgaccatcgacgccacagctttgccggatgatgccagtgagctgttgaaggccatgccggacagcgtgctgaattacgcgcgtaccaaggcggatgcctccacgacgtggaattccgcatcgccgctcgaggagtacactctgacctactccactggtgatgccgccaaggatgtcacgctggtcgccgcgcagtggtcgtcggcggacaatgccaagacccagtacgatgcgttggtcgctgcgcagaccggcgatgagtcggcatccggcaacgtcaaggtttccggcaacgtcacgggcgcgtacgtggtgaaggccgatgcctccaacagcaagaacgccgctgccatctggcagaacgataccgtggtcttccaagctaccggcaccaaggaagcggtcgatcgcttctaccagaagttcccgatgtagtatctagtatcggctgtcagctgctgcacaaacttatgaacgttggggcatccacattgctgatgtggatgccccaactgcgttcagggcatatgcggactatcgacaacatactggtttcctctgtctggcaacacgtgtattatggtgcaagttgcaacttttacgattaatcgaaatggaggcttcagatgggttctgtcatcaagaagcgccgcaagcggatgagcaagaagaagcaccgcaaactgctgcgtaagacccgccaccagcgtaagtagtcttacctgcaatcaaggcattagaaaccccgtgatcgttatggtcgcggggtttctctttttggctcctttgccttgttcgggcaacagtaaagcccgcacctgcgatgtacagatgcgggcttggaaaagttcagtgatgtgagacgatcacttgttggcgttggtcaacacgcgcgggccgttcgggtcgccgacgatgaccttgtcgaccatgttgaggaacaggccgtgctccaccacgccgaccgtgttgatgaggtcttcggccagctcctgcgggtgatcgatgcgctccaggtgcaggtccaccacgaagttgttctcgtcggtgcgcacttccttgccatcggcgtcaagacgaagcaccggcttgtagccgcggtcctcgaacttcttgatgacgtggccagcgccgaacggaatgacctcgaccggcagcgggaacttgccgatggtgtccacaaccttggactcgtccacaatccacacgatctggttggagttggtggccacgatcttctcccacagcagagcagcgccaccgcccttgataccgttgaagttcttgtcgacttcgtcggcgccgtcaatggtcacgtcgatgtggtccacgtcgtcgatgtccacgatcttgatgccgtagctttcagcctggacctgcgtgcggcgagacgtggttacgccagtgaactcaagaccttcctcctgatgacggcggccgagctcgtccaccagaaacttcacggtcgaaccagtgccgaggcctgcgatcatgccgttttcaacgagcttggcggcttcgatgccggccgccttcttcagcgcatcctgctgtgccttatccatggtttctcctttgccatccttgcctccgccgcatggatcaacggcgtgaagccttatctcctatcctaacgcgaatgagcgattttgtgtcatcgtgtccgattgcggtacatattcgtgtgtttgggtgttagtgtcgtacgaatggtgcgttggtgatggtcaggttgccgtcgccgtccacatagccttcgatttcgatgctgcctttgatcggcatcggctgcccgttgaaatacgggctcgttttcggcgcgggggagaaggtcagcgtaccggataccgtcagtccgcttggctttgcggggtgtacggggtgcgctgattgtacaggttgcgctgattgtgtcgctaagggtgacgaagacttggtctctggccttgtggcatccgtcgaatccgtcgccgcagccggcttgcgcaaacttgccgcatccgccttgccatccagcaccaactgcacatctggaggcacatcggtgccatgtgcgtattcggagcccagtagcgactgccagccttcaatcggcagatagccgtcgcgcgcacccgaacggcaatcgcccgcataggtgcgtgccagttcatcgaccaactcattgccctcgttgccggcgtgacctttgacccatcggaaatccaccgggccagggcgttgtgagatctcacggtcgatcgcctgaataagctctttgttcttcacaggctttttctgcgaatttttccagccgttcttcttccagcctttgacccacttggtcgagcaattgatggcgtactgcgaatccgattcgatgagcaatggctcagggcccgggtgcgctcgcaaagcttccagcactgcgcacagctcaccaatctgattggtgccattggtcgcgccgcccgcatcataaccatggtcgtcgtgcttgtggccgggcttgccgccggcgttctgctcatgatcggcccaggcccagcccattggcccgtttggattccctaatgcggacccatctgtggatactgtgatagtcatgttctccaccctaacgcaagctgtgcaatctcttgctgaagtggggttgcccagtgcgaggcaaaacaacgtagtgaagagtgtgaataacatcacacctattgactttgcttgaaaaacatgccatcgcgcgtgaataggtgagcgctcacaagaaaaacaagacatttcctctctgcgggtgaggccggcaacaatggcgcatccggtatctggaatgagaataagggactgtacaaaaccagtgacggcaacatcgaaatcctcaaaccagaggcggacggcgatggttcgacggccacggccgcatccaagggcaccatgcttatcgcaggcaactccaaaaccatggcactcggtccaggcggcatggccttggctcccggcctgccgctcggtcttggctggttcatccgacgccgcttgggattggatgcctccgacattctggaccgtaagctcggcttgaagtaacggctggttcggacgtgattgctgtcacgtacggatcatgacgacagcgcgaaggtcctcatcggtttacgtcgatgaggaccttcgcgcgca

SEQ ID NO: 2103 - DNA, 3935 bp, Unknown
  R51_24m  MAG No. k141_2243
cagaccgcccgtctgcgcgaagccggcgccgacatctggcccgcctacttcgccggccactcgctcggcgaatacaacgcgttgtccgcgttcgccgacgtgattccgctggaaaccgtgctggagctcgtgttccaccgtggttccaccatgcaccacctcatcgagcgtgacgcacagggtcgctccaactaccgcatgggtgcccttcgtccgaaccagttcggtgtggacgacgcgcacgtcaaggaatatgtggaatccgtggccaaggcgtccggcgaattcctggagatcgtgaactacaacctcgccggccagcagtacgccatcgccggtacgatcgccggactcaaggccctgaaggccgattccgcccgccgcgtggccgcattcggtggcaagcccgcgttcatgctggtgcccggcatcgatgtgccgttccactccacgctactgcgcaagggcgtgccggaattccgcgacaagctcgacgcgctgcttcctgcttacatcgactaccgtggccgtctggtggaccgctacatcccgaacctggtggccaccccgttcgagatgaccaaggaattcgccgccaagatcctcgaagccgtgccgtccgaacgcatcaaggccgtgctcgacgacccggccgtgtgggattcctacgccgccgacgaccagaagctcggccgtctgctcttgaccgaactgctctcctggcagttcgcctccccggtgcgttggattgaaacccaggcgctgctcttcggtcagcgcgaacagggcggcctcggcgtggaagaatacgtcgaagtcggcctcggcaacgccccgaccctggccaacctcggtaccaagaccctgcgtctgcccgagttcgccggcaacgatacggtcgtctacaacgtcggtcgcgatgaaggccgcgtctacatgaccgacaccgattcgctggttcccgacgacgagccggaagaggctgcggcctcggccccggtcgaaaccgctcctgccggtggttccgccgtcgccaagcttggctcgggtgctgctccggcaaatgccgcgactgaggctgctcagacaacggatggctccgtcgccgtacagtccactggactgtccgactcctcgcgcggcctgcaatcagggcaggccgctgctggcgcaccgtctggtgccgccgtcgccgacctgcccttcaaggcttccgatgctatcggcgtactcatggcctactccgccaaggtgcgcctcgaccagatcggcagcaacgacaccaccgacaccctgaccaacggcgtttcttctcgccgcaaccagctgctcatggacatcagctccgagctgggagtcgccagcgtggacggtgctgctgaagcgacgctcgacaagctcgcccaaatcgtcaacaaggccgccccgaactacaagccgttcggtgccgtgctctccgaggcgctgcgcgaccgcctgcgctcgctgttcggtgccgccggcgtcaaacagcagtacatccgcgaccgcgtgaccaacgtatggcagctcggcgaaggctgggtggccagcgtgctcgccgcactgctgctcgacactcgcgagggtgccagctcccgtggcggcgacctggccaagctgcccaccgccgccgtgcagaacaagccggaagccgacaagctgatcgatgcggccgttgaggtcgtcgcccagctcaagggtgttgccgtggccctgccgtccgccggtggtgccgctggtggcgctgtggtcgattccgccgcgctcgacgccttcgccgagaaggtcaccggttccaacggcgtgctcgccgccaccgcccgcttcgtgctgaacgagctcggcgtggccgctccggctccggaagaatccgaggacgagaacgccgccgtcgtggccgcggtcgaagccgaacttggttccgactggcccaagcaggtcgctccgcgcttcgacgccaacaaggccatcctcttcgatgaccggtgggcctccgcccgtgaagacctcgcccgcgcctactacggcaacgaccccgccgccttgaacggcagcttcatcggcctcggcaagaccatcgccgccgaagcccagtggttcgccaacaagtcggagagcgaggagcttaaggccgccttccagaaggccggctccgaggccctcgaacaggtcgcttccaacaagaacgcctcccgttactcgaatgatatcgccatcgtcaccggcgtgagcccgaactcgatcgctgctcaggtggtcgaaggcctgctcgcgggcggtgccactgtggtggccacctcgcacagcttcaagccgtccatcaaggcttgggccaagcaggcctaccgcgagcacgccaccggcaacgccaagctgtggctggttccggccaacctctccagctaccgcgacgtcgacgctctggtcgactgggtgggccacgagcagaagaagacctccggtgccaccaccacgattctgaagcccgcgtgggagccgaccctgttcttcccgttcgccgctccgccggtccatggcacgctcgccgactccggcgacctgttcgaatcacaggcgcgactgatgctgtggggcgtggaacgcgccatcgccggcttcagccacatcggtgccgacaccaacgtgcagcacaagctccacgtggtgctgcccggttccccgaaccgcggcgtattcggcggcgacggtgcctacggcgaagtcaagagcgcctttgacgccatcgtcaaccgtgcccgcgctgaaaaggtgtggtcgagccgcgtcaccttcgctcacccgaagatcggctgggtgcgtggcaccggcctgatgggcggtaacgacccgctggtcgccgtcgttgagcgtcacggcatccacacctactccaccgcacagatcgcggccaagctgctcgacctgtgcactgccgaatcgcgcgagcaggccctcaaggccccgctcgatgtggacctgaccggtggcctcggctccgagcccatcgacatcaaggcgttgcgcgcggaggccatggccgatgcggagaaggaagctgctgcggcctcgtctcaggaaacggatggctccgtcgccggacagtccactggactgtccgactcctcgcgtgggcagcaaatcaaggcgctgcccaccccgatcgtcaccaagcaggcttcggtcgaccttgccgactggaccaacgtcaccgccaagccggaagacgaaatcgtcatcgtttccgtcggtgagctgggcccgtggggctccggtcgtacgcgcacccaggccgagctcggcatccactcggacggcaccgtcgacctgagcgccggcgcagtgctcgaacttgcgtggaacatgggtctgctgacttgggccgacagcccgaagcccggctggtacgacaccgacggcaacctcgtgcccgaagaggacatcgccgagcgctaccacgacgaggtcgtggcccgctccggcatccgcccgttcgaggaaggcatgggcaacgactacaaggacggtgctgacgaagaagaagccgaggtcttcctcgaccacgacgtcaccttctctgtgcccacccgcgaagtcgccgccgaatacgtcaagttggacgaggctcacaccaccatcgccccggatgaggaatccggcgaatggaacgtgacccgccacgccggctcgatgatccgcgtgccgcgccgcgccaccatgacccgcacggtcggcggccagttcccgaagggcttcgacccgacccgctggggcatccccgcctcgatggtcggcgacgtcgacaagatcgccctgtggaacatcgtcaccactgtggacgcctacctgggcgccggcttcaccccggccgaaatcctcgagtccatccacccctcgctggtggcttcgacccaggg

SEQ ID NO: 2104 - DNA, 32504 bp, Unknown
  R51_24m  MAG No. k141_2578
gattgggtcgacccgcaggccatcgacacggttctggccacgttgcgcgcgcaacgtgaggccagcgagccgatcgacatgctggtgaccaactatgtgtatgacaaagtgaccaagcgccacaagatcgtggtgaacttccgtcatgtgatggaggccggccgcgtgctcggctgggatgacctgggcaagttcggtctggcgcagtacatcatcatgcatgcgctcactttccgcacgcaggtggtgcgcgattccgggctgaagctgccggagcatacgttctacgtcgatttctattactcgtaccagccgttcccgtgggtgaagcgcatccagtatctcgacgtgccgttctaccactacttcatcgggcgcgagggtcagagcgtgcagaccgacgtgatgattaagcgtgtggatcagctgcggctcgtcaatcggctgatgaccgaggccacgcccgaacgtggtacggtgccggaggggctgtaccggtacatgattcacttcctgacgatcgaatcatgcgttacctcggcgttcctgattctctcgcgcgatccggccaactacgttaagaaaaccgagctgtgggatgcgattgacgcctattctccggccatcggcaaggatgtgcgctcgaagctgatgtcccgcgcgctcaatctgcctggtaaaaccggccgctggatcgtgcgcaacggctatctcatcgccgaacgcatcgtcggcttcaactgattcggattgtggctttgccctgctgacgcgttatcagcagggcatccctattacctccccagccgaggtcttgctactcggcccaacggtcggacattgcgaagctgttgtgcatcaggttgctggaggtgtatagcacgtcgttcagcagcttggttgtatgctcgcgcaggtagtcggccatctcgtcgttggccgcttcgagcacatccgccacgctctgcacatccttctcatcgccgtggccgccatcgagcggccatgcattcgtacccgtcgattcggcatcgcttcgagcaagcaactgctcatccgtgcgctcgatgagccggtgcccgaacgcgcgcacgccttccgcatagccctcgatgaaccggttcgtctcataccaatgcgcgtcggccacgacggcgatcaggcggttcgtccaatacaggttgccggtggagacttcgggcgtggtgtcgcgcaggtaggcaggcgtgtcgttgacgttcgcgtagaacggcgcggcggcggtgaacggaccggagccgaacgatacccacatcaccgtgcgattggccgccggcacatacgggcggacctgaatcgccaccatatggccggtgcggttcacgccgatcggacggtaacggtggcgcgattccgccgtgccggtcgtgccgtacgggtcgtacggcgtgccttcgaagtgcgaggacagcaggaaatcaacgtcttcgaggctcaccttgtcttccggcacgcggcaccacgggatgtcgtcggattcgggcgtgtagcgggcggccggcgaatcccagtcctcgttggggttgaggcggcgttgcatgtaccaggcacgcggcgtgttgtagatatggtccttcggcgtcgcggtgccgaaggccttgcgcgggttgaagcgggtgggaagggcaacggttgttccgaatccggcgctatgcacgtgacggccgttggaagagaccgacgttcccattgtgcggtcaaggtgatgcgtggccatgaactcgcgcaggtcggcgctgcataggtattcgcgctgctcgccgaacgcatcggcgaggtcgaagtcgtcgatgccgagctggttggggatcgtggcatagcagtcgtcgggcactcggcgggcgatccaatgatggccgccgatggtctcgacgtaccagatctcgtccgcatccgaaataatcacgccgttcgattcgtaggtgccgtaggtttcgagcagttcgcccaaccgcgcgacgccctcgcgcgcggtggtgacgtacggcagcacaagggtgatgatgtcttcctcaccgataccgccgggctgctcggcctgataatcggtgctgtccggcccgccgacagccggccgcaactcgaccatcgggtccgcgccgagcacgcgctcgttgacagcgatggtttcggtggcgctcatcgccacgttgtgttcgttggcaccggcttcggccagaatgccacgattattcagcacgttcggtgcgatggtgtaccggcaaggattgtccggtagttcgatttcgacatggctcagcacgctgcggtagtggcgcggctggtcgtcgggggcgacggcgacgaagcgcttgggatcgtaacggcccgagcccgaatcgtcatcgcgggcgatgatggtggaaccgtcgtaactggcatttttgccgacaagaatcgtggtgcatgacatggggcaccactctaggagccaggctggtcgaaacaaaaaatccttggaaccattgcgattccaaggatttgttgtgccccctgtgggattcgaacccacaacccacgacttaaaaggacgctgctctaaccgttgagctaaaggggcaactcttctaaaatacacaccgttttgggatatttcaactacggcgttgcgtacacgtttgcgtacgcgattggcccaacgcacggcacagcacacgcaatgtggcccaaatcgcagcccaaatcgcatatcgcctctagcgatagatagccgccggcggctacccttgtacattatgagtgaatcccccaattggagcaatcccctgcgcgattcgcgcgacctcagactgccccgtatcgccggcccgtgcagcctcgtcattttcggtgtcacgggcgatctggcacaaaagaaactgctgccggccgtctacgacctggcgaaccgtggcctactgccgccgagcttcggcctgaccggcttcgcccgccgagactggacacaggagcggttcatcgaattcgtcaaggccgccgtccgggcgcattgccgtacgccgttcaaggagtcgacttggcgcaatctggccgccggcatccgcttcgtgcagggtacgttcgacgatccggaggccttcgagcgtctgagcgccaccgtgcaggagcttgaccgcgaccgcggcacgcagggtaaccatgccttctacatgtcggtgccgccgcgcgccttcccgcaggttgccaagcagttggccgcctccggcctgtcgcgctcgtccgagggcgcatggcgccgcgtgatcatcgagaagccgttcggccatgatctggccagcgccaaggaactcgacagcgtggtatccgaagtgttcgacccgagctccgtgttccgcatcgaccactacctcggcaaggaaaccgtgcagaacctgctggccctgcgtttcgccaacgccatgtacgagccgatctggaacgccaactatgtggatcacgtgcagatcacgatggccgaggacatcggcatcggcggccgcgccggctattacgacggcatcggcgccgcacgcgacgtcatccagaaccacctgcttcagctcatggctctgaccgccatggaggagccggtgagcttcaccgccaaggacctgaccgccgaaaagaccaaggtgctttccgccgtgcgcctgcccaaggacctcgccgccaacaccgcgcgcggtcagtacgccaagggctggcagggctcgcacgaagtggtcggctacttggaagaaaaaggcatcgaccccaagagcaccactgaaacgtacgccgccatccgcctcgatatcgacacccgccgctgggctggcgtgccgttctacctgcgttgcggcaagcgcctcggcaagcgtgtaaccgaaatcgccgtggcgttcaagcgcgccccgcatctgccgttcgagcagaccgccgtgcgcgaactcggcaagaacgccatcgtgattcgcgtgcagcccgacgagggcgttaccatgcgcttcggagccaaggtgccgggcggctccaccatggaggtccgtgacgtgaacatggacttcagctacggccgctccttcaccgagaactcgccggaagcctatgagcgactgattctggacgtgctgctcggtgatccgccgttgttcccgaccaccgaagaggtgaacctcagctgggagatcctcgatccgattgaacaattctggtccacgcttggccagccgcaggcctaccgcgccggtacgtggggtccggcacaggccgacgaaatgctggcgcgcgacggccgccactggaggatgccatgatcatcgatatgccgaacacccgcacccgcgagattgcgcacaaaatcgaacagctgcacgaggagcgcggcgaatcggcgaccggccgcgtgctgacgctactcatcgccaccgaggacgcggacctagagcatgcgctggaaatcgcgaactcggccagccgtgagcacccgtgccgcgtgattgccgtagtaccggataccaatcctgccgatcagtccggcgaaggcgaaccgaacgagaccgaagtggccgccgaggtgagcgcgaatcgcgataatccggccgtcgatttgaccgacggcccgaacgatccgaacgattccaacctgaacgcccaagtgcgattcggcgcggacgccggtgccggtgagattatcatcttgcgtccgcgcggtggccttatcaaccacccggatacgctggttatcccgctgcttgtgccggatgcgcctgtagtggcgtggtggccgaccacaccgccgtcgaacccggccaaggatctgatgggtgcgatggcccgcagtcgcatcaccgacgcgctgcactccaataatccggaggccacgatcgagcgtttgcgccgcaattggacaccggaagacatcgacttgtcctggacacgactgaccgtctggcgcgcaatgctcgcctcgatgctcgatcagccgccgcacctgcccatcaccgccgtgaaggtgaccggcaaggccgacttcctgcctctggaaatgctgtgcgcatggctgcgtctgaaactcggcgtaccagtcgaaactgagttcgtgcccgacgcgcaggccgtgaccggcgtgtacctgacccgtgaggacggtgtgatctcactggaacgcccgtatgaggaccaagcgctgatctcgctgcccggccagactccgcaggaagtgtccgtgccgatgcgcaccatcgaggactgtctgaccgaggaactgcgccgcatcgatcccgatgagatctacgccgaggtcatcaacgaaggctgggatctgattcgtcactgaagtcggtagaaccgttgccacagcggcgttggcatgagttcggcaattgtggtcgagccatgccaacgccgttgctcatcgtttcctacctcatgcgatgacgaagctcatgaccgcggagtaataaagtgacatatgcgatgtcgcacaatgtacattgtgttgtcaactgacaacacatttcattgctgcaaatggctggattcccggcatgccacccgtattatgcgttgtcaactgacaacacaatccacattgcaaagtacgacacataccccatataaggaccatacatggcaactcgaaaactcattgtgtatccgaataaagatctgatgattcaggctggcgcgcaacgttttgtcttggcgctactcgatttgctcgccgaacgattgcctgatggcacgcatcgcacacgtgtggatgtggcgctgtctggcggttcggccgcacagccgttgggtttggcgctgaacgatccactggctgatgcggttgattggtcgcgcgtgcatttctggtggagcgacgaacgttttgtgccggcttacgacaccgatcgcaatgctctggaggcccgtcgcctgctgcttgaccagctggtggcggatggcaagctgcctgaatcgaatattcatgagatggcggccgatacccgttcagccgatgacatcgccgatgtgatggatcaggccgatagtgatgacgcttccgttcgcgccgccgccgatgccgcgaatgatgcgctgctggacgatgccgcgagcgactatgagcgcgagttggtgaatgaattggggccggaaccggtcatcgatctgatgattctcggcatgggaccggacggtcactatgcgtcgctgttcccgggtcatgatgaggtcaaggttaccgataggctcaccgtgggtgtgaaccactcccccaagatgccgccgttgcgcgtctcgttgaccgcgccgctgattgcccgctcgcgccgtacatggttcttcgccgccggtgccggcaaagccgaatcgctggcccatgtcttcgagcggcccaacaacccggattacccgtcctcctacgccaacggagtggacgagttcacctggttctccaccgaagaaaccgtcaccgagttgtgatggcgcctcctgtgggccggaccctgaatgaggggcccggcccacagattgtcgcagacgctcaagcctgctgttcctcgggctggccttcctgcgcccagagggtgtggaacacgccgggcttgtcgacgcggccgtaggtgtgggcaccgaagaagtcacgctgggactgggtcagggcggtgggcagacgcttggagcgcagaccatcgtagtacgccagggagctggagaacaccggggtcgggataccggcctccacggcacgcacgattacacgacgccatgcatcctgcgattcgccgatgatcttctcgaagtacggatcgaacaacagggaagccggcaaattatcgcccttgaaggcctcggtgatgcggtcgagcaggaactgggcgcgaataatgcagccgccacgccaaatgcgggccacttcggacaggttgatatcccagccgtattccttagcaccgtcctgaatctcgttcaggccctgagcataggccacgaccttggaagcgaacagggccttgcgcacgtcctcgacgaacgcggccttgtcttctccggccagatcgatggtcttgttcgggccagccagaccttctttctgagcgtcttcacgcagctcaccgtgcgaagacagtgcacgagtgaacacggcttcaccgatagcagccacaggagaaccaaattccagaccagcctgcacggtccaagtaccagtacccttcatgccggcatgatccacgaccacgtccacgaacggcttgccggtctcggcatccttgtggtgcagaatctcagcggtgatctcgatcaggtaggagtcaaggtcacccttgttccattcagcgaacacgtcgccaatctcctcggtatccatgccgagtccacggcgcagaatgtcatacgcctcaccaatcacctgcatatcggcatactcgatgccgttgtgcaccatcttgacaaagtgaccggcaccatcggtgccgatgtgggtcacgcacggttcgccgttcaccttggcggcgatggactgaagaatcgggcccaaggtcttccaggattccgcagtgccaccaggcatcagagacgggccgttgagcgcgccttcctcaccaccggacacgccgcaacccacgaagtggaagcccttggcacgtacttccttctcacgcttgatggtgtccttgaagaaggagttgccaccgtcgacgatgatgtcgcccggttcgaacacctcttccagctgcgcgatagttgcgtcggtcggagcaccggccttgaccatgatgatggcggtacgcggacgcttcagggacgcggcgaattcctcgagcgtttcggccggcacgaagttgccttcggcgccatgctcgttcatgagcttctcggtacgcgagtagtgacggttgaacaacgccaccgtgttgccatggtgcgccagattacgcgccagattggagcccatcgtggccagtccaatcacaccaatgtttgctgtagcttcggccatgcgccttgcctttcgtttgattgtcccatcgtcatcacgcgcgtcacaaaacagcgcatcagcggagggaatcattccttcaacgctcgaaagtgtatcccacttaccacccacacgcgaaggctgtcttaggttctacgcaccttctgcccgcgaagcgtaattacttgccagccattcacatacgcccggccttggaagggtcgatatgcatggtctggaagcgattggccatgtaagcgtcgctgtagcgttcgctgaaccacatcgcgaccggtgaatcctgcggctggccggccatgcgcccataccagcaatccaaggccatcagcgtgaaggcaatgtcgatcaccatcagcaccgtgcataccgcagtcagcgaataccgtactttccatggaatgcgattaatcagagccagcagtcgcggcaacagccacttgacccacaccacaccaatcagtccccagaagaacatgaattggcccgaagtacgtccgtcgatggacagccaacggccggtgtaatcccacgcggtaataccgaacgccacttccatgaaccagctggtgcagtattcgaacgcgccgccgatcaccgccgaagcgcagaagatcaagaacggattcgccttccacaggcgattcaggcacacggttaccaataccgcaccacagccgtaaatcggcgagaacgggccccacagcaaacccgcgcggtcctgaagttcaccgttatacagcgccatatggtagatcgtctccataatcaggccacccaccgaagcgatggtaaacagccagaagatattgaagaagtccagtgcaatatagcccttgccggattggtcgcggcccagcatgccggccgccaccgccgattcataatcatcgcgatcgtccatgcgtttgagcgcgcgctgcaaacggcgttcctcgctcagggagggatcggcggtcaccgaaatcacgacgagaataatcatctgaatcagcggcagcagcaggttgaagccaaggccggtcagggccagcgacagcatgccgtcggccaacgtcaacggcatcagcacgtaggtccagcgcgcggcataccggcgatgattgcgcagcagcatcacgccgaacacaatcaggcatgcggcactgactaccagcaccaccgcatgaatcgcggacaggatgaaagtcaggctcatcgcatcgacgtgcacatgaccatccagaatctcgcgcacggcatagaggatggaaatcaccataatcggcaatgtggcgagtccgtccagcagcacgaccgcgccatagatgcgcgccagaatcggtaaccgcttggcgttcaggttcaagccggcgtcgtccagttcgacggccaccagatcagccacgactgcggactcggcgtcacggttctcccgcggcttgccaggggtagtggccgtgccatcgtccttgaattcaaccatggtttcctccccacatagcgtccccttacactatcacccgattgcagttttgccgaacttgatggatagccggtacatgtctgtctacattgccggacaccgagcccgctatcgctttcaggaaacatccaaaaaccatccagaaatcttgtcaataagttccagaacgcctttcgctccagccaaggcactgatggccagtccggcaccggcagcagctccggcacaggttctgatacttccggtaactccaactccgaccagtcatccagccagaacgagcagtcggccattgatggtcaatccggcaccatcgaaagctgatacaacggtttacccatggggcggtagctctctcatgaggcggtaattaccccatggggcggttagcccaaaaccgcattccgcggaataaagccattttaagccaccgccccatgggaattttaccgccccatgggccacttaccacccaatgaaggttttaccgccccatggagggcagcctcacaccaacacacacagcacacccggccacacagcaccccagccacaaaaaattaggcacactgcccagcgacacacgataagccgctgggcagcggcgttattccgccaaaaccatcatcaatcaccccaataatctccggcagccgtattacgctactacaaccgtagcgctacgattaacgtatcgctacggaaaacgtagcaatcaagcaacaccaagctccggaggtatcagtgggcaatatcttcaaggtcctcaaacgcgacttcctgcgcctgttcaaggtgccggccgcatgggtgatcctgttcggcatggtgtttatcccgccactgtattcgtggtacaacatcgtcggcttctgggacccgtacggcaataccaaaggcatcaccgtcgccatcgccaacaatgacgacggcaccgacaacgcgctcatcggcaagcaaaacctcggcgatcaaatcgtcaagcagctgaaaagcaacgaccagctcggctggaccttcgtcaccgaagccgaggccatggaccaggtggaatccggcaaggcatacgcagccatcatcatccccaaagacttttccgacgatctcgccggcgtggtgaccggcggcaagagtcggcccactctggagtattacgtcaacgaaaaagccagcgccatcgcccccaaagtcaccgacgtcggcgcgtccactgtggaccgcacggtcaattccacattcgtctccaccgtatccaaagtacttaccgaagtcatcaatacggttggcggcaaagccatcagcaccgaagacaccaccaaagccaaggccctcacggcccttgccgaggcctccggcgacgtgcagcacacacgcagcaccatcgccaagctcaccaccaaactcaccgataccccggagcagacacgcaccgcacgtcaggcgctggacgacgcgcgcgcacttggcatcgacaccgcggaaggcctggccggcgtctccaccctgatcggcactacccagaccaacctgaacggcttcgtcacctccacgtccgaagcgcttgaccaaggctcaagcctgctgagccaggccgcagcacaggccaaccaaagcgtgggcacggtagccggaaccatcagcgccgccaatcagcaggtaggcggactgatcaatacggcggaagacatcaaccaagcgaacgccgacatcatcgaccaactcaaagggctgccgaacgccgatcgagaaccgctgcaatccgccattgccacactggaaagccgcaatagcgagcttgccggcgcactgggcaacctcgatagcctgaacaccactatcggcaatgcctccacagacaccgccggattggcgcagcatctcaataccgccacccaaaccacggtgcgcgaggccaataccgctcgcggcaccatcacctccggcgccattcctcagctcaacaccggcctcaacaccctcagctcgaccgccaacactctgtcgaccggcatcacgtcgcaaggctcactcatcgatcagtcgaagagcaccctcgatcaactcgacaaagccgcctccaccacggtgaccgccctgcacgacaccgataaggcgctggccggcatgcaaaccaagctcgaaacgctgaccaccgacatcaaagccctgagcatctccagttcactcagttccctgatcggcaccgacggcaaactggatgccgccacaatcgccgacttcatgctctcccccactgttatcagcgaacgggccgtctacccggtcgcctcctatggttccggcatggcaccgctgttcaccaccctgtctttgtgggtgggcgcgttcgtgctcgtggtcattcccaaactcgaaaccgacgacgagggcatcgacgatctcacgccaacccaaggctatctcggccgtttcctgctgctggccacgctggccgccgtccaaggcctggtcacggccatcggcgatcttgtcatcggcattcaatgcgcgagcgccccggtgtttctgctcacctgcgtcatcacctcactggtgtatatgtcggtgattttcgccctctccaccacgttcatgcacgtgggcaaaggcgtgtgcgtggcgctggtcattctgcaggtgccgggcgcctccggcctgtacccgattgaaatgatgcccgcgttcttccgcgccatctacccgctgctgccgttcacctattcgattgacgcaatgcgtgaaaccatcggcggcttctacgacggccactggttcgcctatatcggcaaattgctggttttcgcggttctggcctttgcgcttggcctcggcgcccggccgaaactggccaatctcaaccgcctgttcgcgcgggaaatcaaggaaagcgacatgattatcggcgagccggtgcacctgcctggcagcgaataccgtgtcactcaggccattgcggcactggccgaccgcgacgaataccgtcatgccatcgaacgtcgggccgccaaattcgcctaccagtatccccggctgctgctgggtgcgcttatcgccggattcgtggtgccggccgcgctcattatcgtgtttgtgctgaccaccagcgagaaaatcgtggtcatgggcacatggctggcatgggtgctcatcatcatgggcttcctgatggtcgtggaattcatgcgcgattccatccgccgccaaaccgagctcggcaacctttccgacgagtcgatccgcgccatgctgtacgggcataaggccaagcgtcgcgacacctccgccgaacgccacgaagaagcggacccgagcgccgccgttaccgcaatcatccccactattccgccgaccaaggaaggcaggcacgcacgatgaacaccatgtggaaactatttaccggcgacatcaaacgcctgaccagcaacgtggtctccatcatcatcgtgatcggcttggtgatgattcccggcctgttcacctggttcaacgtggccgcatgctgggacccgttctcgaatatgaagaacctgaaattcgcggtggcgaatgtggatgaggggtatcgttccgacctgatcccggtgaaagtcacggtcggtgatcaggtggtgaacgcgctgcgcgccaacagtcagctcgattggacgatcacgtccaaagccgatgccgtcgagggcgcacgatccggcaaatactacgcggccatcgtaattccgaagtcgttcagcaaagacatgatgaccttcttctccgacgatgtgcagcatgccgaactgacctattaccgcaacgagaagaagaacgcgctggcaccgaatctgctcaacgagggcacggacgaggtggcggcggaaatcaacaccacgttcgccaagaccatcacttcggcagggctggaaatcgcgtcttcgctggccgatcagctgtccaagcccgaagccaaagagcaactgaataccttcaacgccaatatcgccgatttcgccacacggcttgacgatacggcggatttgcttggcacatacagcgcattgaccgatacggccggcgccttgcttgacacctcgaactcgctgatcacgcaggtttcctctgccgccaaacaaggaggcaaggatctcgccagcgccaagcagggagtcaccgacgtggtcggagccctgggcaccaccgctgacgcgatgagcagctcactggacgcgagcgcctccagtttcggcgcggtgtccgattccatagacaagctgtattccgacgcgaatgatggtgccaccacggccgccgacgaattggaccgtcaagccacggccattggcaagcagacggagaaatacactgaaattcgcaacacgttggccggcatactgggcaacgactcatccatcatcacggcgattgaccgttcaatcgcacggcagaacaggctgcggcaagcgctgaatacggcggcgaccgatattcgccaaggtaatcaggacgcgcaggatcagcatgcgcaggtcaaggatctggccgatcaagcgcagaacagtatcgccaatatcaagtcggatttcacggccacggtgaaaccgcagatcgactccctgtcgtccaccgtctctgacgcctccggcatactgagttccggcgccacccagttggactccacgctcggcgacctgaaaaggacttccgacgacgccagcgatatgctcagcgacgctcgcaccacgttggacaaggtgtccggcaaactgcgttccgccggtgccgaactggcttcgttcaacagcacactgagcgacgcactaaacagtggcgatatgagcatggccaaagaggtgctgggcaatgatcccgaaacgctggccagtacgttggccgcgccggtgcagctcaggcgcaaggccgtattcccggtggcgaatttcggttcgtcgatggcgccgttctacacgctgctgccgttgtgggtgggcgcgctgctgatggtggtgacgctgaaaaccaccgtgtctcgccggacacgcaaagcattgggcgagccgcggccgcatcggctcttccttgggcattacggggtgttcgcgctgattgcgctgctgcaatccacggtgtcgctcggtggcgatctgctgttcctgcgcgtgcaggccgtgcatccgctgctgtttatgttgtccggatggctggcctcgctggtgttctcgttcttcacctatacgatggtggtgagtttcggcaatgtgggtaaggcaatcggcgtgcttatgctcatcgtgcagatttcgggtgcgaacgctgcctacccggtgcagatgttgcccgacttcatcgccaaagtcagtccgttcttgccgctcacccatgcggtgacgatgatgcgtgcggccatcgccggcatctacgacatggattactggcgggccgccggaatgctgctggcgttcgtgccgccgctgctgttgcttgggctgttgctcaggaagccactggtgcggttcaaccagtggtatgtggccaaagtcgagagcactaaagtgctgggctagtaggtattatccgggggttgcctacaaacggcatagacttaccaccctcagtctggctttgccagtcagctcccgccaacgggagcgtacgggagcatatttcgaagagaagagatgacggagatgacaggtacgacggcgacaccgcgcggtgagcgcacgcgcgaggcgacggatcgcaagctcatgcgagccacgctgcagattgcggtggaccgcggcatcagcggcgtgaccatcgaggaggtggcccggcgctccggcgtggccaaaaccacgatttaccgtcgataccataatgccgacgagctgctgcgcgagatcagcgcgatgtatctggccatcccggattccgacccagtgcccagccccacgcgtgagcatttcacgcaactattgcagcgattggtcgattgggtgcgcgacaacgacattgacgtcaagcgcgtgggcattgtattgtccagcgaggccgagttcttccagcacatcgtcgaccaggtggtgaccccgtggctggagcatgtgggggcgttcctcaagcagggagtcgcgcagggcgtgtttcgcgaggacgttgacaagaagttgctgttgtccacgattatcggatctttggtggcgtatgaggccatcgagggcaaagcgatggacgacgacaccgcctgggcctcgcgcatggccgatctgctgtggccagcattgctgaagtagcggtcttactcctgaatcgaagcctcctggcgggcgacttcgagggctttgttgaaggcgtcggaggtccagctggcaccggcgaccttgtccactttgagtcccttcaggggcttgccgtccactacgccgttgatggctttggcgaagtcgccctgatgcttcttggaaatcgtggtgaacgggtgcccaatgattttgacggtctcgacgttgccgtccttgatggtcagatggacgtcgatggaatcctcgccgaccgggccgtactggccgttgatcgagtagttgccgtccttgtagttgccggtgtccttcttgtcggacgtggtggtggacgggtcgttgtgcgatgagccggaatcggagccgtcggagctatcggagccgttcgactgggattgcgactgctcttcctgcgacttctcggtctcgcccgagttgccggcgtacgcatcgtccatcggcgtggccttggattcgccgcacccggccagcagcgcgccagccacgaccagtccggccgccgccaatgtcgcggatttcttcaacgtattcttttcggtcatattcacgctccttaagccccctctgacgagggggctgtcagcgaagctgactgggggagagaccatcagcttgccatgtattcctcacatactgctcgatgcccctgacggccctactcctcgccgccggttttcgcggccttggtggggtcagcgaaaccaatggcggtctcgccgttctgcgcgccctcgacctgtgcacccgtggaggcgggcttgccgccggccgcctcgtaggccttgcgcgcatcctcgtcattccacttctcaccgacgagcacgccatggttgagcatgatctcgcgctgcgcgcagctggcgacaagcgcatcgtgggtgaccacgataatcgtggtgccctgctcgtgcagcttgcggaacaggtcgagcacgattttctcgttcttctcgtcgaggttgccggtgggctcatcggccagaatcagcttcgggtcgttgatcagcgcgcgggccacgcacacgcgctgctgctcgccgccggagagctggccgggcaggtggtgggcgcggtccttcaggccgaccttttccagcgcctccatggcctgcttctcatcgaccaccgaatggtagtactgggccaccatcacgttttccacggcggtcaggtgcggcaccagatagaacttctggaacaccagtccgatgaggttcttgcgcacgtcggccagctgcgtggcgttcaggtcctccagcttgcggccttccagcttcacggagcccttggagggcgtgtccatgcagccgatcatgttcatcagcgtggtcttgcctgagccggaggagccgacgatggcgagccattcgccttccggcacggtcagattgaggtcgtccacggcatgcaggtcgccgtagatcttcgagatgtggtcgagttcaagtagcatgacgtttctctttctttattcttcgcgaagcacgacggcggggtcgatgcgggtggcgcggtggacgggcgggatggaggcgacgatggcgaccagcgcgctgaacagcacggagatcagcgccagccaccagttgaatccgatggagcgttcgaacaccgccacgcacagccaactggcgagtccgtagccgattgcggtgccgatgaggccgccgatcaggccgtagagcgatgattcgatgtagaactcggtgccgatggcacgcgagctggcaccgagggccttgcgcaggccgatctcgttgcgtcgctgcgagacgatcgagctgattgtggtgccgacgccgacgagcgtcagcaccagcaccaccaacgagacgatccagaacagcgtctgcagcatggtgatgatgcgggtgtcggaggcggtgatcttggtgacctgctgcgccttgacgtgcatggaggtcatgtcgttgatgctggacaccaggcctgcgaggtcgctggagccggccgaatactcgatgacgtccacgccgcgcgtgatgccggtgagcttgttgacgtcggcgttggtggcgtagatgatcgagtcttcgctaccgccggtgtccacgatgccggccacgcggaattcggtgccggaggtgtccatgatgtcactggagacacggccgtctttggtttgctggtcgatcgaggagttcgacgaagtgccgttggtgctggcgttatcggatgcacggtagccgatggtgatggcggagccgattctcagaccgatggcgtcggcgatgtcacgtccgaccagcaccttgccgtcggtcggccacgagccgtcgaccacccagtgatggttgaggttcttgacctgcgccgcattcacgccggccatcacgtacggcgaggcgttgacgcgcacgttctcgtatcggtaagtggcgtatttcgcggaacccttggccttgaccatttcagtggtgtgctgcaccatcgccttgtcgatgccggccttgccgtcggcattggtcgattcggtgggtgtgacaatcaggttcgcgccgtacgcacgcatctcctcgttcatctgctgcggcacggcgaggcagatcatcgccaggcagaacagtgtggccgcgccgaccagcgacgccaccacggccatcaccgcgcgcgaacgccggcggaacacggcgctgaacagcattctgaagaacataccggtgttggtcatcggtttcctccttccacacctacgtagataaactcagcggccatggagcacctccgcgggcttgagattcagaatcgaacgaatcgaggaggcggacgccagcagcacggtgacagccagcagcacgaacaccagcacgaacaccatcggccgcatcgtgatgccggaaccgaataccacccggcctatcagctgggccacgccggaaccaagcaacgcgcccacaatcgcgcccagcagcgagattgccgccgtttcggccagcatcaggcgggataccgcggcatcggtggcaccgagcgccttgagcagcgccagctcgccagaccgttcgccgatcgaggcgaccatcaggttggccacggccacggctgcggcgatcaggctcagcacggtcatcagaatcatcacggcctgcgtcttctgcagcacattgccctgcaacgcggcgacctgacgcacctgcttggccaccgcgcccggaatcacctcttcgatctggtaggcgatcgagctcgggtaggcggtgcagtaccaggtctcccattcctcttggctcagcgcggccgggttcgcggcggccttacgggccaggtcgttctccggcgtggtcagggccttgacctcgatcttgtcgaccgaatcgggcaggtcggcgagcacctgggccgtggaggaggcgatgtagagcgagccgttgtcctcgtcgccggaatcgtagacgccggtgagcttgattttctgctcgttcttcttgcccgaggcggtggtcttgttgagggtgatggtgtcgccggtggtcacaccgagttcggaggccagcgtcttgccgatcacgccctggtcggaatcgtccttgggccacttgccgtccagctgccaccacgagcgcatgccttccacgcccacgacggtggtctcgccggtggagatcttgaggtccttgttgaaccacgtgccgacgaccggcacgttggtgccgttcaccatggcgtggatgttgagctgcggcgcgaagttggtgatgttgaacgaccagaagatcgtcttgatcttggccgcgtccgactccttcagaaaggcggtcgggtcgctggtggacgccgcgccgcccgactcggtgttgtacaggtcggaaacgaccgcgtccgccttgggctgcacggtgatgttcgaaccgtaggtggacagctcggcgttgagcttgtcgcccacgtcgaacacgacgcccagcatcgatacggacacggtcgccgacaggcatacggtcagcgcgataagcaggcgccggcgcagctgtcgggtgaacgagcgagtaatcatacgcagaaagaacatgattcttgcctcctgcctgactcactggaagtgggcgctcagcgcgtccaaatccgtagtctgaatggtgatcttgccgtggccggtcttgtacgggaatggtatcgggttgcagccacccttgaagccgatggtcgccaggttgatggccacctcgcacttcttgcagatgatcttgccgtccttctcgtagtagccggcgtcaccgcagttctcgcaggcgtccaggccgatgccgtacgcgccaccgttctttcggatgatgatgaagcgcatgacggtgccgtccttggccttgtattcgaagcggtgcaggtggccgtcctcgacctggctgaagggaatggtggccacgccgtccttgagcgagtaggcttccggcggcgaaagagtgatggtctgatgggtcgcggcgacgccgacggtgagggtcagcgtgacgccgatcatggccacgaggctccagacggcggaggccacggcgcggcggcggaacgccttgtgcttgcggccgatggcttcgttcgcgccggtcagcggcatgcggaagccggccaccacggaggcgacggccggaatcaggaacacgaacgcctgggccatgatcatccagtcgttgtggttgatcgaccaggcgagggccacgaatcccgtgtggcccatcgggaaaccgcgtgcctgcaggatctgcatgacaccggtcaggtgccggacgaacagaatcaccagcaccgcgagaacggcggcggtgaacgaggcacgcaccgcggtcgaacgcatcgtgcggaagatcacggccacgatgatcgacatggccaggcccagcgcgaagccgagcgcgcgcagcagcatgtcggacgtgaagatcgggtcgccgggctccacccagatggtcagctgcaggatcacgtccggcagcgcgtagaacagggtgagcgcgatgtcgatggcggccacggcgttcgcaatgtgcatgaacaccttgtgctgctgccaattggtggtgatgtggcgtgcgaacaccaccacgacgatggtgaggatgtcggcaatgatcgcgcaccacagcaccggatagttgacgaacgtgcgctggttgatcacggccgaggcgcgcaggccggcgaatgtgatagcggcgatcaggccgacggtcaggccgatgagacgccaatgcgagcttatcggcttatctcgcccctcgccgaccgtgagcatcacgctcaggctcatcaccagcaatgcgggggccaaggtgcccggcatcactgccacgaattgttcaagcattcgcgtcctttctctgttcatcttaggctcccctccctgaggggagctgtccgcaaagcggactgaggggagtttttagaccgtcctaagaattatctccctaaagcggcgtaaagccccctctgacgagggggctgtctgcttagtcaatcaccactgacgcggggtgtagtcccagttgtcgaaggtgacctcgatgggctcggtccagaacttgtggttcttgacaccggtctccgggtcaacgtggagcatccagccgttcttctcaggggactcgatggagagcttgagttggtaggtgccggccttgtcgagcttgacgttggcgccgtagtgcgggccgtcggaggcgttcatctgcatgaaggtaccggaggtggcctggccgccctcgacttccttgccggtggacttgtcgatgatggtgtagttcacagtaaggtcagggacgaagtcgcccttgccgtagccgtagtcggtgccttcctgggaggcgtggatgtcggcttccaggtggaaggaagcgtcagcagccttcagacccatggaagcagggtacatgtcgatgggctggaagtagacggcgcccacggtcagcgggccagcggccttgtcctgctccttggcggtgccggaggggccgaccgggacctcttcgaagccggaggtctcagtcggggcgtcggccttcttggagtcgtctttcttggcggtgtcggaggagctggtcgaggacttggtatcggaagcgttgttggtggaaccgcaagcagccatcgaaacagccatggagccggcgagcagcacgccgagcagagcggcaagcttcttgttcttcatcatttctcttattccttctgttgtggtgaatggattattcacgacttatctgtttttagttgtggcggcgtgggctggaatcgcttccgttgccatgtcgcaagttgtgttgcgcgagatggtcgcaccgggcgttgtgctacgcctgcgcgctctcctcgtcagccttcgcgtccgacttgctcgcaccggccgcaagccgggccttggccttacgctgtttggcaaagccgaccacgaacagcgcgatgacggcgatggctgccagtacctgggcgatgatgcattcggcgtacgggtagaatccgagccagtcgttggtgggaacgcccggcagatagttggcgggcagcaggtcgccctcgatgagcgcgtgcacgccgccgccggcgaagacaaccaccagcacggacatgaggatcgaggtgaccaggaagaacgggccaatcggaatctttacggaggtgaagcgaatcaccaggaagatgatcacgagcaccacggcggcggcgagtgcgccgaccaccatgccgtgcgtatcctggctcatcgtgtagatggactggtagaagatcacggtttcggcgccctcacggaacacggcgaggaagctcagcatggcgagcgaaatcaccgtgcgggaagccaccttctcgccggattcgacctgcgaggagacagaggccaccgcggcttcggtcttttccctgatgtagcggttccacgcttccaccgaggacttgttgagcatccagttgctggtccacagcagcatgcacatggcgacgagcgcgcacacgccttccatgatctcctgcagcgggccggagccgccgaacgcgagcatgaagatgaccgccacgatgcctgcgccggccagaccggcgagcacgcccacgtagatccacttggtgaagcgcttgttgccggacttgacgaggtaggccaccacagcggcgaccacgagcagggcctcgagaccctcgcggatcagaatcaggaacgcctggccgaccgagctggtgatgaacttgaggaagccaccctcctcatcggccgcgccgccgtcgagcttggcggcatcggtggccagcatgttcttcaggtcgtcgatgtacttcttgacttcggaagcaggcttgccggtgttcatcgaggagcggcacagcttgaactggtattccacctgggagacgcggttgccgctgatggcgctcagcacggtcttctcgaagccgagcttctcgtagtgctggtagtaggcgtcgttcacgagcgtggcgcccttggcggcgtcgccaccctcataggccttgtaggcgttgtccaggatcggaagcatcgcatccgcgacttccttccaagtcttggccgtttcctcggtgcgcttcttcttggcgtcgagctccttgcgctccttggcgatctgcttctggaggtcttcggagtactgcttcgggttggcgaggctggtgttggcgtcgagctgctgggccgtggcgtcgaggtcggcggtcaggtcgttgaccttctgggtaagctgatcggcctggtctgacgtgaacacctggctttgcaggtcctggaaggcctgctgctgcgcggtctgcttgtctgtgccgatggtgtcgctcaccactttgttgaagttggacgtcacgtagacggtggtgtatgcagccccgaaatcggacttggcacccattgggttgccgtccttgtattccttaaggccttcctgcaactgcgcttcgacggccttggcaacgtcggcccaggtcgcgtaatcgacgctggtggtgtcgtcgctcttgacggtggcagcagtggcagtggttgccggcgtcacggcgaacgcggactgcggaatgatggcggaggggaggaaggtcgcggcgatcatcgcaaacagaaaaacgatgaccgcaaatgcacgagccgagaccgtggccgactgcagacgaccggtgctgcccgacttcgcgcgcacgcgagaaacggcaacgcgcgtatcacgttcccgcatcgtgttcatttcagcggactgcgcgcaggcgcgacgaaccatgctgaattcctctcacttcaagtactcgaatggtccaaaaacaactatgaactctatagaaaaaaattcttgaacaacagtcttgattttttgacgggtgcgaggtaatagaaggcgttttagtgcttttcaaccccgcaattatttcactatctgagataactatgctcagagaggatggctttcccggaatgtgaacggcaacaccacaaaaagcggcaacgtgaggaataccggaatcggataccaaaatagtgccacgggtgaggcatacagcgacagcaccgtgaatgccagcaagccgtaagcggccagtgcggggccgtagcgtcgtcgcgcaggccgcaccgccagcgcaagaccagcagccagcggaatccacgtgacgtacagggccatcgaagtcagcggattgcctttgcgaacaccgacgcgaccatccgaacgcacccaccgatgaatcgcccgcaatatgtttttctgccattgcggcttgtcggaggtacccctcagcggcgcaaggtcatgttcgatggcggcaagccgttcggccgccacggtatcggcatcgccgtcggaagtatgcttccaagcaccttcagtcaggaaagacgcccattgcctgagatagctaggcgtgaacaggtagtcggaatcagtggggtacgcgaaattgacgcgcgggtcccaccatccgcgagtcaccccggcataggccgtggcatattcaaccggatgcgcgaggccgagctgcgcccagacctgcagggccgcgagttgttgcgccgcggttggcctagggtgctcgcgcagagtgcggaaggtctcatcggtgcggtgcgggttgatgccggcggcggcccagtcgagatccatgatcgcgttcagtcgccgccgctgaaccttgtctatcgcgctgggatcatcgtgcgcgagccgggccacgggctgggtgaccaggccccacacctcacgtccgggcgatcgattcgcatgcgtggcggccgcgcttaatggcgtccacacgccctgcgccacaacgatggcaaccgcaagacacgcaaacgcacgacgccgcgcgcctttgggcgtacagacaacgagcaaacagcagccggcgcatagcacgattatgagcgccgtccgcttggagacgatggtggcgaacagcaggatgacgaacgcgaatgccaccgggcggcgagccagtaccgagccgcgcgtcagacaagcctccacgaacagcacggccaacggcagatagaacacggcgtgcaacgagtccttgcccatcgtggtgattgcgccgaccaccacatagttggtggcaagatagacgaggccgagaccgatgagccagcgcggcgagccgattttgcggatgtagcacagcagaagcgcacacccggcggcgagtagaaccgcttgggtcacggtgtacagggcctgcccgatcagaggggagccgagtgcgctgccgatatgccagaacaggccgaacgtgagcgtatcaaacagcggatgctgggtgtagtagtggtgcagaccggacgattgcagatattgggcaagcgtatcgtcgcgcatcgagcccggccaggtgagtatgagccacggcagccaggcgatagcgagcgtgagcaggtaagggaggaatcgcgcgcgcagcgatgtggataacgtggtcgggcggcgggccgtgagccaactaaggatcgcggatatgctgcggtacgtctttgagtgtttcttcgattggcgcgaccggccgccatgtgctgcggttacgtcggccgctgtcccctcgttcatgactcaacagcctaggcgcgattgcgggcgcgcgccgggcgaacatcgaaaattcacccggatacggtgatttctttaccgggggttgtgtaggtgcgcgcgggtgtgtgggccctgcacaagcatgcggtccttgtgcgggtgttgcgcgggactttccagtgagtctttcactcgcagtgatcattcttcgcatccgcgtcgcgacacgcgccacgccgaagcgtgcacttatccgaaacctgtggtaacttattcgagttgcctgcggaacacagttcaactgcgcgctgcaaagcatggaggattcgcctagtggtctatggcgcacgcttggaaagcgtgttggtgtaacagcctcacgagttcgaatctcgtatcctccgccctcgccggaggccttatttttctaaggcttccggcttttttgtaccctcttgtttcccctctggttcctttagcgttccagttccccgtacttcggtgccgtcgctccccgctctgggtattctcgggcgtgtcgcggctccctgtttcccagtcgggagaaggcttttcggcacttctcatcaagtgccgccccccaccttcattgcaatagaatggaggcagttgcctgttcacctgagggagaagaaacaatggcgttgaataccacacagctggagcgctactacaacgcgccaatcggacaagtctatgaagccatgaagcgctgtctgcaatccgatcagtcccgctttaccttgaagaacgccgacgatttgtcctgctcatgcacgttctcatcgggtattagcctgaccacttggggcgagaatctgacggcctcagccgtacccagcggtgacggcactttagtcaggctcaccgtcgcaggaaagatagggtcaacggcagctggcttccagaactcacatagcatctcccttgcggacgaattcttctcgggagtgtctggagttctttctgccggtagcgcagaaccctcacaagtcacacaagagcaaccagccccagcagcagatacgcttcctcagaaaccagaggagacgcagacgcaggaagagctaacaccggaacccgctccagacgaagagggtattacagaggctaaggcagaggcggattcccagcctttcgttgcacaagaggcgagcaagtcaaaggcggaggaggtttggaataagtatcgcttgccggtagtgatagcctcatttgtagtcgcagcaatcatactggttacctcgattgcggctattgtatctcataacgttcaagttggagaacgtctcgaagtcgttcagaaagtgtctaccgcttgcaatcgagatggcaagattaaagtgctgtctgatggcgattattccgaggagcctgctttgcaaatggtttggagcagcatccctgaccgcgagattcttgaatgcatagcggctaataccggaatgagtgagaacaccgtagacaccatagggtattcatcttcctcaaaggagaacgcatcaatcctgtggacagattggaaggcggcatggacgatagatgacgacaccatgtacgccacggttacagtacagtatttgggtaccggcggaggtgctttcaagattaaatcgaccttgaaagattttgtggataaagaagaagaatcttctgataccaccgaagaggaatcggagccacagcctttcaccattggcatgaactgctacgtcacttcaggtgatggagatttgtcggcacatacggaacgcattgatggtgtcactagccaaaacttcagagacacggtatggaagaccggtaaatcagttagttgcaattctgaaggagaggattcaacagccaccggagaaaagagcacgactgattacgaagctttaaagacggcgtatggagaccatgctgacgataccgaatacggcatgggcgttctgtacagtgaatgcgcttccacttcattcattccgctaagtttgccaacaatgggtgaaggccaagcaaaagaactgctgggagcacttgtactgtgccccgatcacccgcgtgctgaagaaatcagacaaaaagctggagccgatacagcaagattggcggaaatccaaaccaaacgccaacaaggtctaataaaggatgcggggacctacaaagtccctgacgaaatgtccaccggcacttggaaaaccatgagcgacaaggtggagaactgctattgggagatgcaggacgcaaacggtcagaccattgacaacaacttcgtgtccgcaggaatagcccagaccatcaccatccctgacggggtggccggattcagttccgaaggctgcggagcttgggagaagcagtagcctcaccaatccataaccaatgaatcccgccctcttcttctggaggacgggattcttcttttcgtataccacgaccattcccgtgcattttctataaattcatcagcatggccggtcaatggctcctgtgttgtcggaatcccccgccagtacttccctttatgaaggagttcaaatggtgatgcttaaacgatccaaggaacagcagtatgtgcttgccgtcatccgaggcaaggctgtggctaccgtggacaccatcgagcgcatcaacgccaaaccaatctcctactggcagagcaatgagtctcttccggaggttgccatactgtacaactccacgattaagcacatcaagaaacgcctctcatactcggtcgagcagccgaagcctccattcggattcccctgcccggttccgttcggcggtttcgatgatgatgacgaggacgacgaggactgatcccacctagggtatttctcacgagcaatctcctttgattcgagggggattgcttttttgtcgttgttccgtactttgccccgctctgggtattgtcgggcgtgtcgcggttccctgtttcccagtcgggagaagggttttcggcgctcagcgaatcgcggtgatgcttggcacgtacacttgtgggtagtagatgagccgacgaaagggcacgggcatgcactccaatagcattagaacacacatggccgaggatggtatacccgaagaggcaagagcagtaggctcttggagcgccagagatgagcactatagggagatagtacttgcgcctctccgtgatgcaatgaagtacaagcccaagatgggaacggataaggctgtatcgctgcctgactttatcagtttgtactcgtcagaccccttgtatcactggatgggacttgacaacgagttaatgtacctcgccgcgaaagcaggcggcggtcagacctctatctataggcaccttggtgacggcatggagcgtctggtacggcaaatctttatagatgagtaccaacttacggagggagaagcgaactggggttatgtcatcactgaggacaatggcactcagacgcacaggacactggatggccgtcttgacctaagcatgattaggtctactgaaaaagcagagatcttggctgactggttgaactccgtgaaagaggctcagggcactcagtttgatctgcaaggggcggtatttgagattcggcaaggctacaagagccaagatagcaagcgcgccaaaggcgatatagttaacggctcccatgcccttaattcggcctaccagatgttcgtcatggtgatgagtatgcagatacctaatgcggtgcgtagccgctatgaacgctcgaatatctgcgtgatgacgggcaatttacaagacgatggccccctaaccagcacctatgctttcttcaggcaagtagtcggctacgacctagcggggttcttcgagaggaactcgcaggtgttccgcgatcagacccacgccattcttacatctattctggaggccaagtgaaccgaactgccttacgacagcgatctgattacacctacaaggcaaacattaaggcgggtcgtcatggatggctccgtcttactcccgcatacggcatcaaccttgtttatggagaactctccaagctgtccgaaggaagccgggttatagagcctttttcgggtagtggtacaactccgttggctgcgtccgaactggggttgtcctgcaatgcacgggagattaacccgttccttgtttggttgggcaatgcaaaactgaattcctatagcaaggaagacggtgaagccagtatagaagaagcgcattcggtcatagccgaggcttctaaattcgaggggctggatggcttatgggttcctcccatgcacaacatcactaggtggtgggatcaggcctcattggaggctctggccgctctccggcacgagatagacgagcgaaacggcaaggtgaggacccttcttgatatagctttctgccgcctgctcataggtcttagcgcagccgctttcaatcaccagagcatgtcgtttaaagaccaagaatccctctttgggtattcacgagaggattttcttcataacgtcagaagctatgcgaccgaagtgaaggatgtcgtggcgaaagctatgaacgacacccctgtggggaaagcttccgtggagcatggtgattccacgttaccgtttacaggatatgaaccggctgatctagtcatcacgtctccaccgtatgcgaatcgcatgtcgtatatccgtgaacttcgtccctatatgtattggatgcgctatcttacttccggggaacaggccggggagatggactggaagacaataggcggcacatggggttcggtcggcactaagttgcgcgcccgcgtctctccgcatgaatcacctatcgacaccacacttagtgaagtatgcgaaaagatacttcaagggaagagcggagagattctatccccgtatgtatataagtattttgacgatatgtggtcacacttcaaagccattacgccagtggttaaagagggtggaaacctatgctatatcgtaggcaattccacattctccggtatcgaggtgccatcgcatacatggtatgcagagatgatgaaagcactcggctaccataatgttaaggccaccgcaatacgtaagcgtaacagcaacaagcagctctatgaatatgcagtgacggcaaccaaatagagccttcgccagtttgtgtggtgaggggagttgggttcggcgtcgtcgccggggtttctgtatcggatgtggaaagggcattcgtctgttagatttgtttccgccaagaaagaaaaccgaacaacagaggaacgcctgtgcccaccatatcagccgatgcgctcaagcgcatgctcaacctgcccgccaacgtcgtggccgttccggtccgcccttacgcgggcgacatggatcggtgcgccagatgtggggagcgtggccggccgtacgaccgtctgggcgtgcgccgctggcggcacctcgacatcggctgcacgaggctcctgctggagcacgcgccccggagggtcgattgcgcggagcacggggtgacggtcgcgatggggccgtgggccaaacgcaagagcgcgtacacgcgtgacttcgagcggcagacggcatggttgagcgtgcacgcgcccaggagcgcggtatcggcgctgatgcgcgtcgaccggaagagcgtgggcccgatctgcgaacgggtcgccgacgaactgcgcgtcgaacagggcgcgggcctgttcgacgggctgcgttccatcggcgtggacgagaccggctacaggaagggccacacgtacatgaccgtggtcgtcgaccacgaccgggggcgtgtcatctggatgtaccaggggcgcggacagaaggtgttcgacctgttcttccaggcattgacgccggcccggcgcgagtccatccgggtggccgccggcgacggggcgcggtggatcgacgagtacgtgttccgctggtgccccatggccgaacgcatcctagacggcttccacatcgtctcctgggccaccgacgcgctcgacaaggtccgcaccaccgcatggcgcgaggccaggaagacgggcacggccgggaagggcgcgaaggacccggtcaagggcgcgcgccgggcgctgccgaagaacgggtcggacctgaccgccacccaacgggcacaactggaatgcgtggcgaacaccaacgagaccctctgggaggcatgcaagctcaaggaacgcctgcgcatgatcctcaggcagacggcggacgaggccgcgcccatgccgcgccagtgggccgcggacgcttccctgtcgggcatcgaggagttctcgaaactcggcgagaagatcgaccgacgccgcttcgacatcctgcgcaccatccggtccggactgtccaacgcccgactagaggccgtgaacaacaggatcaagaccaccatcaagatcggctacggctaccggaacctcggcaaccgcatcgccctggtcatgctcaaatgcggcggactcaacctccgactccccggacgccaatagacagtaagcaagacagatgattcacatccacacaaacacccgaagagcctcaaaaatgcgtaatcaccagtgcaccactggtatgccgatgcatctgattggccaaagcgtcgatagttcaccgtcaccgtacgggagtagggagtagagtggcggcgtcgaccgacgcatgttctcgccataatttcaatcccgaaaaggagcctcgtcgcaaccatgacatcacatcttgccgaagcaggacgcacgttggttccccgcaaggaa

SEQ ID NO: 2105 - DNA, 17410 bp, Unknown
  R51_24m  MAG No. k141_2639
ccggcacgggcataccgttcgcgactggcgatgaattcgggggtgggggcgatgaggtcgcggttgcgcccggacaccgaaaccggcggcagttggaagaagtcgccggacagcacgacctggatgcctccgaacgggcgtgggtcgcgacgcacttcgcggcagacttggtcgaccatgtcgaacagccatgcgtgcagcatggagacctcatcgatgacgaggatgtccgtagcctgaatcttgcgtttgcgccgggatttgatgagtttgagcagactcgggctcagggcggtggccacgccgacgccgctccacgaatggatggtttggccgttgatatgcgtggaggcgatgcctgtggacgcggtgactgccacgctggcgccgtcggcccgagcctggcggatgaactcgttcaagacataggtcttaccggcaccgggcgcaccggtcagaaacacgttcgcgccggcgttcagaatggctagggcttcggtttggcgcatatcaacctctctagactcccctcagggaggggagccaagtacggcagactacttattgagaatgctggtggccacgatgtcggcggcgatggccttggaggcggcatcatccgggccggggacgggggccatgaaggccttacggtagtagcgcaactcgtccaaggactcgatgatgtcggcgagggcacggtggccgccgttcttcggcggacggttctcgtagacggccgggtaccagcggcgggcgagctccttcaaggtgctcacgtccacgctgcggtaatgcaggtggctcatgaggcccggcatgtagtggtcgaggaacttcttgtcggagccgatggtgttgccggccagcagcgggcgcacgccttccggcgtgaagcgcagcacgtattcggtgaccttctgctcggcctcggccaggctcaggccattctcccactcgttgatcaggccggaacgggtgtgcatctggcgcacgaaatcgttcatgtggttcacagccttctcggacggcttgatgacgtaatccacgccctcgtccagcacattcaggtcaaagtcggtgggaaccacagacacctcgacgagttcgtcgccgccgaagatgtcaagtccggtcatctcgcaatcgatccaaatcaggcgcgagtccttcgcgctgtacgtttccgcgtcatggctgtcgaccatggtgtgcctcttttcttcgctggtcatcgcttatgcagaacagttcagactataccccagcgcatacaagctatctcgagccacatacgcgaaaagggcctgcataagcagacccttttcacaaggaatcaacccctaactagcgcaagctagcgggcatcaaccgatcagttgttgtggaagccggagtagttcggtgcttccgcggtcatcacgatgtcgtgcgggtgcgattcacgcaggccggcgtcggtgatgcggatgaacttgccacgttccggcatttcggcgatgttgtgtgcgccaatgtagaacatggactggtgcaggccgccgagcatctggtagagcacagcgttgagcgggccgcggtacggcacttcgccttccacaccttccggcacgaccttgtcgctggaggtcacgtcggcctggaagtagcggtccttggagtaggacttcttgccgcgcggagccatggcgccaagggatcccatgccgcggtacagcttgtactgcttgccgtgcaggagcaccttctcgcccggggcttcctcacagccagcgagcgtgccgccgagcatcacggaggaggcgccagccacaagggccttggcgatgtcaccggagtagtggatgccaccgtcggcgatgcagggcacgccagcggcacggcaggcctgggcggcctcgtacacggcggtgagctgcggaacgccaacaccggcaacgatacgggtggtgcagatggagccaggaccaataccgaccttgacggcatcggcaccggcctcgatcatggcctgggcaccggaacgggtgccgacgttgccgccgatgatctgcacgccatcgaaggcggaatcgtgcttcaggcgggagatcatgtcgagtgccaggcgggcctcaccgttggcggtgtcgaccacgagcacatccacgccggcctccatcagggcggaggcacgctgccatgcgtcgccgaggaagccgacgccggcggccacgcgcaggcgaccctgctcgtccttggtggcgtccgggtactgttcggtcttgacgaagtccttgaccgtgatcagaccagtcagatgaccttccgcatcaaccagcggcagcttctcaaccttgtgctgggcgagcaggcggtgggcgtcgtccttggagatgttggacggaccggtgaccaggttctccttggtcatgacatccttgaccttcagggtgtcgtaatcctcggaggcgatgaaacgcatatcacggttggtgatgatgccgacgagcttgttgtccttgtccaccaccggcagaccggagatgtggaacttgccgcacagcttgtcgagatcagccaaagtgacctcagggttgacggtcagcggatcggtaatcataccggactcagagcgcttgaccacatcgacctgagcagcctgatcgtcgatggacaggttgcggtgcagcacgccgataccaccgttacgagccatggcgatggccatctcggactcggtcacggtatccatggcggcggagagcaccggggccttcatcgtgatattgcgggtcagatgggtgctggtgtccacttcggaaggaatgacatccgtctcgttcggcaacagcaacacatcatcataggcaaggccgagcttggcgaaaatcgggggaaggggggcatacgccgactgggcgtttaattcatcaaggtttgtagccatgtaaacactatatgaaaatgcgctgaccttcacgacacacgtgtgagaaccgtccaatcacatatggctcaacgcgtgcggactgctatcaggaagggttttcctgtccgctcgaatcagcgccggcaaccggcagcgattcgcttccggaacgcgtattttctggggttacgtcgtcatgcactgccgtggcatgctgtgcgttgtggcgcgccgcttccaacgtagcgttctcttcctgtatctccggaatacgatgcttcagatacgggtacatggtggcgatggtcagtacgaccacggcaatcgccataccaaaggcaacgtgctgcgccttgaagaaaagaatggtcaacgacccaaacgcgatcaacgccgcccaaccccaaagaatcagcacggctccacgaaccgaatggccgatgcgcagcatgcgatgatgcagatgcatacggtccggatgcatcggcgactgccccttggccagacgccgcacaatcgccaggcacatgtcgagcaccggcaggaacagcaccagaatcggcaacagaatcggcatgaataccggcagatagatactggcgtgaatcgatgccggatcaagacggccggtcatgacgattgaggcgcaggtgatgagatagccgagcagcatcgagccggaatcacccatgaacaatttcgccggatgccagttatgcaggataaagcccacacagatgcccaccatcatcacgtcgatcagcgtggccagcgaggcgtaactgggcgagtatcgggcgatgatgtacgaatagatggcgaacgcgatgccgccgatggccacgatgcccgaagccagtccgtcaagaccgtccacgaaattgaccgcgttgatcgaagcgacaataaggaatgccgtaattgccatggacaggctcggggatgcggtgatcagagagcctcccagcggcagcgaaataatctgcaaaccaccccaggccacgaaaacggaaatcagcagctgaccggcgagcttcaacatccagtcaagatcccacaaatcatcggccatgcccagcagactgatcataatgccgccggcaagaatcacccacatctggtaattgccttggaacagacccgcaaggaacggcgttctgctggcaaagatggtggccacggtaattccaatcagcatgccaaggccgcccatacgcggggtgggaatggtatgcacatcgcgggcgcgcacttcgccaaccgcgccgatctcgatggccacgtggcgaatcagcggagtcaccagccaggtgacgccacccgcgatggccgcgaccagtaagtaaatcctcatgcgcctaatcccccgccattgaggtggagggctttgcgaatcatggattggggaatgactccctcacgaagaatctcaatgccgtctctcgcatacggatccgctttcaccacggtgctagatatatgaccttgtgtgggcccgccatccagatacaaatcaatctggtttccgaacgcttccacggcctcgtccacggtctgcgcgctttcatcgccggagcgattggcgcttgaagcggccagaggaccagtagcacgaagaatctcaaggcagagcgccgagttggggatgcgaatgccttgcgtgccgggcctgccttccgcggtgtcggccaacgtctccaacgtgcaatcggggcgcgcgacggcaatcggcgaaaacgcccccggcaggaaggcggcagaaagacggttcagcggcgaaggtagttcgagtccgagctcgtcaagttggtcagtggaatcaagcagaacctgcaatgccttgtatcggggacgccgcttgagttcgtagatgcgggcgatggcagccgcattgcgcggatcacaggctacgccatacacggtatcggtgggaatgacgatcagtccgccatcatgaatgatgcgtgcggcctgagccaacgactcatccgtgaccttccgcgttgcgctcataccgtctccgttcacctgattcatcacaatctatcattgcaccattgtgccccgacttgcacaacgacgatgaccgggtttcgttccgaacggcatgcaccgtcccgggcgaaacccggtcaccatcaattcgaaattaacctgtgccagactatgcgtcacgcgccgaggtatgccttgcgcaccttctcgtcgtgcagcagatccgaggccttgcctttcatcgtgatcttgccggtttcgagcacataggcgcgatcggcaatggatagggccatcttcgcgttctgttcgaccagcagcacggtgatgccgctcttgcgcagagtgacgatgatgtcgaaaatctccttgaccagcagaggcgaaagacccatcgacggctcatccatcagaatcgtcttcggatggctcatcagggcgcggcccatggccaccatctgctgctcaccgccggagagcgtgccggccagctggcggcgacgttccttcagacgcgggaagtagtcgaacaccatctcaagatccttgccgagattcgactggtccttgaggctgaacgcacccatctccaggttctcctgcacactcatgcgggtgaacacatggcggccttccggcacgtgggccatgcccagggtgacgatcttgttcgcatgcgtcttaagcaggtcatgaccgtcataggtgatgctgccggacttggccggcaccagaccggtgatggtgtgcaaggtggtcgttttaccggcaccgttggctccgatcagggagacgatctcaccgtcgtccaccttcagactgatgcctttgaccgcgtcgatggcgccgtacgagacacacagatccttgatttccagcatcagcgtgccccctcttcttgaatcgtcttggcgacgcttggctccggctcgaccttggcggtcgagtcgccgtccgcatcatcattgctgtcactacccagataggccgagatgacctgcgggttgttggcgatctgctccggcgtaccggatgcgatggtacgaccgtaatcaagcacctgaatgcgctggcaaacgctcatcaccaagctcatgtcatgttcgatgagcaggatggcgatgccgaaacgatcacggatcgtattgatgcagtgcagcagatcctcggtttccgtggggttcatgcctgcggccggctcgtcgagcaacagcagcttcatgccggtggccaaagcgcgcgcgatctccagcttgcgctgctggccgtatggcaggttggccgcttgcgtggccgccaagccttcgaggttgaaaatgcgcagcaggtcgatggccttctcatgcatctcatgctcctgcttccagaagcccggggtgcggaagatggcgccgcccatatggtaggagaacgattcgtcaaaggcgacgagcacattctcctcaacggtgagctgtttgaacaggcggatgttctggaaggttctggcgatgccggcacgaaccacctgataggtcttcttgccgttcatgtgttcgccatccagccagaaatcgccctcggtgggcttgtacacgccggtcagcaggttgaacaccgtggtcttgccggcaccgttggggccgatcagaccgacgagttcgcctttgttgatggtcatgttgaagtcggatacggccttcagaccaccgaaggtgatgccgagatgttcggctttgaggatgggctgggtatcgttgctcatcgtgcagcctccttctcggttgtatcggccggttcgttgacggctttatcggacttatcagcagccctgtcgttcttgccgtttccgcgaagcagcagccggttgatgagcttgggcagcgagaactcccatgaaccaaagatgccctgcgggcggaagatcatgacaagcaccagcaccaccgagtaggcgagcatacggtagtcagcgaaggcacgcagcagctcgggcaggatggtcaggccgatggcggagacgatcgagccggtgagcgaacccatgccgccgaacaccaccatgatcacgtagttgatggagttgagccagccggccatggtggggttcaacgaaccgatgtactgggcgaagatgccacctgcaatgcctgcaaagaatgcggaaatcgcgaagacaagcaccttgaggtacgtggtgttgagtccggaagcgcccgcagcgatctcgtcgtcgcgaatggccttgacggcgcgtccgtaacgggaacggccgaacatgaagagcacgaccacggtgaccaccatgatccagaacacgacgtacaggttggcggtgcgttcgatgccgatcagggcctgtcccgcggcacccttgtcaaggcccatgccgccggcaaccttgaggttttggatgatcacacgaatgatctcaccgaagcccagcgtgatgatggccaagtaatcgccatgcagtcgcagtgccgggataccaatcaggatgccgaacacacacgccacaatgccgccgatcagcgtggtaatcaggaaccttgcggtggggtcaacgccgatgccggccgcaaccatgtacttggatgccagtgcggctacataggcgccgatggcctcaaagccgcagcaacccagcgtcagttggccaagcacaccgatggtgaggttcagggacgtggtcatgatgatggcgatgcatgcggtcatcatgatgcccttgatataggaatcggccagaccggattcgcacagagccatcacgatgccgaacgtggcaaggatgcctaggaagcacaccacataggattgtgtggtggaaagcattgtcttcttcatacgatcagaccttctccccttcgttcttgcccataatgccggacggcttgacgagcagcacgatgatcaggatggcgaacacgatggcatcggagaatgccgaggtgatgaggcctccggtgacagtgccgatatatgccttggtcagactctcgatcaggccgatggcaagaccaccgatcatggcgcccgggatggagccgatgccaccaaggactgcggcgacgaatgccttcaagcccaacatggcacccatcataggcgacacctgcgggtaggcggcgcagtacatcagcgaggcgactgcagccagaccggaaccgatggcgaaggtcagggcgatggtggagttgacgttgacgcccatgagcacggcggcctccttgtcctcggagacggcgcgcatggccttgccctgcttggtgaacttgacgaacagctgcaggcccaccatgatgaccaggccgatgacgatggtcagcagtgtgtctccggaaagcttgagcttgccgaaggcaatggacggcaggtggaaaatggtcgggactgtctggaagtcggcaccgaagatggcctgagagccgttctccagcagcagggacatggcgatggcggtgatcagggcggtcatggaattgcccttctcgcgcaccggcttgtatgcggctttttcgacgatgacgccgacggccacgcacaccaggatggcgggaatgaccgccacccaggcgggcaggcccatggcgacgatggcgggaatggtgagcatcagcacatatgcgccgaccatgatgaaatcgccgtgggcgaagttgatcaggcggatgatgccgtagaccatggtgtagcccaatgccacaagcgcatacacgctaccgattttcaggccattgaatagctggctgacaaacatgatgatctgatccatcactgctccccctttctaaatctcattgtgtgttgaatgcgtttattgaatgtctgatgatgcgccatgaaaacgcgaaagggagagggccgggaaaccggccactctcctatatcgcgcgctcatactagagcgcatggattggaatcatgcagcggtgattcacttgggctgcacggtggtgttgtagacaggcttgccgtccttcatctcaagcacgatgacggacttggtcggggagccggacttgtccatcgtgaacttaccggtcacaccgtcgaaggtcatgccggccacggcgttgcgcacatcctcacgggtggcgttcttgccggccttttcgatggcctgcttgatcatgtagatcgtgtcgtagcccagagcggcgaaagtgttcggctcggcgttgttcttggacttgtaggacttgatgaagtcctgcaccttggagttggtgttgtcgtcggcggagtagtgggtggtgtagtaggtcttgttgtactgggccttgtcaccggtgagcttgaggccgtcgtagccgtcagggcccatcacgtagccatcgaagcccacggaacgagcttgcgggatgatgtacggaccagccacggagtagtagtacggagcgtaaagcagctcagcaccggaggcctggatcttctgcagctgagcggagtactcggtgtcgtcggcggaggaggagctttccttgtccaccacttcaagaccaagcttctcggcggccttggcgaaagcctcacccacgccggaggagtacggatcaccggtaccgtagagcacggcgaccttcttgaccttcaggttctcggccgcgaagcgggcggcgacctcaccctggtaggagtccttgaagcaggtgcggaacaggtagttgccggtttcgatggaatcggaggtggcggccggggcgatggtgaccagcttggactggtcggccagcggagccacggctgcggtggtggcggagatggtcggaccggccacggcgagcacgttgttgtcgccaacaagcttgttgtaggcgttggacgcctcggtggcgtcgcccttgtcatccatggactcgagcttgaccttcttgccgttgatgccgcccttggcgttgatctcggaaacggccagctcgaagcccttgacctcggcctcgccgtaagcggcagcagtaccggagttggtggtcacggtgccgatggtgatggtatcaccggatgccttggcgctggagctggaggagtcatccatgctgccgccggagcatccagcaagggacaacgccataactgcggccgcgctggccgcaatgaacttagtggagaacttcacgttcatcctcttccttcttccttgggatattgcaacatcgttcatcagtcaatcaacgcgcgggatatgcgcgtgagacgttccgttcgcataattcacataccacagaactgcatcacacggcttgtggccgtcatctacgtctctctcattcgatgtttgtcgcggactgttataaccagacccgctttgaagccgcaataaattgttcttattatgagacagcgcaattacgggaacgagaatgcaagcccaaggaaatgtgggattcgtgaggcttaggaaaccgcaaacaggtagcggtcgcgacccgtccagtcctggccggtcgatgcggcagcgaatccggtggccctggcaaaggccacgagacgatccccctgggtcacgtcatgttccatgacaagcgcgcccccaggcttgagaagacggcaggcccgctcgataatgcgctcgggaatcaacgtaccgtccatcgagccgccatacaaagccaattccggatcccaatcacgcacttccggctgctcgggaatatcggtctgcggcacgtaggggggattggtgatgacgatatcgacggtgccgttcaattgggccaatgtggcgaaggacgtggcatccgcgatttccagatggtaattcgaggcaatggatgggtactttttcgcggtttccgacagattccttcgcgtccattcggcggtgttcggcgacagctccaccgcccacacctggctgccgggcacctcgctgacaacggacagcccaatcgcgccggagccggcgcacagatcgaccacacgaggatggatcatgccgtttcttgtcagccagtcaagaccggcctgcaccacggtttcagtttccggacgcggaatgaacacgccagggccgaccttcaggtcgagatagcggaacggcgcatgaccggtgatgtattgcaacggctcgcgcttggcacggcgggcaagcatggattggaagcgggcaagctgttcggctgtgccaagctcctcccccatcaacagagctttgtcgacatcgcgcaactcaacacctgccgcctcggcaaggagcagtttggcatcatgctcaggcgtctcaatgccagcctcacgcaattgcacggcggcatcacgaatcacatcggcagcagccatcacatccctatcttccggtgccttaattatcacataatgtaagggtttggccggtaaatgcgatgctcgaccgtaggcttgaccgaacggcctagagtgtgtcgaacattgtatctaccggccaaacccgctcacgctactatcacttctgattggccagacggtcggcttcgtcggcttggatgtcggagtcgattacggcctgcaggtcgccgtcaagcacggcatccaggttgtatgccttgtaattcgtacgatgatcgacgatgcggttctccgggaagttgtaggtacggatacgctcggagcgatccaacgagcgtacctgcgagtggcgcatatcagccgcctcagcggcctcctgctcgtgcttcatggccagtagtcgggacttcagcacgcgcagggcggaggcacggttctgaatctgcgacttctcgtcctgcatgttcaccgtgatgccggtaggcaggtgggtcatgcgcacggcggaatacgtggtgttcacggactgtccgccaggaccggagctcatgaagatatcaatcttcaggtctttcggatcaatctcaatttcgtcatcatcctcgtcggcttcggggaaaacaatcacaccggccgcagaagtctggatgcgcccctgcgattcggtgacaggaatgcgctgcacgcggtgcacgccgccctcgtatttcatcgaagaccacacgccgtcctcgggagcaggcgtgcccttggcccggatggcaatctgcacgtccttgacgccgccgagctcggtggtgttctcggactgaatgttcacgctccagccgcgcttctcggcgtagcgggtgtacatacgcagcaaatcaccggcaaacagtgcagcttcctcgccgccggtgccggccttgatttccataatggtgtctcgcgcatcatccggatcgcgcggaataagcgcggtgcgcagcttttcttccgcgcccggcagttcggattcgagacgcttagcttcctcggcgaagtcggcatcctcgccggccatctcctgagcggcttccaagtcatccttcaattgcaaccaagctttgtaggctcccacaatggcacctagctcggcatgacgacggcctagtttgcgcagcttgtccggattggacacgacttcggggctcgccatctgctcttcgatggactggtactcctcaagtgcggtcgccgccgcggggaactgttcgtctgccatgacacgctttctggttgtgttgtaatcaggtcaaaagaatacaaaaacgccagtcctcgggcgggcatgccgaagcatgccgggccgaataggactggcgtgaagtatgctacttgctcttcttgccgtagcgcttctcgaagcgagcaacgcggccaccggtgtcgagaatcttctgcttgccggtgtagaacgggtggcactgagagcacacgtcaacgaacatgtgatcttccttgccggcagtgcgggtcacgaaggtgttgccgcacgagcacgtcacctcaacggggtggtaatcaggatggataccctgctgcattttgcgtctcctatggattcgggggacccgggtcgtcatgcccctatggcagacgtgaaccggaaccttacggattatacgcgcctatatggacggggaatacgttgtgctgtcggaaaagagtggggccgcaggggcttgaaccctggaccgggcgattatgagtcgcatgctctaaccgactgagctacggccccacgatgacctaccgcgattgcagagtagtcaactcgccaaagtgtagcacgaccccggtcgcaggaacggataacaaacgaccactcccgtatgatgttgtacgcgccgcccaccctgatgcgcgagttcaacgtgcccagcagcaccgtgcaatggctgaccaccggattcatgctcaccaacggcatcatgattccggtcaccgcattcctcaccgagaccttcaccacacgccagctgtttctttacggcgatgggcatgttcttcgccggctcactcgcctgcgccctggcccccagtttcgcgctactgctcgcaggccgcatcatccaggcctgcggcgccggcgtgctcatgaccctgctgcagaccgtgctgttccgcgtctatccgcccgagcgccgcggacaggtgatgagcatgttcggcatggtcatcgcctttgctccggcactgggccccaccatctccggtctgctggtcgaatggctgagctggcgttggatgttcgcgctgctggtggcaatcgccggcggcgtaatcgcggccgcctgcttcacggtgcacaacgtgggcgagccgacccacccgcatatcgacgtgctgtccgtggtactttcgaccttcggtttcggcggtgtgctcttcggcttctccactgccggcggaaacggctggggcagcatggacgtgctggtatctctagccattggcgtaatcgccctgacactgttcatctggcgccagatgcggctggaacagccaatgcttgacttccgcattttccgcatggtggccatcgtgcgcatcatctgtctggtggcatccttcttcatccgagaccgcggtcttcatcccggtcagaagcgctgaaaacatgctccagggccgccagcacacaccgacggcccaagccccccccccaaaaaaaaaacagagactacaactcaggacggcagcctcgcgaaagccccatcaatcgcgcgcctgctcaatcagctgattcagtatgccggccttccgggcggcaaccgtctcctcccaatccagtccggtatccttggcccgtccgtagaagaatctgaccaaaccgggaaagtcgggccggtatccgctttggcggaaacttcgcgctatggcctcgcccgtcttgaggtcatctggccggtgagcctcatagataggaatcgcgcaaccctgccacttgcctcgcacacgggcaatgcggttgacgattaggccgccacgtgcgccgtcatattctgcagcttgcgggcttgctaaatcataaacaccaccattaatgaggtcctcgaccgtcattatccccttcaccgcactggcatccttgagccaaaacatcgaggcgaaattggtgtcatcaatatcccggaaatcctgcagcttccgttcccccacctgcgggtcgacggcgtacatgtattccgccatagcccggaacggtgagatgccgttatctttgttatgcaccagctcgacgcgcatatccgagccttcatctccggtcagaccgatgtcgctgatcgagcaatcaaaggaaaaccaatcccaaaactgccactcgatcatccggagcagaccctcgggatgtggcttgaatgggttcaaactgacttcacggtaaaactcacgccgcgcctcggcatacacggcaagattgcattgcttgaacatatcaacgacatccttggtatccaggattgccggtgctccggaatcttcaacggcggcagtggcttcggtcatggtcgatccttccggtcaagtgtggacggcaggccgcatcgcccgccgtgagacacactgtacggaagcctccgccccgccgcaacccgttgaaacaaacttgtggatatgtggaaatccaatgattccaagggatgccgattgtgcataaccatgccatcgataggtggataaccgccggttcgacgcacctcatgcacgaggttatccaccatccacaggctctacggcgtgtcatccacagtcgacgatcgaggcgtatccgacccttgccaaacacgctgacgcttcgaacgacgcctgccaatacgacaagtggtctgccgccatgatgaggacgaccggccaccggttgcgacaaattcgtcagccggattcagtcagacagctagatgataatgccgttgcagtggtcgacctcatgttggatgatctgcgcggtccatccagtgaacgtggcgtgacgcgctcggaaacgacggtcttcgtaattgacctcgatacgacggtaacgcagcgtgcgtcgttcgccggccaaagacaggcatccttcctgggtgttgaaggcaccatccgaagcggtgattacgggattgagcatcactgtgacgcgaccgccaaggtcctcgtccacgaaggctatgatgcgcttgcccacgccgatcatattggcggccattcccacgcagcgcgaacggttggcctccaacgtgtccacgaggtcctgcatggctgcctcgtcgctaggctcggctggttcggacggcgtgcgcaggaacgagcgcgatgtcataatggggcgttgcatcaggcctcttcgtgccagtggggattctggccgaaggtgtagccttcgggattatccatcgcggcgatgtcggccatgtcctgctcatccagctcaaaggcggtcagatcgaggttctggcgctgacgctccgggttcagggacttcgggatggccacatcgccatactgaagatgccaacgcagaatggtctgcaccacagaaataccgtgcttggcggcgatacgcttcaagtccggatcgcgcagcatctggttggcacggcccagcgggctccacgcctcagtgatgatgccatgcgcgttgtcgtaggccagctgttcgtgctgctggaagtacggatgcagctcgacctggttgacggcaggggtcacgcccgtatcgcgaataagcaaatcaatgtgaccgggcaggaagttgctaacgccgatatgcttgaccagcccacgttcacgggcttcgaccagcgcctcccatgcctcgacgaactgaccttggctcgggttcggccagtgaatcaggtagaggtcgatgtagtcgagtcccatgcggcacacgctctcctcgatggtgagcagcgcctcgtcatgggcgtggtggcgggcaggcagcttggaagtgacgatgatgtcttcacgcggcacaccggattcgcggatagcgcggcccaccacgccttcgttctcatagttgaaggcggaatcgatgagtcggtagccctgatgaatggcagacttgatggcgtccacaccggtcaggccgttgaccttataggtgccgaatccggtggcgggcagctcaaggccgtcgttggccttgcgaatcggagtgactggtggctcaagcatgatagtcctcctgcttctcctgtgatggaatatcgattccatcataaagccaaccgatacgcggcaggcgaactatttgatttcccgcaattccggcggacggcgagtggagaagcggaacatgagtgcggcgagaatcacgccaagcaccgccatgccggtgaacaccatcatgctttgcgggaaagcggtgaaataggagtcggcggcatccgccccattgttcacggcggcggccgaaaatccagaaatcagcgcgctggccacagcagtgtcgttggctgcgttgctgactgtgttgttggtcgcgttgttgctggcgttgctgactgtgttgctgcatcgttcataagatttgccctcccctccattcgttcgttttcggtgttgccgatgggctggccgccggttgtaccgattgttttccgattgttaccggttgttggcgtcctgctgcatgagtcgcaaggcttcggtcaaggtgcgtaccgtggtttcgcactggtccgaggtcaatccacccagcagttggctcaaatgcgcgtgatattcctccacatagatgtggcggatatctaagccgcgttcggcgagcgtaagcgtcaccgcgcggcggtcggtggcatcggcgtgtttgacgacgagcccgaggtcggccatttcgccgacgagcttggtgatgctcggcgtggtgacgccgaggaatgcgctgacatcgcccacgcgcgcggtgccggtatcttgcccgttcggttcgttgatatgccagacggcgtcgatcacgtggacatagcgcggcttcatgcctttcggcaatgccggcatcagttcggtgatggttttggctttccagcaggcgtctataagactgcgtacgtcatccaccgacagctgccgggcttggacttggtcgcggacttggtttcggtctgggattcgctcatcgctgacccaacctccatttagttaccaatagtcattacctttagcaagggtatgcgacctctaggcaaacccgacgacccattcgctcacgttgggtttcgccattttcgggagaaaaac

SEQ ID NO: 2106 - DNA, 9230 bp, Unknown
  R51_24m  MAG No. k141_2794
cggcgccaagctgccacacgctggcagaccaacaccgctgtgtgcattctctgcgtcggcggcagtccaaaacttggcccagcaacgacgcttgctgtgcccagcgtcggcagagggccaagaattggacgcaaacgacacagaacacaccctcagcatcggcagaactccaagatctgtaccgctgacgacggtaagccctccacagcgtcgtcagagatacaaaatctgtcccaacaccgacgcctgccacccccagcgtcgccggagtcccaagtctcggcccagcaacgacgcctacggaccccacacataagaaaccgcacctccgatcatcgaatctgaattacttcagtccaacaaccggggtgcggttcactgaggggagttctgccagtatagctatatcagtcgtcgccgagcgtgacgtgcacgccgccgaccagcgagctggccacgttgtagatcagtgccgcaatggtggccagcagggtgaagatcaccacttcaacaatcgagaagatggtgacgccggagaccacggtggtaagggacaacacgttcttgagatcgaaaccgcctgcatcaagaccggtggaagacacaatctgcgtaatctggctgaatacaccgaccacatcaagcagcacccatacgatcgcggaggcaacgacctgaataatcgccacggcgatggacagcatgaacgtcaccttggccacagaccaagcatccacgcgggtcagcgacaagctcatgcggcgagccctgggggcgctacggcgaggtgccggacgcacgggagtggcggcacctgaagaaggcaacgtggattcttccggatcgctggacacggagcgtgccacgcggggggcgtgctcagtaccgatcagcggctcgacatgatcgttctgcgtattgccgactgccggcggtatgatccggggctcgttgtcttcgagattctcgctcatcgtttctccttaacaggcttggcggtagcctctgctgtatgcgaggctaccagcttttcaggacgctgctcacgcctcgtccgcgttgttcacattctcgccggattgtgcggtctcggcggtgccgttcgccgcggcatcgccactgtcctcgggctcgtccttctcctcgttacgggcgatggagagaatcgtgtcgcccttgtcaggcttggcgaaggtaacaccctgggtgttgcgcccggtgcgcttgacctcgtccacgttggaacgaatcaccttgccggacttcatgatggccatgacctgatcgtcttcggacaccacgagcgcgccgaccagggcaccacggccctcgaccagttgcacggccttgatgcccaagccgttacggccctgcagacggtattcgctgatggcggtgcgcttggcgaagccctcgttggtcaccacgaacaggtccttgtcggagtcgccagggaccacatccatggccagcaggctgtcgtcgttacggaacttcatgccctgcacgccggcggtctggcggcccatcggacgcagctgctcgtcgtcggcctggaacttgaggctcatgccgagcttggagaccaggatgatgtcatcctcggcgttgcacagcgcggcaccgatgagctcgtcggcgttctcgccattctcgtcggccatgaggcgcacggcgatcaggccgccttggcgcggggaatcgtactcggccagcggggtcttcttgaccttgccggaacgggtggcgagcaccaggtacttggccacctcgtagttcgggatggacagcacggtctggatggtctcgtcgggcgcgaactgcagcaggttggccacgtgctggcccttggagtcgcgcgaaccctcgggcagctcgtaggccttgatgcggtagacgcggcccttgttcgtgaagaacagcagccaattgtgcgtggaggtcaggaagaagtgatccaccacgtcgtcctcgcgcagcttggtgcccttgatacccttgccgccgcggtgctgggcgcggtattcgtcggccttggtgcgcttgatgaagccggagtgggtcacggtgaccaccacgttctcttcggcgatcaggtcctcgacgttcatctcgccggagaacggcaggatcttggtgcggcggtcgtcgccgtacttggccacgatctcgtcgagctcatcgccgatgatcttgcgctggcgttccggcttggcgaggatgtcgatgtagtcggcgatcttgcgctgcaattcctcatgctcggccacgatcttgtcgcggttcatgcgggtcagcgtgcgcagctgcatggccagaatggcgtccgcctgcacctggtcgatgtccagcagccccataaggcccgtacgggcggtgtcggtgtcttcggaggcgcggatgagggcgatgacctcgtccagcatgtcgagggccttgagatagccctgcaggatgtggtcgcgctcttcggcctcgcgcttcaggtacgcggtgcggcgggcgattacgtcgagctggtggttcacccagtggcggatgaaggcgtccaggctcagcgtgcgcggcacgccgtcgaccagcgccagcatgttggcgccgaaggtctgctgcagctgggagtgcttgtacaggttgttcaggaccaccttcggcacggcgtcgcgcttcaagaccagcacgaggcgctggccggtgcggccggaggtctcgtcgcgcatgtcggcaatgccctggatcttgccgtcgcgcacggcctcacgaatggagacgacgaggcggtccgggttgacctggtagggcagttcggtgaccaccaggcacatacggccgttgatctcctcagtgttgaccacggcacgcatggtgatcaggccacggccggtgcggtaggcctgttcgatgcccttgtggccgaggatggtggcgccggtggggaagtccggtcccttgatgatgcggatcaggttttccagcagttcctcgcggctggcgtccgggtggtcgagcgcccagtggacgccgtccgccacctcgcgcatgttatgcggcgggatgttggtggccatgccgacggcgatgccggcggaaccgttgacgagcaggttcgggaagcgggccggcagcacggtcggctcctgggtcttgccgtcgtagttgggcacgaagtcgacggtgtccttgtcgatgtcgcgcaccatttccatggccagcggggccatgcggcattcggtgtaacgcatggcggcggccgggtcatcgccgggggagccgaagttgccctggccgtcgacgagcatgttgcgcatcgaccaggactgggccatacgcaccaaggtgtcgtagatggcgaaatcgccgtgcgggtggtacttacccatcacgtcgccgaccacgcgggagcacttgttgtagccgcgatcggggcggtagccgccgtcgtacatcgcgtagatcacacggcgatgcacgggcttcatgccgtcgcgcacgtccggcagggcacgctcgacgatcacggagagggcatacgccagataggactcgcgcatctcctgctgcaggtccttgcgctggatgcgttcgccggtgtccatcaggccgtagtcggtggtgtccgcctcctgcgggctcaacggctccatcgagccgtccggcgtgaactgctcgtcgccggtgttgttttcatctgccactgttgttcctttagttgtctaagtccgttgtgtacctccctctgacgagggaggttggaggattccgttacgcatcgatccaacgcacgttcttggcgttgcgctggatgaagaggcggcggggttcgacctcatcgcccatcagcatcgagaaggtctcgtcagccgcggcggcgtcctcgatgtgcacctgcttcagaatgcggtgctcggggtccatggtggtctcccacagctcctggtagctcatctcgcccaaacccttgtagcgctggatgccttcgcccttgggcagctggcgtccgttggccttgccttcggcgagcacgcggtcgcgctcggcgtcggtgtacacgaagtcgtgcgggcccttggtccacttcaggcggtacagcggcggcatggccacgtacacgtagccggcggtgatcatcgggcgcatgtagcggaagaacagcgtcaggttcagggtggcgatatgcgcaccgtccacatcggcatcggccatgatgatgaccttgtggtagcggaccttggagatgtcgaagtcctcgccatagccgccgccgaccgcggtgatcagcgattcgatggtgtcggacttcatcatgcggtccaagctggcacgttcggtgttgaggatcttgcctcgcagcggcaggatggcctgcgtgatcgggttgcggccctggatggcggaaccgcctgcggaatcgccctccacgatgaacagctcgcactcttccgggttggaggactggcagtccttgagcttgtcgggcatgccggcggattcgaagatggacttgcggcgggtgttctcgcgggctttcttggcggccagacgggcgcgggaggcctcgatggccttctggatgatgttcttggcctcgttcgggtgggcgtcgaaccagtcgccgagcttgtcggtcatcacgcgctgcacgaaggtcttggcctcggagttgccgagcttggtcttggtctggccttcgaactgcgggttggtgagcttgacggagatcacggcggtcaggccttcacgcacgtcgtcgccggagaggttctcgtccttgtccttgaggatgcccttgtcacgcgcgtaacggttgaccagcgaggtcagcgcggcgcggaagccctcctcgtgagtgccgccctcggtggtggaaatcgtgttcgcgaaggtgtgcacggcctcggagtaggcggtggtccactgcatggcgagttcggcggagatgccgagcttcaggtcttcggcctcgaagctgatgacgtcctcttccaccggcgtggccttgcgcaccttgaccaggtagtcgacatagtccttgatgccgttgaggtactggtaggtgacggtctggtgctttgcgccgggctcgtccgcggcgtcgccggccacctcgtcgccggcctggtcattctcacgctcgtcggtcaggctgatcttgaggcccttgttcaggaaggccatctgctggaaacgggaacgcagcgtctcgaagtcgtagatggtggtctcgaagatcttcgggtcggcccagaaagtcacggacgtaccggtggactcgccttcggtcatcggctcgccctgcttcaagggcgcggtggggtgctggtcgatgtacgtctgggtccagtggaagccctgacggcgcacttcgatgtccacgcgggtggagagtgcgttgaccacggagatacccacgccgtgcagaccgccggacactgcataaccgccgccgccgaacttgccgccggcgtgcagcttggtcatcacggtctccacaccggagacgccctcgccgggcacctcatcgaccgggatgcctcgaccatcgtccaccacgcggatgccgttgtccggcagaatggtgacctcgatatggctggcgtatccggccagcgcctcgtcgaccgagttatcgacgatctcatagaccaggtggtgcaaaccgcgcgggccggtggaaccgatgtacataccggggcggatacgcacggcctcgagtccttcgagcaccctcagatcggaggcctcataatgctcgggggccatggattcgtcaagttcgccttcggtcaattccgcattgttgatgcgttccgcagccgccttcagctgctcctctttgctggtttcgtctgccaacaggcttccttccgtgactacagggtcaacctccgtcatgaaggtcattcacggaggcgatatggcttacgaggcccgtaaagggctcttctggccatttgaccatactgcatgtgattttactcgtctaacccgacgagcgccatagcgaggcttctgcgaatttgtttggtatcttggctaccgccgccgagcccatttgcgcgtgtatccggcggccggtccggtcacgcgaatctcggcgatggtcaatcctttgagattgcgacggatggtatcggtaagttgggggataaggtaggtcagctgcgtggcccagaccgtggattcggcacggatggtcagtacgccgtccgtgaaatcggcgactgccgaatggctggcgatggcctgccccaccacttggtcccaatggttgcgcaattgcgcaagtttcatattcgccgcccagacgccattgccggcgatggtggtcatcacgctgcccagttcagccggatcgcgccccggtttgccgaagttttcgatggcctcttcacggcggcgtctgtagtccttcaatgtcgccccgcgacgggagagccgctcgaatatttcggccggcagtttggtctcgtccaggttgagttggcgggcgatcggcgggttcatgacgctttccgttctacggacgcgctgtccaccgcgggttttccgtcatacttacccaaactctcgttttcccgcgaatcggacaaattgcccagagttggcagtattacggaagcgggttcggccagtgtggccacgtcgatgcgatgggccgattcatagtcgggcacatcgccttcagcggccacggtaatcagcacctgatcctgttttctggcgaaatcaagaatctgcgtgcgccggctgtcgtcaagctgggcgaacacatcatcgagaatcacaatcggctgcaatcccaaccggtcacgcacgatttcaaacaatgccattttcaaggccaacgccatcgtccacatctcgccgttcgaagcgaactcgcgggcgggaataccggccaactcaaggttcatgtcatcgcgctgcggaccgataaggttcacgccgcgagccatttcaccggggtagatgcgttgaaaatgctcgctgatctgcggatgtggatcgtcgaacatcagcacttcgtcgaatgaaggcgcatatgtgagcgtcacctgctcgccggcaccggccaagtcggcgtaaatcgcggcaaatggctcggcaagcagaccgatcacatgagcgcgcatacgggtcaacgccacaccggcttcgatgaactggccggtccagatttccaaaccgctcagaaccgcatccatcggctgtccattgttggcattggcattcaattgcttcaacaatgtggcacgctgtttggcgatgcgcgtgaactgttgcaacgtctgcatgtatccgggctcgagcagagccgcagcctgattcatcatgacgcggcgtgctcccggatcgccggacaccaatcgctgatcttcgggagtgaaggaaacgctgggaatcttgccaatgatatcgcgcagatacagcgacgaccccgagttgatgcgggctcggttggcaccacgcgcatgaatcgacgcttcatacgtagtggtttgaccggcatcatcagcgacgttcgcgcggatggtggccgtggtctgcccgcgttcgatcagcggcaacgtgctggacgtgcgatgactcgatccggtggacagcacttcgacggcttccaccagattagttttgcccaagccattcttgccgaacaggatattcacgcctggtacgaaatcgaccactacttgactccatgagcggtagtggtcgagtgcgagacgggagatgtgcattagcgaatcgttggaaattcagggatctcagttgttgaagcgcatcggcacgagcaggtatcggtagtccatggactcgtcggaatcagcttcctgctggccgttgaactcgaccggcttgaccggggtcgtcatcttgatgcgcacgaatggttcggtcacggcggacagaccctccttcaggtaggacgggttgaatgccacggtgatgtcgtcgccgtccatgtcgatgtccagtgtttcgttggcctgggcctcgtcgaccgatccggcggacagcgccacttcctgaccggtgaaggtcatgcgaatcggagcattgcgttcggcgaccaaagccacacggctgatggcgtcgagcagatcctgcttgttgactacggcctgaatcgggtattcgtcggcgaacaggcggtcgaccgccgggaattcaccgtcgatgagctgggaggtggagacgcggccggcgttttcgaagccgagcagcgtcgggctatcggcatcgaaatcaaggcggatgttctggtgctcgtcaagagcacgggccacatccttgagcagggagccgcgaaccagcgtggtggtgtcgacgtccgggttctgcggagtccaagtgaaggtggcgcgggccaaacggaagcgatcggtggaggtcatgacgaccttgtcgccttggaattgcatgcgaacgccggtcagtaccgggcggttctcttcgcgggagacggcaacgcatgcctggttcactgcctgaacgaaagtcggggcatcgacttggccgagcatggccggtaccacaggcagatccgggtactcggtgtcgggcatgagctgcaaggtgaacttcgacttgccggacgtgatggtcagcgtggagccgtcggtgaccaggtacgttttctccgaacgcagcgatttggtgatatcggccagcagcttgccctgaaccagtacggaaccggcttcgtcaacgccggcttcgatgtggtggcgagcggaaatctcgtagttgaaggcggagaattgcagcgttccgtcaatggcttccagcttgacaccagcgagaatcgggttggagggacgtgcgtcgatgactcgggaggtccaggctacggcgtcggccagggctgcagtatcgatttcgactttcatgtgtgattgttcccttcgtcggattggctgagaaatattctagccgttaggtggcgaacttacgtacgatgggtgaccggctgttactgtggcgatgatgcttttcacgtaactgagtaagtaatcgtcgtaataaggccggtggatagtgtggataagtaggggtgagccctacaaatgcaacggttcataagtccctgaaaattgtggacaaattctgcatggcttgtggataagtgggcgagttttccacagccagttcgtcgaatttgagttttccacatcgaggtcgcggttatgcacgagttttccacaacaaaacagtgggtaatccacgag

SEQ ID NO: 2107 - DNA, 7053 bp, Unknown
  R51_24m  MAG No. k141_2819
aggcgctgggaatctgcgaactatccagaaccctgcgcagcacgcggctgatgacgcggtcggccgcgaacacgacggccaatacaatggccagccagatgagtttgccggcgttcacctgaaaccagcgtgcgatgtcttgtgcatattcggtcatatgccctactgtatcgaccatttctggtgaagtcgtaaacatgcgggcccacgtcgggttttggccgttgcggtggtgccgatggtgcgataccggtggcgtgccgtcggcaccaccggcaccaccgcggcaccgcggtgcagcatcgtcgtggtgatgacgtcgccgtgacgcctagtcccgatgctcgcggcaggtttggccgaggccacgggccagtcgaatcggatcgagaatctcgtccagctgctcggcgggcaggtcggtgcgttcgccggccacctcacgcacggtgcgaccggtgcgcacggcttcggcggcgatgtcggccgcatgctcatagccgatgtagtggttgagtgcggcggcgatcgacggcgaggactgggcatacgagcgtcccagaccgacgtggatctcgatgccctccacgcaattgacgcggaacgtctccatggcgcgcgtcagcaacgccatgccggtcagcagctcatgcaccatcaccgggtcgaaggcgttcagctgcaactggccctcggccacagcccagttcacagtcacgtccatgccgaagatcgtgaagcagcactggttgacgcattcggggatcaccgggttcactttggccggcatgatcgatgatccggcctggcgagccggcacgttgagatcgttgaacccgcagcgcggcccggaattgagcagtcgcaaatcgtcggcggccttcttcaggtgcacggcaaggctcttgatggcggccgacgtggccacgtacgcgcccatatccgtcatggcggccaccggatcgggcgcggcggtgaccggcaagccggtgatctgcgccagatgcttgatggcggacttgcggaatcgcagatccgcgcaaatgccggtaccgatggcggtggcaccgaggttgagctgggccagcagcggcaccacgcgatcgaatgcagccaaatcagacttcaacagcgtggcaaacgcatgaaattcctgaccataggtcattggtacggcgtcctgcagctgcgtgcggccaatcgtcacgtcattgatatgtttgtcggccagatcgtggaaggccttggcgagtttcttggtggactcggcgagcggcccgatcgcgtcgataagcgcgagtttgcaggcggcagggtaggtgtcgttcgtggactgcgactcgttgacgtcgtcgttcggatggatgtatgtgtaatcgccacgctggtggccggcgatttccagcgcacggttggcgatcacctcgttcatgttcatgttcgacgaggtgccggcaccgccctgcatcacatcgaccgggaactgatcggccagtttgccggcctcgatttccaggcaggcggcgcgaatggcctcggccttggccgggtcgatcaggcctaattcctcattggcgatggcgcaggcgcgcttgaccgtggcgtaggcgcgaatcagctcgggatgttggctatcggtgatgccggagaccgggaagttgccgatagcacgctgggtgtgaatgccccagtagacgttcgccggcacctccatctggccgatgcagtcatgttccagacgggttttgttcgatgtttcgctcatgcttccatcttcctgtgtgagggctggaaacgccagcatgagaggctgattgcgccttgtgagaaacctcacgcagggttcattcgacggaaacaatccagactcactggttttcggtcaagcggtgtacccggggaatcctgcggggccgttcgacggtgagatgggggatggcgcggcatgcgtggcggcggccggcatgccgggggcggccgaatcctgcgcattgtgcacgaagatgcgattccagtaattaagcatgtccttttggctcatggccaggtatatgcccatggccagcacagccacatcttctttaagcaggtctttgatttcgatggcgtcgctcaattcgggccaacgttgcagcacggcgagcatgccgcccacggtgaactcgaccatgagatcggttttcaggtcaaggttcttggggtcgcgttgcaatgtgctgagcatttgcagacggcagaagtcgcgcagcgattcggtcagttcaagcgtgctgtgcgggcctgccaacagggccaggcggtcgaggcgttgccgttgctccgggtcggagagcgtggcggtgacgcggtctcgccattgttcctcgggattgccatttgggtcgggggtgcggttgatcggaatcgattcgacctgatgcaggatggctgaatcggccaattcgggcaggctggagaagtgataatagaacgaattacggttcacgccagcctcacgcaccacatcggtgacggtgatcttgcggtagtcgcggtcggcgagcaattcccagaaagcgttctctaggcgttctttggcgggcagcacctcggaatcatggcgtggacgtggcatctcttcctcctgatgcaccagcgtgatatggtcacgctgtctaataacttattggacagtataactattatttgtggacatgtctatgagctaatcggcgatttcagttgtgtcctccgctgagggcgaagctgcggtgtcagtgtcggtgtcggtatcggctctggccggggccgctctatctgttcctgtcgcggttcctgctggggtctcggctgttcctttggcggtcgcagaactcggcgcggaagccggggcgggcgtcggcctgcgtttggccgtggacgccttgaacagtatcgccagggcctcaaccaaatgacgccggtctgcgggggtcagccctacatacgcgccaagcatcgccggaatcgaagcggggaagttgctcatcacctcgctgaagctggtggcgccgttggcgtgcagcacggtgaacagcgcgtccaccgcacgctcgcgctgttcgggcgtaagcgtggcgatccaatggttcagctcctcgttaaacaactgcgagctggaactcaaatccggctcggtgatgaactggtcgccatccaatagccaggtgaaggcggaatgctgcataatgccatccgaatcggaagagaccacgcggcaaggctccggggtctcgaaaatcatgcccacaatcgacgaacttggcacgattttcgtcaccttcggctggatggtgcggtaggcggggctggtcacaatctccggcgggaaaccggggccgtccagtgaatagacatgctgaatgcgcttgcgcaccttggggtcggcgttcatggccgcgtaaatcgccagattgcctcccttggaatggccgaccagaataatcggaccctcccacagtcgcgccaccgtatccagataggcgctggctgaacgttgcgccggcaccggatactggaaagccatattgaaatcttccttccatccgatgagcgaatcatcggtgccgcggaaggaaataaccaacgtgcctttgtaggtcggcttccggcgcttgtggccgtcgggcagttggaaggtggcggcggcgaattgggtttgctcaccctgattgatgtgctcgaccaccgcgcccaggcgaacgttggcgtagcgggggttctcgcccgcggcctggaacaggtcgtgggtcaggtccggattgaccactgaaaccatttgggcttcgtgcggcttgtcgtcggcatgcgtttccggcgaacgatgcagctcgcggttggcctcgtcaaggcttaccgattcaagctcgggatgccagatacccttcagccagatcagtggatgcttgggctcgaaagcgcgaatgcgtgcggcgaacgagcctgactgcgtctcatccagcatcaacgtcggacagatactggccacatcctcatagatgagcgtggagatgatcaaggcgtcgatttcattgaacggcaagtcggcgaaggagcgcgtttcggtgtgcgcgtaatcgataatgccggtcatacgcacctcctgcttccgttgatattgcatatccccttgggccatgtggtcttgcgattgcgtgcggccgtgcggctgcgcgcagcaattaaccatatacattccattgtagggattgtacggttttggccggcgcgatcgagcaagactgcaccgacggcgaacaattcgtgggaggattcccgtcagcttgtcgaaaattgtcgggtagcgggggttgcgatgccagccagccgaccatcctccggcgctacgcgccatctcccgccggcgggaggggtaaccactcaatccttttgacgaggcggaccgctgggccggtcaagggttcggtagatcgaagcgcgccagatccacgccctcgagttcaagcaactcggccttgatgtcgagtcggccgccgtagccgccaaacgcgcggcccgagccgactacgcggtgacagggcacgatgatggtaaccggattgcgcttcactgcgcctccgaccgcctgcgcggccatgcggccgccaccgcgtcgttcggccaattcggcggcgagttcgccgtaacttaccgtcatgccatagggaatttcggccaccagattccacacttcatgttggaatggcgtgccggcgggatgcaacggcggcgtctgatctaggccggggcgctcgccggcgaaataggcggtcagccatacgcgggtcatacggaacacatcgggttcacgatcggattcgcgattcgaatcgagaacggcttggtgatcggtggcccaccaccagtcttcaagacagagctcggtcaggccctcgccgtccgaggccatcatcatccggccgatgggcgtttcgactgtggcccgcatcagttgtcgttgcgtcataccgccattatcgcgcgttgagggatgaagcccataccgtgcctgatttcatgaaggacgggtcgtgctgtacggtcagtattgcgtgctgggcagcgatatctgacatagtgggggttcttgggccggcatgagtgttctttccgacatcccaaccgtctaactccgtttcgaggggctgatttgggctgttccggaggtctatctccgtttcgaggggctcctcattcgggaaaccacaagtataaacggctccgggctaacgtcattacgccgtttttggcccgtgtctactcagccaccagccccttgaaacgggagtagacctccggagaaggccaaatcagccccttgaaacgcagcgacccctctgattggagtcgatcagaggggttcggcacattgctgatgcagctggtccgccgtccgccttgaggcggaacgtaaccaagattcaggcgggattactccgcaacgagcgccaggaaggcggcggccacggcggctgtcgggttcgggaattcctcgtcctggttgaagaacggcacgtcggcgtagttcgggaacttcacttcggcacggtcgccgatcagggccttggcctcttcggccagctgatcggttatcgtcatgcgttcctgatttccacggccatggccgtgccagatgtgcccatcgcttggttctacccgctgtttatgctggccatgcccatcgcctggctgctgtatacggccaccgcgagttatgtgcacggcggcacccgataatcgttggaaaaccggtgggacacgcgggggcttggctttttcctgagattggcgtatctttgtcacctgttgcccgtgaaggtaacacatgcggacatagcttagttggtaaagcgcaaccttgccaaggttgagaccgcgggttcgagtcccgttgtccgctctcggatggctggttcaggatgattgattcagcctgaggatgacccgggcggttggcgcagtggtagcgcacttccctgacacggaaggggtcacaagttcgaatcttgtatcgcccactcgatgaatcgccggcagaatgttgccggttttttcatcacaagctcgggcgattggcgcagcggctagcgcacttcgttcacaccgaaggggtcgtaggttcgattcctacatcgcccacccgatatcacgctcgtcagtctatgatggcgggcattttctatatctgccgtgccacggttccttatatggcgtccggcctcgggtggcatttggctgtgagcggtttccgattatgagtggcgtccggccgtcgtgcaatcccgctgcgcgcggtgccgtttgggctgtaatacgggtgctttgaaccggccataacttcttcatatgtcccggggcttgtgtcgtgtgccgcggcgcgcttccatagtggatatggcggtgcggaaggggagccgccatacttacttacttacacaaggacgtcttggtccgccagggcaacgcgcatggaaaggggtttgcgatggtgtgcaccacgctgaatttcgcggagaaatacctgctgaaaaccgaagtcaggttcgttgccggtatgtccggcggtacttccgatgctggtactgatttcgatgtcgatttcggtggcgagggcgacctcggaagcgatcatgccaccggtttcaatcgctcgctatcggccgacgattattgggctgcagccggatatgccgatgagtcattgtattgatggacgtgatgacgcggtaagggcgcgtcgataagtgcggctggtgtcgcggctgatgccgcatctggtgctcgttcggtggtcgcggctgatgttccgtacggaccgcctgcaatggttttgcatcggtggtgcgtcaaaatccggaccgtcgccgacgctgtggacgtttggcggcgttgaaaggacagataatggattgtcaacgccgctgagaacgattggcgacggtggtgggacagcggatgccccaccaccgtcgccaagagtggtacttgtgtcggtggcgtccaaaacatggcccggcaccgacatcagatactctg

SEQ ID NO: 2108 - DNA, 6016 bp, Unknown
  R51_24m  MAG No. k141_2841
gaggagcccctttccgaattactgctatatcaatgattttacactttcatgagcgagttttctaccgtctggcacatttcatgagcgagttttcggcggtttttcacatttcatgagcgagatggcgggaaatgccagctgtcagtccgccggtcatccatcaatcgtccgcagattgtccgtctgttgactcgggaaacatgcctgcgctataactgtgcgcggtatgaagggaacaggtacaaacaatatggcagtaacacacaccgtggcagatgccactgcggcaaccactatgacgaacgctgtggcagacatcgaacaggaaacaccggaaatcgagaaggaacgccagcttgccggagtcggaaccggggccggagcagggacgaataacaataagaagccgcatgaccatgcgctggccagtatccttggtcccgcgttcgtggcggccgtggcctacgtcgatcctggtaatgtggcggccaacatcacctccggcgcgaggtacggctacctgttggtgtgggtgctggtgctcgccaacgccatgagcgtgctcatccagtatcagtccgccaaactcggcatcgtgaccaacaaatccctgccggaactgctgggcgagcgtatgagcgacgccggccgattcatgttcttcatgcaggccgaggtcatcgccatcgccaccgatctggccgaggtgatcggcggcgccatcgccctgaacctgctgttcggattgccgctgttcaccggcggtttggtgattggcacaatctccacggtgatgctgtggttccaaggcggcaagacacagaccacattcgagcgcatcatcatcgtgatgctgctgattatcacattcggtttcatcgcgggtctgttcgtagccccgccgaaccccggcgaagtggtcaaaggcatgattccacgcttccaaggcgccgactcggtgttgatggccgcctcgattctgggcgccaccgtgatgccgcacgccatctacctgcactccacgctggtgaacgaccattacgcaggcggcgaaaagccgtcgatcaaaacgcagctgagaggctcgaaaatcgatgtggcctgggcgctgttgctggccggcaccgtgaatctggcgatgctggtgctcgccgccaactcgctgcatggcatgtctggcacggattccatcgacggcgcacaacgggcgatcacgcaggtgctcggcccggtgatcggcacgatcttctccatcggcctgctggcttcgtcgctgagctccacatcggtcggcacgtatgccggctcggaaatcatgcacggtctgctgcacgttaacgccccgatgtgggcctgccgcgtggtcacgctggtgccggcactgattgtgctgtggttcgccaaggatccgactcaggcgctggtcatcggccaggtggtgctttccatcggcatcccgttcgccgtgattccgctgatgcgatacacgcataacaaggaactcatgggcaagtgggctgatggaaccgtcaagcacgtgatctttatgatcgtcgtggcgctgattgtggcgttgaacgtgctgctgattgtcctgacgctgatgggcagggcgtaatagactccagctgaaatcctgcgatagcacaacataataagaagctccggtgttggaaaccggggtttcttattatgttaagaatggttgaatctgccgtcagttcgcagccatacgccgcgcacgccgttcgcgcagcgcgcgcaaggaaataatgtctcgcgtacgaccggcaccgtcgcccttgacgccgaagaacaccatcaacaccattgccagacagatcattgcggagatgcgcagcgcccattgaatgccgaaaatcgaagcggcgacggcggaggcgccgccctgcttatgcaaagcggcaaacgtttccatcagaatcaccaacacgggtgcgcccacagcgcccgcaatctgacgcgcggtattcgtcaccgatgatccggcggacacttcgctcggcccgttcaggcaattcagggaccacgtggtaatcggcatcagcaggaaacccatgccgatctgacggatgaactggcagatcgatacccaccagatccacgtatccatcgccaccagcgacatgcccaaggtaccaagggtcaacacaatcgaaccgaacaaagccacgggtcgtgcgccgaatcgatccatcgcacggccgccgaagaactgggagatgcactgaccgatagcgcccggcagcatgatcagaccactcatcgtggcagaatacccacggtcggtctggatatagagcggcatgatgaccagaatcgaactgaacgcgaaaaatgccagcgacgcggtaatggtgccgatggtgaacgaacggttcttcagcacttccaagtccagcagcggcggctgggggagtgccgacttgtccttggctacggcctcgcgataccgcttgccggcgcgcaggttacgcagcacgaaccatacgatgccgatcagacccacaaccataggtccccacgttaccggcgccgtaaatccataggtctccgaattggtgaagccgaacatcagcccgccaaagccaatcaccgacaggctcaccgagaagaagtccgcgcgggcagacgggtcatgcgagccgaaattatgtagtccgaacatggccgccaccagcgagacaacgccaatcacggtcatggtcaggaagatggaacgccagccattggcgtcggtctgccagccgcccaaggtggggccgattgccggagccacgctcatggccatgcccacggtgcccatagcaaagccgcgtcgggacagcgggtagatggagaacaccgtgatctgcagcaccggccacatcacgcccgtgccggccgcctccagcacgcggccgagcagcacccatacgaagtttggccccaaccatgccagcagggagccgaccgtgaacaccgccatcgagcagatcacgatctgtcgggtggagaaacgacgggtcaggaacgcggtcagcggcaccataacgcccatgaccagctggaacacggaggtcagccactggcccgtggttacggagatgtggaattcggaaacgataatcggcagcgcggaactcagctgcagctgcgtgaagttgcccacgaaggtaataaaggtcaatatcgcgatggagatgaacgccgcccggctgagtttgccgtctacatatgattcctcgcggctcagcacccgctgcagttcgccgcgacgattcttgattccctgagctccgttcattccactcacgtgcatactccactctcgctgatcgaccgcaacaacgcatcaggcagtctctcaaagcaaccccaacacgctacacccaggggtagtccgtcgagatgcaatgccgagatgactggccgcccggttgcagagcaaattagtcccgttattcgagacgtcaaaatgaacgtagttactatccgatcgcgttcgctatgtggttttccaacaccccccccctagcggttaggggtgtgatgtctgtaccatgttgaaggggtaaccccgtatacacccgtgcacaggggaatccagagaagtgagagccgcgagacctgcggtatacggttgaaaaggaagaattggtgtttgagatgtcatctctgagcagtaacggtcagccgtctacacgcagcagacaggccaatagcggtgaccgaaccaccgctcagctcagtgatatccgccaaaagcagctcagccacgtgctgtactggcgattcttcgtcaatctcgccctcatgcttatcgacgccgccatgtacatcatcaccggagccacggtgctcaatctgcgtcatgaggcaacgccgttctattcgagcagattcaatttcacgattgactccaccgtttactttatgattgtggcctgcttctgggtgtggtcgctctatgtcgccggcatttatcatcgccatgttatgggtgacggttaccagctcaatgtgctgctggtcaaaggcatggtcgtgtgctgggtggtgcagtgcgcgttcaactacttcttcgatctgggtctgacccttacctcgctctgcttggtggtgattgccggatggttgctcaccatggtggaacgcattgccagccgtgcattcattacgcgtagtcgtcgcaagggcgcctacgcttacggcacggtgatcatcggttccccgcacggcattggtcgcacgctaaaattcctcggtcagcgtcggcaactcaactaccgcccggtggcagtatgcccgattcatctcaatcccgataccggattgattgaacagagcaccgaccatgagacactccgtgaggagatgcaaaagaacgagggctgccagctgcccgtactcgagtacagcgatcataatcttgctgaacagattattgacatgaacgcgcagaccgttatggtggctgacgagctgcatcgctattcggataattacgatatcttctccgtgcgcatggaatcgttcggtctggagattgccgtgctggcttccgccgctgacacttctaaccatgagattcaggttcgatccatacagggcaccacgattatcacgcaacgtcttgcgcagtacacgccagcccgccgtatggctaagcgcctgtttgacttggtgatttcttcgctagcgatcatctgttcgttgattatcaccatcccggtggcgatcgccatcaaagtcacggatggcggaccggtgttctacaagcagacccgtatgggcctgcgcggcaagccgttccagatgtacaagttccgttcgatggtggtgaacgccgacgcgctcaagaaggagctcgcaaaagaaaccggccagaccgaccgcttcatcttcaagatgaagaacgacccacgcatcaccaaggtggggcatttcattcgccgcttctccattgacgagttgccgcagttcctcaacgtgtggatgggcgatatgtccgtagtggggccgcgcccgccgctgcctgaggaatacgcccgttacaaccgtctgtacgccacccgcatgctggtcaagcccggcatcaccggtccgtggcaagtgtccggacgctccgatttgtctgccgaagagagtgaggcccttgatgtggcttacgtgcagaactggtcgattatgggagacattgtgcttctcttccgcacggtcggtgccgtgctgagtcacaagggagcgtactgattcctttccgtttcgctgcttcagtcttgccgcgcccttgccgccccgcccttgaacgtgattccagaaagataagtcgatatatctatgactgattcgaacacaccagaaatacctcagccgccggcaccctccgagcggtcggaaaacgcggatgatcgccaagtgatacagccgtatgttgaccccgaggtacttgctgaagacgcccgagcggcggaacggcgtaagcaccgccggcgtatgagccatgaacatatcaggcggatcaagcgcaaaaagcgcattcggatggtgctgattgtaatcggcgcactgctgttgactattgccgcgctcgcggcgtggctcggcctttccgcgctcaaagcgaaaaatgaagtggaagcagcgattcaggccgcaagccgcatccaatcacaagttcaagccggcgacaccgacaaagcgcaagccagcattgaagcattctcccagcatatcgacgctacgtatgcgcagaccaagcagccggtatggaaactggccacattggtgccctattacggttctgacgtgaaggccgcgcgagacatggtgcacattttggaagacgtgtcgaacaacgcattgccgaagcttgccaaggcggcacaggccttggatttcaacagcatcggtatcaaagacggcacgattcagctgggggatatggccagcgtggctcaggatcttgccgccgccaatggagtagtggcggatgccagcgtagacatgggca

SEQ ID NO: 2109 - DNA, 18972 bp, Unknown
  R51_24m  MAG No. k141_2997
  misc_feature (18972)..(18972): n is a, c, g, or t
caagccgtatgatccgctggtgccgaacattgaattcgtgcgcgccggcgacaaggtcgccctgcacgacgcttttgcacagaccggtctcggccgctatggcaagggtccggtggctgctgtgattctggaacttatccaaggcgaagccggcgtgcagccgttgggcgccgattacgtcaagttcgtgcgtgaactgtgcgatatcaaccacgcgctgctcatcatcgatgaagtacagaccggtatcggacgtaccggcaagtggttcgcattccagcgtgacgatctgtccggcggcgtgacgccggatatggtgactttcgccaagggtgtggcaggcggattcccgatgggcggcatgatcgcttttggcgagaaacttgcggctctgttcactcctggttcccacggctccacctttgccggcaatccgctgggtgcggctgcgggactcgccactcttggcgtgattgaagacgagaatctggtggccaacgccgaagctcgcggcgaacagctgcgcgatggcattatggccaccggtaatccgctgttcgtttccgtacgcggtcgtggtttgctggacgccgtcgagctcaagcatccctgctcccacgcggtgatgaactactgcctcgaacacgggctcatcgtcaacgcggtggctcccaatgcgctgcgtttcgcaccgccgctgattgtaaccgctcaagacgtggatcaggcacttgccatcctcaaggatgtgcctacggacctgcccgacgactgatttctcgccgtcactgccgacccaccgatccaaggagatcatcatgaccccagaacttcgccacatgctgcgtgacgacgacctcaaccatgaggagcagaagcaggtgctcgaacttgccatcaagttccaccatgaccgcttctacaagcagccgttcgccggtccgcaggccgtcgccgtactgttcgacaagccatccacccgcacccgttccagcttctccatcggcgttgccgagcttggcggctacccgctggtcatcgacaagtccggctcccagctgggccgtggcgagcccgtggccgataccgctcgtgtgctcgaccgcatggcttacggcgtggtgtggcgcaccttcggccaggaccgcgtcgaagaaatggccaagtactccacccatccggtggtcaacgccctgaccgatgacttccatccctgccagattcttgccgacttccagaccatcgccgagcaccgaggcggcgtcgacaacctgaagaaccagaccatcgcctacctcggtgacgcggccaacaacatggctaactcctacctgctcggcggtgccgtggccggcatggacgtgcgcgtggccggcccccacggctacctgccccgcccggacatcgtggccgacgccaagcgcgtcgcggccgagaccggcggctccatcctggtcaccaccgatgccaaggaagcagtgaaggacgccgactgcgtgttcaccgacacctgggtctccatgggcgaggaggccgaatacgccatccgttccaagccgttctgggattaccaggtcaacaccgaacttatggcattggccaagccggatgcgctcttccagcactgcctgcccgcctaccgcggcaaggaagtcaccgctgaagtgatcgacggcccgcagtccgtggtgtgggatgaggccgagaaccgtctgcacgcacagaaagcgttgctgacttggttgaccggcaaggcccgtggagacgaaagcctgctcgcatgagtgaaaccggtccgtccctgcagcgccctgccaccagggcggcgcggctgagtgccatagaacaggcgctctccacgcatatcatcacctcgcaatcacagctgtccaaaatccttatcgacgagggcattgcggtgactcaggcgaccttgagccgcgatcttgacgagatgcatgcggtgaagacccggctgaaggacggcacggtggcctacacggtgggtcgcagcgtcgttgcttcggaaggtgaggatgtaggggagcgcggtgaggcacagatgtcccgcgtgctgaacggactggtcacctcggtggccgccgccggaaatctggttgtggtgcacacgccttccggtgccgcacaatacgtggcctcggtgattgacaggcagccgatcgaaggcgtgctgggcaccatcgccggagacgacaccgtcatggtgatttgcaccaatgacgacaccgccgtctcccgctccgactggctactaagcctcgcctccaaataaccaacacgccgtgcataaatatacagtcctctgtatatacttgcatcagtttgttttttcagaccttgaacgaaagggaaccaatggcagataacaagcgcattgttctggcctactccggcggtcttgacacctccgtcgccatctcgtacctgaaggagcgcaccggcaaggacgtcgtggccgtgtccctcgacgtcggccagggcggcgaaagcctcgagaccatcaagcagcgcgcccttgcctgcggagccgtcgaatcctacgtggtcgacgcccgtgacgagttcgccaacgaatattgcatgaaggccctcaaggccaacgccatgtacgaaggcgtctacccgctggtctccgccatctcccgtccgctgatctccaagcacctcgtgcgcgccgcccaccagttcggcgccgacaccatctcccacggttgcaccggcaagggcaacgaccaggttcgtttcgaggtctccattgcctccattgacccgacgctgaaggccatcagcccgattcgtgacctgtccctgacccgcgatgtcgagatcgcgttcgccaaggagcacaagttgccgatcacccagaccgagaagtccccgtactccatcgaccagaacgtatggggccgcgccattgagaccggcttccttgaggatccgtggaacggcccgaccaaggactgctactcctacaccgacgacccggccttcccgccggtcgaagatgaagtcgtcatcgagttcaaggaaggtgtgccggtcaagatcgacggacgtgacgtcaccccgctgcaggccatcgaagagatgaaccgccgcgccggagcccagggcatcggccgcatcgacctcatcgaggaccgcctggtcggcatcaagtcccgcgagctgtacgaggctccgggtgccgtggctctgatcaccgctcaccaggaactcgaaaactgctgcctcgaacgcgaacagcaccgcatcaagcgcgacatcgacaagcgctggggcgagctggtttacgatgcgcagtggttctccccggcaacccagtcgctcaacgccttcatcgaagacacccagaagtacgtgtccggtgagattcgcatggtcctgcacggtggccgcgccgtggtgaccggccgtcgttccgactcctcgctgtacgactacaagctcgccacctacgattccggcgataccttcgaccagaggtcctccaacggcttcatcgacatctatggcctgccgtcccgcgtggccgcagcccgcgacgtcaagttcggcaacggcatcgaggtcccgaagaacaccgtcgagtgattcttactcagtcgcccccgctgcgaggctgtcggcatagctgactgggagtggtctttgaaaggactgtcctcagtcacactccatgtgacagccctcgccagcgggggcaactgtatgtttgaacacattgctacgcttaaacacagctattttcacttttcaaggagccttcatgactgagaacaacgaacatctggccctgtggggtggtcgctttacgtccggtccgtcgccggaactggcccgactgtccaagtccacgcagttcgactggcgcttggccgacgacgatatcgccggttcccgcgcccacgcccgtgctctcggccgtgcgggacttttgaccgccgacgagctgcagcgcatggaggatgcgctcgacacgctccagcgtcatgtggatgacggctccttcgcccccatcgaagacgatgaggacgaggccaccgccctcgaacgcggactgattgacattgccggcgacgaactcggcggcaaactgcgtgccggacgctcccgcaacgaccagatcgcctgcctgattcgtatgtggctgcgccgccactcccgtgcgattgccggactcctgcttgacctcgtcaacgccctgatcgagcagagcgaaaaggccggccgcaccgtgatgccgggccgcacccacatgcagcacgcccagcccgtgctgctcgcgcaccagctcatggcccacgcttggccgctgattcgcgacgtgcagcgactgatcgactgggacaagcgcatcaacgcctctccgtacggctccggcgcactggccggcaacacgctcggcctcgacccggaggccgtggcgcgtgagctcggcttctcccgcgtgaccgacaactccatcgacggcaccgccgcacgtgatctcgtggccgaattcgcgttcgtggccgccatgaccggcgtggacatctcccgcctgtccgaggagatcatcatctggaacacccaggagttcgccttcgtcaagctcgacgacggctattccaccggctcctccatcatgccgcagaagaagaacccggatatcgccgagctcgcccgcggcaagtccggccgactcatcggcgatctgaccggtctgctggccaccctgaagggcctgcccaccgcctacgctcgcgacctgcaggaagacaaggaggccgtgttcgaccaggtcgatacgctcgaagtgctgctgcccgccttcaccggcatggtcaagaccatgcacttcgacagcgagcggcttgaagaggaagccccgaccggcttcgcgctggccaccgacatcgccgaatggcttgtcaagaacggtgtgccgttccgccatgcgcacgagctctctggtgcctgcgtcaagctcgccgaaggccgcggccaggaactgtgggatctgaccgacaatgacttcatcgagaccttcgccgcgttcctgccggccgacaaggctccgggagtacgcgaagtgctctccagccacggttcggtcgactcccgcaacggcaagggcggcaccgcttacggtcgcgtgcgcgagcagatcgccgacgccaaggccgaggtcgaagaactcaagctcttccccgcatccacgtcggatggctccgcctacaaagcccccggcacgttctagtcccaatagagctccctcgtcagagggagctctattttgctgttgtcactgcaacggcatacactgagaaatcgtaacgaacgggagccgtgaggctgagaggaagtcgccagacttcgaccggggaacttgacgcgggtcatgccgccgtaaggaatcgttgttgcagatttgccgggttctccgatacagctttcattccgtttgcataattcagccgtgagacggtcgtgatggagccaatacatcacagcggtcgaacggtcgcatgattgggttcatgaatgggcgcaccacttaaggtacggttcgtttcgtgcacccttttttactatctgaaaggatattatgcaggtcaacggagagcaggtcacgctcgagacgccggtcagcgtcgccgattatctcgaagcgcacggattccgcgccgagcgtgtggccatcgaactcaatggtgagattatcccgcgcgataagcgtgccgacgccatgctcgacgaccagtgcgtcatggaaattgtgcagtttgtacagggtggatgaaaggaaaagctatgagcaatattaatccggttactgaagcatctgttgaggcgactccgctgccgccgcagcccgccgtcaccaatccggtcggcaccgccgcgccgattctgccagtggaagacaagccgctgaccctgggcggtcacgagttccagtcgcgattcattctgggctccggccgctacgacctgaacctcatcaaggccacggtcgaacatgcaggcacgcaaatcgtcaccatggcactgcgccgcgcgcagaccaccgagaacagcgtgctcgactacattcccgaaggcatcacgttgctgcccaacacctccggtgcgcgcaacgccgaagaagccgtgcgtatcgcccgactggcacgcgaagtgtgccacaccgacttcgtcaaggtcgaaatcgaacacgagaccaagtacctcctgccggacaacgccgaaaccatccgagccaccgaaatgctggccaaggaaggcttcgtggtcatgccctacatgttcccggacccgattgccgcacgccagctggaggaggccggtgccgccgccgttatgccgctcggttcgctgatcggctccaacatgggcctgcgcatgcgtgacttcatcgagatcatcatcgccaatgcgcatgtgccggtcatcatcgatgccggcatcggacgcccgagtcaggcatgcgacgccatggagatgggtgcggatgcggtgatggcgtacacggccgttgcctctgctggcaatatcccgctgatggctgaggcgttcaagcacgccatcgatgctggtcgtgcggcgtatctgtccggtctgggcaaggtgaccgagggacaggccgtgccgtccagtccgactacgggatatttgcactgacacttttattagctcccctctctgaggggagctggccgcgtagcggactgaggggagctggaaacatggagaaaacatggcattgactgatgaacaggtggagcggtacgcgcgccatctgattttgaaggggctgggcgtcaaagggcagaagcggttgttggcctccagcgtgctcatcattggagcgggcgggcttggctctccggccgccctgtatctggcggcggccggcgtcggccatatcggactggtggacggcgatgtggtggatatgagcaatctgcaacgtcagatcatccataccactgcacgtgtcggagcgcccaaagtggaatccgcggccacggccatccgcgcgctcaacccggatgtgacggtcgacacctactacgagctcgtcgacgcgagcaacatcgccggcctcatcgaaccgtacgatctggtgatcgatgccaccgacaacttcgccgcaaaattcctcatcaatgacgcctgcgtgctggccggcaagccgtacatccatgccggcgtggtcggattcgccggtcaggtgatgaccgtcattcccggcgaaggcccctgctaccgctgcatcttccgcgacatgcccgccgccggtgagattccgacctgcaaggaagccggcgtgctgggcgcggtggtcggtgtgatcggcagtctggaggcgactgaggccgtcaagctgattgccggcgtgggggagccgctcgtggctcgtatgctcactgtggatgccctgaccatgaacatccgccgtgtgccgttgccgaaccatgtgcccgactgcccggtgtgcggtgagcagccgaccattactgctattgatccggccaactatattcagccggcttgcgcgatttagagctatgtggcacccctccttgaggggagccaagatcggaacgagaggggaagaacatgcctattgctttgcgtaatgcggtcgatgacgatgagagcagtgaagcatcgtaccgccgcatcacgccggcggaatttgccaagctcgacccgaatacggtcacgctgctcgacttgagggaaccagccgacttcgccgcccacccggtcgaaggtgccatcaatgcaccactcgaccctctggcccatgtgctcaaaaccgtgcccacagatcgaactgtcgtagtctattgtgctcaaggatggtggagcgaggaagtagctgaaatccttgccgatcgcggttacgatgtagcaagcctcgatggcggttttcagggttatctcgactatcttgaaacccaccacgattaacggttcccgttgtcgttcttttggatgagtgtgcacggacatacgtgtgccctacaatcggtcacggtattactcgatggattcttgaatatcgtcgggtaatcgtaattcacaacaagggattgcactgaaccaacccgaacggagggtcgaaaccgtgggacatctgctcacccgaacgcagattcaacgcctggtcgccaagcacggccgtgaggtcatcgagcatcgccacatgcagatcgaacgctgctgctaccagcacggcaacgtcaccacgttcgaacattccgtgcgtgtcgcctgcctggctgtgtggatggccgaccgcgcgcacctgtggtaccgcgtcgacctcaaatccctgattcgcgcggccctcctgcacgattacttcctgtacgactggcacgactgggataacggcgaacaccagtggcatggcttcacccatggccacgccgccctggtcaatgccctgaaggacttcaagctcaacgatatcgaacgcaacagcatcgagaaccacatgttcccgatgaccctggtgccgccgcgctatatcgaaggctatctggtcaccttggcggacaaatgctccgccaccgccgagaccttctcgctcgaccggttcaacaagcgcgcgttgcccgccgcgaagccctacgccgagatcgaagcccgtcgatgatcatcacactcgaacattatttcctctggtttctgttctacagtttcgtcggctggatgtacgaatccattctcgtctcctgccaacagcaccgcttggtcaaccgagggttcctcaacggcccgctgtgcccgatctacggcaccggcgcgatactcggcgtcgccattctcggcaacgtacataacccgatcatcatcttcctgatttcgatggtgggcgccacgatactcgaatacacaacctcatgggtcatggagcagctgttccacgcccgctggtgggattactcgaacttccgcttcaacctccaaggccgcgtctgcctgctgggcgcgttgattttcggtctcggcggcgtgggcgtggtacttggttcgcagccatatgtcgagcgggtcacggatatgattccgctgccgatgctgcatacgctggtcacggtactggccctgatcaccatcatcgacttggcggtcacggttgcgggcatgctcggattcgagcaggtgctcgattccgtctctcaggtggtgcaggatgtggcggcacgcgccggtggcacgtggcagtggggctcccgtgcggtatccgacaggatgcgtgagctttcgcaggatacggttgagcgtctgcgctgggccatcaatggcgtcatcaacgcacagcagaagcgtatgctcaagtccttcccgaagttccaggtgccggatcgtcaggatatcatcgactctttgcgcgaacttatgggcccgcgccgctagaataaggcattttactgaatcgcgcggctcggctggtgttcggcactgtcgccatgttctgcgaaacttgactgtgcccaattgggcagtctcattcacaattcgatagggagaagcgacaagctatggctcacgtcaccgacttcaaggaagcgggtttcaacaccctgcttgaggaactggaatggcgcgggttgatttcccagtccacggaccgggatcgactcgcagaagcactgaacggcgagcccatcacctattattgcggcttcgaccccaccgctgcatcgttgcatatcggcaacctcgtgcagctcatcaacatgcgtcacctgcagcttgcgggccatcatccaatcgccctggtcggcggcgccaccggactcatcggcgacccgcgccagtccggcgaacgcacgctcaacccgaaggacgtggtggccggctgggccgatcgtctgaagaaccagatcggcggcattctggacaccgaaggcgcgaacgccgtacgtttcgtgtccaattacgattggaccgcctcgatgaccgtcatcgacttcctgcgtgacgtcggcaagaacttccgtctgggcaccatgctcgccaaggacacggtcgcccgccgcctgaactctgaggaaggcatctccttcaccgagttcagctaccaggtgctgcagggcaacgacttcctccacctgtttgacgaataccactgcacgctggaactcggcggctccgaccagtggggcaacctcacctccggcctggacctgatccacaaggtgcgcggtgtggacgtcaacgtgttcaccagcccgatcatcactgatgcttccggcaagaagttcggcaagtccgagggcaacgccgtctggctcgacgccacgatgctcagcccgtacaagttctaccagttctggatcaaccgcccggacgtggagatggaaagcctgctgaaggcgttcaccttcctgcccaaggccgaaatcgaacgactggtcgaggaatccaagaccaaccccggcaagcgcgaggcccagaagaccctcgcctgggaggtcaccagcttcgtgcatggcgaggccgctacccaggccgccatcgacgcttccggtgcgctgttcggacgcggtggcaacctcgaagacatcgacgaggaaacgctggaatccgtgctcgacggcttcaaggtggttgacgagaacggcgagcacgtcttccccgtctccaagccgggcgatcgcgtaatcgacgccgcccaggctgccggactgttcaagtccgcttccgaggcacgccgcgccatcaagtccggtggcgtgtatctcaacaacaaccgtatcgaggatgaggagcaggtgctggccgaagccgacttcctggccggccgcttcgcgctcatccgtcgtggcaagaaggcgctcggcgccgtggaaaaccgttaatcaacaacgaattaaggaaaacaagtaatggcagaaggtaacgagcgttccggcaagtcctacggcggcggccataaggggtatggcgatcgccgaccgggcaaccgcggcggcaagggtttcaagccgcgcggcaagggcggtttcaagccgcgtcatgacggtgaaggtttcaagccgcgtcgtcgtgaggatggcgaaggctacgcgccgcgccgtgatggtgatggcgagggccacggcggctaccgcaagtcgtacggcaagggtggcgacttccacaagggcggccgctctggtttcggtggcaagggcggctatcgcggcaacggtccgcgccgcgatggcgacggcttccgtccgcgccgcgaccgcgatggcgagggcttcaagccgcgccgccgtgaggatggtgagggttacgcgccgcgccgtgatggtgatggcgagggccacggcggctaccgtaagtcgtacggcaagtccggtggcttccacaagggtggttaccgcggcagtggtccgcgccgtgacggtgaaggtttcaagccgcgccgcgaaggcggctaccgttcccacgaaggcgagaacggcgagaacccgcgctaccagcaccgtgacaacgatcgtcgtgatttccgtcgcgatgatcgccgtgacttccaccgcgatggtgagcgccgtgacttccaccgcgatggtgagcgtcgtgacttccgtcgtgacaatgatcgtcgtgacttccgccgcgatgaccgaagggataacgatcgccgtgatttccatcgtgatggtgagcgtcgcaacttccgccgcgacgacgatcgccgtgatggcgatcgccgcaacttccgcagggacgaccgccgcgacaacaaccgtcgtgacggcgaattccgcgagttttcgcaggaagagaagcgccagtaccgtgaggagaagcgctctgaatacatgaggcgtccgcgccgtaactccgacggcacgatgagcttcccctcgcagaacccgtacactgaccgtcgtcccgacgagcccaagatgcccaagggcatggaatggtcgatgctgtccaaggatgagcgcgaacgtctgcgcggcctgtccaaggagcatgcggagaacattggtctgcacatcctcgccgctttcgcgctggaggagagcgatcccgaacttgccttggagcacgccaagtgggtggcccgtcaggcctcccgcatcgactttgcccgcgagacgctcgcgttcgtggcctaccgtcagggcgactacaagctgtccctgcgtgagttccgtaccgcctaccgtatgaacggcttcctcgactacctgccgttcatcgctgactgcgagcgtggtgtcggtgaaccgaagaaggccgtggaactggcgctgtccgatgagggcaagcagctgcatggcgctcccaaggtcgagatgttcctggtgtatgccggtgcccttggcgatttggagatgtgggacaaggccattgaagtggttcataccgtcggccgctctcagggtcttccgggtgagtaccgtatgcgtgccgtgcaggccgagcagtacttccttgaagaggccggccgcagcaaggaagccgagcagcttaatgacctgctggaccgtcttgaggatcagtatgccgacgaggagattgacgaaaacagcgacgacgtggtgattgaccacgatctcgaagacatcaccgacgactccgacgtgctcgagaagctcggcatcgatccggacgaggcgcagtacgccccggatccggagcaggaatacggcgatgaggacgacgaggctgaagacggcgatgccgagtctgatgaggccgatgtcgaaaatgctgagtccgaggatgcatcggaagaatctgaggaatctgaagccgaggagtcttccgagtccgctgacggtgccgttgaaccggctgagtccgacgagaccgagaccgaaaccgaggagtgagcggcgtaatgacccgtttcctcaaaggcaccgatcgcccgctcgccgaggcctatcagcttgcgctgctggacctcgacggcgtggtgtatcgcggcaagaatccggtcgaatacgcagccgattccattcgtgcggccgaagccgccggcatgaccatcgaatacaccacgaacaactcctcgcgcttccagcacgtggtggccgaccagctcaagggcttcggcttggacgtggagccgtggcaggtcatcacctcttcggtggtggccgcccgtgtggtggccaaggcgttgcccgccggcgcgcgcgtacaggtattgggcgccgagcatttgcgcgatgaggtcacccgcaacggcctgaccatcgtggacggtcctcaggaccgcccgcaggccgttattcagggctggtatccggatatgacttggcagatgatggccgatgccgcgttcgcggtcgaggccggagccacgtatttcgtgaccaaccgcgacctgacgattcctcgtgaactgggcatcgcccccggttgcggatcgatgattcgcgccgtgatcacggccactggcgtcgaaccggtcgcctccgctggcaagccggaagcgtacatgtacgatgaggcccgcgaactgaacgccgccgaaggccacgatctggtgcccaaggaggcgtccatcgccattggcgaccgactcgacactgatatcgaggccggtaaccgcggtgactatgattcgctggcggtgctgaccggtgtcaccaacccgaccgaactgatgctggctccggcacacctgaggcccacattcatcgcccttgatctgcgtgaactcggcgaagcccaaccggagccggtccgcgacgagagcggtacttgggaatgccgcaaggctagcgcttggtttgaaaacggccaggtacacgtcagcgaccccaccagtatggacggcctgcgtgccgccgtatgcgccgcatgggaagcctccgaccaaggcgcacagctcagcgaggccacggtaccggtgttcgccatcgaggcatagtcctatgcctacggatagcgaacacgcgccggtcaccgagcgataccccgaacttgcggatattgatgaacaagacaacgaccgcaagcttgagacctatcgcaacgtgctggaatcgttacaacacgagcttgataacagccgcagctagcagaggagattcattctcccgccagcggaagatgacgtgaagtgctggatggtggctccatgccgagccaccccgttggtggatggtgggtcgaaaggaaggtatatgaccaagcaacatatcgatcccgcgaccccacttgaccgactcgacatgatgctcgtggcttcgggactggtcgaatcgcgggccaaagcgcagcgactcatcaaagccgggcatgtgcgcgtggacggcgagaccatcaccaagccatcgttcatggtcaaagccgggcacagcgaactcgccgtggataagggcgacgactacgtctcccgaggcgcttacaaactcttgggcgcgttcgagacctttgccggcaatggccttaccgggccggaaagcttggaatgtctggatatcggtgcctccaccggtggcttcaccgatgtactgttgcgcgggggagcggccaaagtcgtggcgctcgacgtcggccacggccagctcgacccgcgcatcgccaatgacgagcacgtcatcgaaatgagcggcgtcaacattcgcgaagtagaggccgacgacctgccttaccggccggcgatgatcgtctccgacgtctcctttatttccctgacctatgtgattccggtaatcgcgcgcatcgcggctcccggtgcgcagattgtgttactggtcaaaccgcagttcgaggtcgggcgggcaggactcggcaaaaacggcatcgtggaagatccggcattgcgggagcgggcattgcacgacgtggtcgcctgtgctgaacagcacggacttgacgtggtggccactgccgatagtcccatcatcggcacccacggtaatgaggaatacctgctttacgctgtcttgagatgaatgcgtcggcagtctccgttcaccagcagcacgctggaggtacggtcgatgcctattgcggtggcacacgtggcgctttccaccgcactgccgttgcgtagcatggcggagtccgccgtcaaagtccggcattgcagatggttggcttcaaccgtgacggctgtgatatggcgaaccatgctgccatcctcatacccatccatatcaaaacgagaaaacatcgtactgcgcagtggatgaacttccagagccctgctgttgacgtcatgacccttcaacacgccgttcaagcggactgtctgaccgctaatatgacgggtgcctagggagccattgacggacagatttccggaacaaacgatatcgctgttgcatcgcagtttgccggtaaaggttatttcatcgcaaataatgtcgccgccgacttcgatgtcgccgctgccgctgatgctggatacgcgaatatcaccatcacaccgcacaatgccactcttgatgaccagtttgtccccttctataactgaggcctcgagggtgctggtcacaatcatggtgtgaaaatgcgcgccatcggcaagacgggaacgttggtccactcctatggtgccgtagactcctttgcctatcaacgtgcaattctgcgtatgcttgcccatgatgataaagccccctcaatatggacgtacagctttatggcttattgccccaataatgagcgcatccatgttgaggggggttatatcggtcacgatgtgagcagatagggggtatagcgagcgcagttaggggggttagccttggatgaagtggtcgatctgatcctgcttgcccatgaggatgagttcgtcgttgcgatgcatgaccagttccttggagccgtactggaactccttgcctggggccttgaggcccaccacggtcacgccgtatttgtcgtgcacctgcacgtcctcgatgctgcgacccaccgcgtataggggcgtgtggatcttgacgacggtgtacgggccgtcgatttcgatgtaatccagataattgccggccaccagatgacccacgcgcttgccggcatcgatctccgcattgatgatgtgacgggcgccgatgcgctgcagaatgcgcgcatgctcctgggacacggacttggcccacagatcggaaacgccggcatccagcaggttgccggtgatgatcaccgaagcctcgatgctgtcgccgatggccacgacggccgtgtcgaactgggaggcgtcgatctgctcgatggccagcacatcggtcatgtcggcctgaatggtgggcagatgcgcggaccaacgggccacaagctccgggttcttatccacggcgagcacatcctgacccatctggtcgagggtggcggccacggacccgccgaaacggcccaggccgatgaccagcacgcttttgttgccgctcggttttgctgccatgatgatggtcctctctatgccggatttctgtgtgccgattgaatggccgatcagccaacgataatgttttcctgcggataacgaataggttcgggagccatcggtctgctgatggagtaggcgatggtcaacgggccaagtcgtccgacaatcatctcggcggacagaataaacaggctggccggattgccggcgcttgccacgcccaccgaataaccgcccaacgagaaggccgagcaggcctcgaacacggcgtccacgaacgcgcagccggtggtgaacatcagcatcatcgcaccgaccataaccagcgcaaagcaggccgtggtcacggacacggcggtcatctggacgcggcgggggatacggcggcggaacacggtgacatcgcgatggccggtgaatgcggcgcggcaaatcaagagaatcaccgcgaacgtggtgacacggatgccgccggcggtggatgaggagcctgcgccgatgaacatgagtatgctcatgaacaccttggtctcattcgtgacttcgggcacccaggaaatatcgaaaccggcggagcggggcatgacggcggcgctcatcgcacggcgcatcttcatgccgggaccatctgcggggaacaggccggtattgccccactcgaccagcaggaaccaagccagtgaggtggccaccagcacagcggtggtcaccaaagtgagtttggtgtgcaacgtccaacgtttcgggctgagatgtcggcgtgcgcactgcaccagattcagcaccacggggaaaccgagcgttcctatgaatgcactgatgagaatcggcagtcccacgccccaacggttcacatgcaggccggtggcgtcaggcgtgaaaccggtgttgttgtaggccgataccgcgtagaacagcgcctgccacaatgtacgtcccatattgccgtggttcacgcggaacaggtcgggcagcagcagcacgaaggtaagcacctcggcgatgatggaggtgcccaataccacggtgagtacgcctttgacctcggaaagcttcgtggtgcccagttcgttcgcggtaagcatgcgctgggagaccttgagtctgcgggaagtgccaagagccaccatcgaggcgaaggtcatgacgcccaggccgccgaactggatggagaataggatgacaacttggccgaacgtcgaccagtattcgccggtgttcaccaccggaatgccgcaggtggacagggccgagacggcggtgaagaacgcgaccgggaagttggtgaagatgatgtccgatgtggagatcggcagcagcagcaagccggtgacgatgatgatcagtgcgccgaaatacaccatggacagacggcccgggtgcctgagcagacggtcggtgatgctgatgcggcgaatgcgcttggcggttttatcgcttttgtctcggctcagtacatcggccgaataccaccatgacaggcccttcgaggcctcctcattggcggaggattcgtcgaagtcattggccatgggtcctcaagctcctcaactgatactgctgtatggtcatacggcatgccatcgcgctgcgcacggcacgcgtacggtgatcgcgcggctgtatgccattgtatgccgaagccttacgttaatcgactctgcggaacgttgtcgacgacgcgccacgaagcggcatttttcgaacacctgtacgagtgatgacggtgtctgcggctagaataatgagcagtgcgaccgaatcgacaggaggatgccatggccaagcgcaacgcggtggtggtgacgcataccaggctcaggcagaccggaaccgtagtggccgaggcggtgagccagctgcgagtggccggtttcgaagtcaccatcatcgacaacaccgaggcccccgatttcggtgtgcagccgccgtgcgtgtcggacgacaccgaaatcgtcgtggtcctgggcggcgacggcacgatactgcgcgccgccgaactcgtccactgcacccaggtgccgattctcggcgtgaacatggggcatgtcggcttcctggccgaattcgaaagcttccagatcgacgaggcgatccgccgggtcgccacccacgactattcgatcgacgaacgcatgatcgcccatgtggacgtctggctgcctggcaccaccaagcccattgaggattgggcgctgaacgacatcacgctggaacgcgccgaccggggcaagatggtcgaactgtccatccgcgtggacgatgtggagatgaactcgttcggcgcggacggcgtcatcgtctccacgcccaccggttccaccgcctacgccttctccgcgggcggtccggtcatgtggccgaacgtcaaggccctgcagttgattccgttggccgcgcatgccctgttcgccaggccgctgatcatcggctccggctcgaccttcaccatcgatattctggacgattccatgtccgaaggctggatttgctgcgatggccgccgccagcgcgccctgccgcagggtacgcgcgtcatggtgcgcgaatcgcgcgataccttgcgcctcgcccgactctccggn

SEQ ID NO: 2110 - DNA, 6045 bp, Unknown
  R51_24m  MAG No. k141_3041
gatctgcgaggcgaacaatacgaaaatctcctgcgctgaatccctgaccggtggcctgctcgccgatgcgttcgtgcgtattcccggtgcctccaacgtgttgctgggctccgctgtcacctacgacatcaatgccaaggcttcgatcctacacgtggacaaggccctattggatcgagaaggcgccgtacaccccgaagtcgcccggcagatggccatcggtgccgctcgcctatacagccagccggaatacggcgaccgaatcatcggcctttccaccaccggcgtggccggccccggtccggacggtgataagccggccggactggtgtatgtgggcctgcgcatccccgcaagcctcaccgcggaccatgccgaagtgctcaaagccgtcgaactccatcttgatggcatgcgcgaagaggttcgtcgcctcaccgtattccacgttctgcaaaacttgagtctattcacagcaagttttaaggaataaaaccgcgggaccgtcgtgttgtacatagtggaaacactgaaccgaccttggaaggggcgatggcgatggaaacgatgacccgagtgaacgaacagatggatgtggccgccaagaagccgatggctgtgcagccgggtgtcgcccgtatgcgtgaactgactccggcccagcgccgtgcggtgatgttcgcccagcagcaggtgctcaaggcgcaggctgccaagaaggccaaggatcagcgtcaagccgttcgtgaacgtatgtgggatgaggattcgccgtcgtacaagccgactgccgccgccgagcccgtggtggttgaggaggagcctcgcgaggtttcgctgcgtggtgctatcggctacgtgctgcgcgaactgcgtacgcgcgatcgccgcacgttgcgtgaggtctccgagaaggcgggcgtttcgctgggctatctttccgaagtcgaacgtgggcagaaggaagccagctccgaactgctgagctccatcgccgatgcgctcggagtctccacttcgcgcatgctgcgcatggtggccgattatctcgactcggtcgagggctgatcggttggcggtgtgaagccgcatcccgtaatctatgtctagctgtgaacccgtatcgcttgtggcgatgcgggtttttgctgtcctgcgggtggtggcacactggcgtgtatgcgtgaacgggaattctgggaattacttgaagaggtgttcggtcggacctacggtcgttcgctgtcgcgtgatcaacggatgtccaaattggcgaatatgaccgtggtcgaggcgctggacgcgggggaggagccacgcgtggtctggaatgtgctctgtgaccaaatggaggttccggactccaagcgttggggccacgatcataacgcgccgcccatgcccgccgtctgacactgcgggattacggagtcgctgaatcgtgaaattggcgatttcggcgtgttgcacgccaaattcgaacaaatgttcgtgtgtgtggttatagttattcacagtgacaagaagccgcatacgtgtgcacagggtgcttgtcatccgccataagccttaccgcagtaggtcttagggaggtcagatggccgagctcgggcaagctggaaccacaatggttggtttggattgcctcacatggcatgtccgtcatacggtggaggcatccgattcgcgcacgacttcgacaaggagaagatcatggcacttgagaccaagccggccaaggacccggcagccgaggacaagcacgagctcgatcccaagcgcaaggcggcgctggacaccgcgctggcgcaggttgagaagagctttggcaaaggttccgcaatgcgactgggcgaccagcccgagcagaacgtcgaggtgattcccaccggttcgttggccctcgatatggcgctcggcatcggcggcctgcccaagggccgcatcgtggagatctacggccccgaatcatccggtaagaccacgctcgcattgcatgtggtggccaatgcccagaagaagggcggcgtggcggcctacatcgatgccgaacacgcactcgacccggcctacgcccgcaagctcggcgtggacaccgactcactcatcgtctcccagccggataacggcgagcaggccctcgaaatcgccgacatgctgattcgctccggtgcacttgacgtcatcgtcatcgactcggtcgccgccctagtgccgaaggccgaaatcgaaggcgaaatgggagacagccatgttggtttgcaggcccgactcatgagtcaggcgctgcgcaagatgaccggcgcgttggctcaggccggcaccaccgccatcttcatcaaccagctgcgtgaaaagatcggcgtgttcttcggcaatcccgaaaccaccaccggcggcaaggccctgaagttctatgcctccgtgcgtctcgacattcgtcgtattcaaaccctgaagaatggcgacgaagcggtgggcaaccgcacgcgcgtcaaggtggtcaagaacaagatggccccgcctttcaagtccgccgaattcgacatgctctacggtgaaggcatttcccgtgagggctcggtaatcgacatggctcagcaggttggcgtggtcaagaagtccggttcgtggttcacctatgagggtgatcagctcggtcagggacgcgagaaggttcgtcagttccttaaggacaacccggccatcaccgaggagattgagaataaggtcaagtccgagttcggtctgatcggttccgccgaccagttcgcggaagatggcgaagccgcagcagcggccgctgtcagcgaggccgccgctgccgacgtggccaaggacagcaaggccgcagcggcgcctgctgccaaaacgacccgtgccaaggccggcgcagctaaggcctgaacatgattagtgccgaagcattcttgcggcgcaatcctgttgcgtcgcaagacatgcccattgccgagcagcgtgttcagtcgaaaccgccgggacgtttttctcgacgggggagagacgctgccgttgtcgaagatcccaatgatttggacgcttgccgcgaggctgcattgcgtttgctggacgcggccccgcgtgcatccggcgcgttgcgcgaacgattgctcagcaaaggctatggcgaggcgattgtggacgaggtcatcgaacggctgattcgcgtgcaactgattgacgaccgcgcttatgccgaatcggccgtacgctattgtgccggtcgcatgatgggtcatcgtggtgcggtcctggaacttgctcgcaaaggcgtggaccgcaaactggctgaacaggtgtgtggcgaagctgagcaaaatggcatctttgaagatgccgcatgggaattgggccgccaaatagcccgcaaaacccatggcctcgatcgtcaggtccgtcagcgtcggttttggtccgcaggcggccgcaaaggacacagccccgaaaccctccgccgagtcgccgccgaattgttggtgtagccaagaaaaaaatgagacctcttataccccgggttctgtcgtgccgtgcgcgaacgcacggcacggatggccatccatctcgacctgacgttgccgccaggctctagcagcctacccgatgacacgggcgagcagcccttaccgccatctgcttggccttgctcccgatgaggcttgccatgcgacctactgttaccagaggtccggtggtctcttacaccgccgtttcacccttacccgtcgaggacgggcggtctgttctctgttgcgctatctctcaggtcaccctgggcggacgttatccgccatcgtgctctatggagcccggaagttcctcagccgatcccaatgaagatcacggccgcggccatcaagaggtctcaagcctgcaattatacataaggtgcggaaaaggcggcatcccgccctgcggtgaggccatgacgttgcccagttatcctgttttctccatagttgggcatagttgggcgattcgtgaacgacgcgccgaatatcggatggggcgtgtcgggcgtgttgtggcgtgtcgcatggagacgaatcaaatctgtaagagcttggtatgtgcgagaaagagcaagaaaacgctgcctatccattgcagtatttaccatgacgaacaaacgagccagcctgataaaccggtatcaaatcttcttataggagactgctgccaaaaccccagtatatacatcgtttcattgcagagaaaagcccgggaataaacatatattctctgggcgagtttccggccgttcacccattgttcgtctacaatgaaacatacccggtcggtgatgatgccgttcggaacacatatagcgggttacaccgcttgagttagaggaggtcaacatggaaatcgtcgttaccggacgccacacgcaggtcaagcaaaggttccgtgatgtggtcgagaccaagatgaatcgtgtgaccgctatcgccccagatgctcagcgcgcgcagatcgtgctgacccatgagggcaacccgcgtcaggccgataccgccaagcgcgtggaaatcaccgttatcgccggacgtaccgtggtgcgtgcggaggcttccagcaccgatgaattcagtgcgctggacatggcgttggataagttgacgctgcgtctgcgtcgtactcgtgaccgtcgcaaggatcaccgtcgtggttacgcaaacccggtcccggtggatctgggtgttatcgccccggagcccgagccggaggtgtcggaggaagagccgaacaacagcccgcaggctgcggtcgcctccgatcttggccctggcgaatccgtggaggtccaggttggggatacgccgattgtcatccgtcgcaagctgcacatcgccgagcctatgagcatcgacgaggcgctgtacgagatggaactgatcggacacgatttcttcctgttcgtgaacaaggagaccggacgcccgtccgtcgtctaccaccgtcacggttggagctacggcgtgttcgaaatcgacactccggagaatgtcaagaaagcctgagggtaagggctgctgacatgatcagctgataccgcatggaccgcttccaatatggaagcggtccattttttcgtaaaaaggtcgaaaaattcgattgctgacggtgtgaggcgctattctggtacgcggacaccaccacttatcagtcaagggagaacccagtggtcgatattgttgacaaagccctgcgaatgggtgaaggccaccagctcaagaagctggagaacgtggctaaggccgtgaacgccctggaggacgagatttccgccctctccgacgaggacctgaaggcccaaaccccgaagttcaagcaggaaatcgaaaacggcaagagtctggacgagatcatgcccgaggcgttcgccaccgtgcgcgaggtctccaagcgcaccctcggccagcgtcacttcgacgtgcagctcatgggcggtgccgccctgcactggggcaacatcgccgaaatgaagaccggtgaaggcaagaccctggtcgccaccctgcctacctacctgaacgctctcgaaggcaagggcgtgcacgtggtcaccgtcaacgactacctcgccagctaccagagcgagctgatgggccgtatctaccgcttcctcggcatgaacgtcggctgcatcatcaccgagcagaagccgccggagcgccgcaagcagtacaacgccgacatcacctacggcaccaacaacgagttcggcttcgactacctgcgtgacaacatggcctgggagaaggccgacctcgtgcaacgcggccaccactacgccatcgtcgatgaggtcgactccatcctcatcgatgaggcccgtaccccgcttatcatctccggcccggccgaaggcgacgtgacccgctggtaccgtcagttcgccaagctggtgctgaagctcacccgcgacgaggactacgacgtcgacgagaagaagaaggtcgtcggcatcctggacccgggcatcaccaaggtcgaggacttcctcggcatcgacaacctgta

SEQ ID NO: 2111 - DNA, 14077 bp, Unknown
  R51_24m  MAG No. k141_3189
gggcaggcaaatgtgacgtgctcgttactttcgtctttttcgtctcctcggtgtggagcctgccgggcgtggacacggagtctgcgctgggcattcggctccgaatgactgaagagtgattatttgcctgcgtctagacaaagtcaatattacaccggcgagtcttttccgaggcctactggcgcaaggctttcccgggcgtttcgccggcttcgcgcgctattggtcgcatatggcggatgtgtggcattatgttcatcaggttgtccgtatcgtggacggattgccgtccacggtgcgaacgctcagccctgaataaccccgtatccgtcatgaacaaacggcttgaagtcatcctcacgtggcccgcccggctcatgccgaatcgaacggtcggtacccagcttcttctcggccctcaaccgcggcacctcggtcaggtcgtacggcgtggtctgatacacccagttgagccagttgcgccacagcaggttggcgtgcgcgcgccaggcgaacagcggctccagctccgaatcatcatgcgggaagtagttccgggggaacggcacgttggtcagccccttggccatgtcgcgctcgtattcctcggcaagcgtgtacttgccatactcccagtggccaagcgcgaacacttcggagaagtcgcgcgtggcgatcaggccgggtccggactggggaccccaggtcaggatctgcagatcatggttggcgcgcacatcatcctcgttcacgccggcaagacgggagtggggctgcagcgcgatctcgtcgaagccgttggtcaggaagcagtattcatcctgcagatattgggggaacactccgaagatcttctcggggtaatcgaccttgcgaatgccgtagcgctcatacagcgcgcccatcgcgccccagcacaggtacatagtggagaacacgtgggtggaggcccagtcgagaatcgtcttgaactcgtcccagtagtccacatcttcgaacggcatatgttctacaggcgcgccggtgaccacaaaaccgtcgtaatagttgtctttgaacgcatcgaggttttcgtagaacttgacgagatgatcggcggaaacgtgcgtggcctcatgcgtggaggtcttcatgaagtcgatttcgacctgcagcggcgacttggaaatcagacgcagcagctgcgtttcagtctcgattttcttaggcatcaagttcaggaccaccagtttgagcgggcggacgcgctgacgctccgcctcgggcttctccagagcgaagatgcgctccgaatcgaggatatctctggccggcaggccactggggatcttgataggcatgttcctattatgtcaatattcgggataacggttcagggcattcctataacggccatttatggcgcgttatcaccccgactccggctccgccccaaacccctcgctgcgtgagccgattcacgttttaaaaccgtgggaaaatgacacgacacgccgatgttgactttctggaatctgcacctattgtagatagagctgtctgagagacaagccgacgcggggtggagcagctcggtagctcgctgggctcataacccagaggtccatggttcaaatccatgccccgctactgcgggcgaggccgtcacgattattcgtgacggcttttcgtttatccgccgtcgtgccctacggggccgcatatccgatcggggcgatgatgtcctgtgaaaaaaacaacatccaagcccgctctgggcagaatcaatcaatctatggctcgaccccctcaaggcggcgggctactcccccaacacgatcggcacgcgccgatgccagatgtccgcattgtcgagggcgcttaagggcgatctagggacgtggagggcgacgacctcgccctgctgatccgatccgccaacggctatctgttccccggccggtggagcggccacgcctcggtcgagaccacgcaacggtacatcgccatgcccgacgaccagctgcgcgccgccgtggaagccacgcgcctcgccgcctaggaggatcacgatgttccgtttccccgacttgattgtggtactaaattgattgtggtactaaattatggtaccataataagcatgatcgaatgcgagccgtcagccttcaagcactggctcacacagccacagatcgactacatattccggcatccggtggccgtgttcgaggtgcagtcgagacacgccggcgacagggtcatggcgatcctcggacacctggacgagttcagggaacgccccgtggagctgctggtatcccagcgcacccgcaaggtgttccacgcgatggactgccgccgcgaatggctctacaagttcgacgactaaaaaacaccaaggaggacatcatgagcaacgaaacagactgggacgagctctcggacgaatacaccgagcacacccccgccatcatcggcgagaccatccgcccgcaaagggcgatcacgatggatgacatcgacgacatcttcgccggccgccccctcgccgaccagccccgccggaaggccgacgtgctctacaaggcatacctcacgcccgacatggacgcacaggtgcgggcacaggccgaacgagagcacatcggcaagagcgctctgatccgcaaggcactggccgcatacctgaccgccaatcaggcacagcccgcgatggcctgacccatatacggcgaaaagcccccgaacctgccgcgtgatacggttcaggttcgggggcttcttgttattcggccttggatgccttggccttgagggcgctggcgccgatgacgacgccgatggtcagggcgacggcgctgatggtcgtcgcggccggatcggcccacgtccagccccatacggggccgagggtctgcacggacggtcacggtacgggacggtggggcgttgctgccggtggcgacgctgccgccgccgttgtaggtgacgacctgaccggggcgatatggatgaaaggcgatcaggcagctacggtgcccagggaagtcggcgatcataaacgtctcgtcgttttcatcgcggaccttcagttgtctaatccacgggaggcgacaggcgtgaagtttctcaacgaagcggaagccgggcacaagtcgtatgtcacaatcgacttcgtgcccagctcccgtccttctgctcagaagcggagtgcggttcaccatccagccgacatcatcggcatcatgccgcagcgggtcaacgtatcggccagcgcatcgtccagtgcttggatcggtcatagcaacgacgccaccgaacgacgatggacagtatggcgcctatcgccagagctgacacggccagaaccgaggcaagcgacacatcgccacccgtgacgggcagtgacgggcgagggttgggcgtggttgcctccgccggcgccggtggcgtctcgggtttctccggttcgcacggtttctccgactcgcatgggggcaacacccgcacacgctcccaggcatcgtcataccggctggacgccggggaaacacggtcatccccctcgaaccgccaaacgaacacgtaccacccatgccgttcggcggtcagatgcatgggagcgccatgcgcgtccaacgccccggcgccgattttgaacgtgccgttcatcgcgggaatctcccaggtggccagcaaccggtggttgtcgtcttccgtggggacctctcccccggatggcttgtacgcctcatcgttggaggggttgtcgggatcgccggaccaccatacgctcaccgtcgcatacggctgatccgccgcgaaaccataggtttcatcacccatgaactggccgtggtccgccgggaaccccgatacggtgatggtgtcgctgagttcggcgccgatatccgccgaatgttcggtaaccgtcgacatgacttcgaccttcccgcgccccacgttgctttccgaagcctccatgaacgggctcacccagtcgccggtaaggtattcctgcgcccgtttgctttgctcgctccgccggaacacccacacccaggtgccaaagccgccggtcttcggagtcagataggcggcgtcaccgtccggcttggccatggcccgcacacgaacccgctgccccacaccggtgaaggacgccttgccataagcactcggctcataacccgaggacgccagccgggcgagaaaagcgtccgcgctctcccgtgcgttcggcgcgatgaccttgcccagatcgtccttgccgagcccgtcgaaatagtatccacgcgcctgcagcttcagaccgggcacccaatgactgccctcgtcccccacgccactggtcacatcatcgaacaccggcgaagccgcatcaagcaccttatcggacacctgcgtggacaccgacggaacgaaatccttgcgcacctggaacgtcgacgacgaaccgccggcggaagccatcgaatcgaaggccagcatgtcctgagtgctgtccatgacgtgcatccgcccatactcgtatgtggtgttcgccgtcacctcgccggcgccggtcgcctcccacgcgatcgaggatccggcgctcgtcgacacccccgagaacgtgttgccgccttggatgaaccgcgccggcccctgcaaggtgacagtgaacggcactcccgcgatcgcgtcaccgtcgcggttcaccactttcaccgagatggaaccgctgcgcaaagcctcggcatcggtgcgttccaccgtcgtgcccgcaggcgtcttgccggccgattgatcccatatccgggccgccttcgccacgatctcgggataccggccttgaatgaccgccatctgtctcgcccactcgtcccgatcgcgcccgaagtgatcctgcacgatgatgccgatcgccgcatgggtggcggcatccgtgtcgcggtaccggtcaaggatccatgccatacgccgggcgttctcatcggaggcaagcaccgtggtggggcctatcacatagtcgctcagtttccccgcttcgatgcagtagtacttgttgcccgaagcgtccagccccgcgacaccgacgtaatattccatatcgttgtatggaaacgtcacgtgatatctttcgtcggcgggcgtcaacgtcgcggcatacgccgtattcgccgagccgaacaccactcccaccattattatcagaccggtcagcatcgctacgatggccatgccccgttgccgccatgtcgttatcatcattcgtcctttcctggtacgttccccgcatactgcactgtgtgcgggtaggccacgatcatggcagattttcattcgctacagccgatttttcggcctatgtggtccgagcttgccgtttgtcggcgagttgtggataactcttccgccgagttatccacctcatgcggttgaccgaacgtttacctgcaagttatccacaatgtgcaacatatgttcaaaagcctctagaatagggccttatggcagcagtacaacatcgcgcgaccacgcgcactagtaataccgataacaacaccacgaagacgaagtcaaagacgacttctgcccgaaagagccccgcaaccaagcgcaagagagtcagcgccgaaacggcacgcgccgcagcagcgctgaaaggcctggctgtcgaagcccccgcaccgtccatcgaagcaaacgagcccggccagttcggccgcatcaatgtcatggacatcactcccgccgaggagcgtggcatcttccccgcccgtgtggaactcggcgaaccgtttgagatgaccgcccaagtgttcatcgaaggccgcaccaaggtgggtgccaccgccatcgtgcgcaacccgcgcggcaaggaaaccatgcgccaggccatgacctgcgtaaatcccggcctcgatcgttggaccgtgatggtcaagtgcggcgagcacagcgatctgaagccttgggaggatggctacgcggccgtcaagcgtcagctcggcgaatggaccgtgaccatcgaaggttgggaagacacgtacgtttcttggctgcatgacgcccgtatcaaggtgcgtgtgatggacgacgtggacaacgcgctcaattccggtgccgagctgctggcccgttgggccgcaaccccggacgccggcctgaccgcacgcgatcgcaagaccttggagaaggccgctgagaccatggccgatcagacgctgagcgccgaggatcgcctcgccgccggcgacaaccctaccatcgccgccctgcacgagactcacccgctgcgcgatggcatctcccccagccagccccagcgtttcaaggtggaacgcccgaagtccagcttcgcggcttggtaccagttcttcccacgttccgaaggcgccaccatcgatccgaacaccggcaagatcattcagggtacgctgaagacctcgatggccggcctcgaacgcgccgctgccgaaggcttcgacatcgtctatctgccgccggtcttcccgattggcgtgaccaaccgcaagggccgcaacaacacgctggtcgccggccccgatgacccgggctcgccgttcggcatcggctccgagcagggcggccacgacaccgtggatccgctgctcggcaccatggacgatttcaaggccctgtgccagcgtgcacatgaactgggtctggaaatcgcgcttgatttcgcactgcagtgctcgcccgatcacccgtgggtcaaggcccacccgaactggttccgtcacaagccagacggctccatcgccttcgccgagaacccgccgaagaagtatcaggacatctacccgatcgacttcaacgccgacatgcccggcatcgaaaaagaagtcgaacgcatcatgaatctgtggatcgaggcgggcgtcaccatcttccgcatcgataacccgcacaccaagccggtgcgtttctggcaggacgtgattgccgccgtgaccaagaagcacccggagatcctgttcctggctgaggcattcacccgcccgggcatgatgcgtgccctgagctacgtgggcttcacccagtcccactgctacttcccgtggcgcaacaccaaggacgaactggaagagtatctgccgatcaccaatggcgacgacggctactaccagcacaacaccttctggcccaccacgccggatattctcaccgcttacgtgcgagacaacggtgtagccggccactgcgtgcgtgcggtgctggcagccatgggctcgccgtcctggggtatctacaacggttacgaactcatcgagaacaagcagcgccccggcttcgaagagcagatcgacaacgagaagtacgaggtcaaggttcgcgattggagcaaggccaagcagtacggcgtggccgagatgctcaccgcgctcaacaagattcgtcgcgcccacccggccgcgttgagctaccacaacctcaccgtgctgcctacgtccgaccagaatattctggctttcgcacgccacacgccggccgaactgaccggcaccggccaagcggacacgctgattgtggtcgtgaacctcgatggacacaacgcacaccagtcgatgattcacctggaactcggcgagctgggtctgcccaccgaccgtccgctcaacgtgcgcgacgagctgaccggccgcgaattccagtggggttgggacaactacgtgtctctggctccttgggcggatgtggcccacatcctgtccgtgcagtgatgcggtagtgcaacggtaatgcaacagtgatgccgttgacgtgcatgggtttatcgtgtgcgtaaaccgctagaaatcctccccttgaggggaggatttcgtctgtttagacatagtgtcggcataatctcagcacggtttcttgagttccgcacctgttttgcaggcgcaaacagggtattgtggtgagacgataacgtaactgtcgattttcaaggagaaatgacatggcagaaaccttcaacgtcgttgtggaaattccgcgcggctccaagaacaagtacgaagtcgatcacgagaccggtcgcgtcttcctggaccgtaccctgttcaccgcaatgggttacccggatgactacggctacatcgacggcaccctgggcgaggacggcgatccgctggacgctctcgtgatgattccgaactccgtgttcccgggctgcgtggtcgagtgccgcgccgtgggcctgtaccacatggtcgacgaggccggcggcgacgacaaggtgctgtgcgtgcccgccgacgttcgtttcgatgacatcaaggacatcgacgacgtcaacgagtaccacaaggccgaaatcaagcacttcttcgagcagtacaaggctctggagccgggcaaggaagtcctgccgggcgactactggaccggtgctgacgccgccgaaaaggaaatcatcgcggcacgcgaacgcctcgccaacgaaggcaagtgattcgattccgaatcgtcggcgggagacctctccggaggcctcccgcctttttgattcgacgtgcatcgcgtgatatagtgctggtgtatttttcagctaggcgtaggcggcgtgtaggaacgctggtcgaggcccatcgcacggtaatccggcgatgaaccttctgtcgcaccatgattccgataatcattcaaatcctgcttatttctgtttccgtagctatggatgcattcgccgtatccattggcaaaggtctgaccgtatcccgcgtacgagtgcaagacgccgcgaaaagcgccctctggctcggcggattccagatgctgttccccattctcggctatttcgcggcatctacattcagcaaatacgtaacccgattcgatcattggatcatcttcgccctgttggtgttcatcggcggcaacatggttcacgaagccttcgaagaagatgaggaaaactccaaggagaccgcccagttcgattggaagcatatgcttcccctggccgtggcctgcagcatcgatgcgttcgccgtgggcgtgagcctgaccttcatgttcaccaaagcccatatggcattcgccatcctcagcatcggtgtggtcaccggactgttctccgctgcgggcctgtacattggccgcgcgttcggctcccgctggcaggagccggcgcagatcgccggcggcgtggtgctgattctacttggcgtcaaagtgctgttggagcatttgggcgttatcgcgttctgatttagtgtcataagccccttcaccagaaagggctattttgtttgatttcaccgttccaatgcccgacgtaggattgggatggaaattcgattatctgagaggcgtatcatgaccgagatcacccaggagggttggaagaacaaagccctgagcatgttgttggcccaactgacgtcctatgtactgctcatcgcagccacggtcattccctcccctggcaccgtccccatcatccctttgattatcgccgctctgacgttggccgcatttgtcgtgttctggccgttccgcggcagcatgctggatcgtatcgtcactttggtgtttggcgcgatttctctgattttcgtcatcgtacctttcccgaccggcaaggttccgccggatcagaccgctgcggatggctcggtacttccttggtattcatgggcactggccatgggcctgctgctggtggtgctggtggtcttctccttcgggcgccagatggctcgtgagaagcgcgaacatctcatccgcgccctgtcccacgccgtgacttcaggtgtggcggctctcgccgtggccggctggtgcttcctgcctgatttgggcgcgatgctcgccaagggcaccgttgcgggaactgttgccctgatcatcctcatcgttttgggactggccttggccgtggcctccacgttgtgggtgcgtgacgccgatccggacccggatatccgctatccgtggatcggtaccggcctgatgccggtaatgctgatgggcgtgaccatcgccgcaaccgcactggtgctcggccgtgtcatcggttgatggacgtctgccgttccatattccgcaaacttgtaacccatgtgtccactacaagcgcgtagaataatgaaaaaccgcgcgaaagcggcataacgccgctgacgactcgtacagccacaccaagcaattgcgtaacacattgcaggataaagggggattagcgtgacggatcttacgttgatgactttcgccagcgaccccgccaccgttttgccatcactcgccctgctttctcatcgcgtccgcgtgctgccgatggatgcagccagcttggtgaagatgccggagaacaccattctgtttctggatgcacgcgatgatctggcgaccgccaaaaccttgtgccgtctcatccacgcttccggcctgtccacgccaatcgtgctggtgctgaccgaaggcggcttcaccgtggtcaactcccagtggggcattgcggatgtggtggtcgccaccgcttccccggctgaagtcgagggccgattgcgattggtctccgagcgcggcaacgctcccgcagccgcagcagccggttctcccgccgaatccaccaccacggtggaagatggccagattcgctccggcgacctcattgtggacaccaacggctataccgcctccctgcatggacgccccatcgatctggcatacaaggagttcgaactcctcaagtacttggtccagcaccccggccgcgtgttcacgcgcgcccagttgctgcaggaagtatggggctacgactactacggtggcactcgtacggtcgacgtgcatatccgtcgtctgcgcgccaagcttggcggcgaatacgaacacctcatcggcaccgtgcgcaacgtgggctaccgattcgacccgccggagacggataaggaaactgccgccgcacagcaggccgccaaagcatcctctgccgccatcggcaccgatgacgatacccccgatctcaacaccgccgcctgacagaccagcagcgctacaaaccatcaatcatcgacattacgccgcttaggtccatacgatgagagaaaccaaatccgcgcgtctcacgcgcatgcatgacgaatacgacattctgcgccaggtgattccggcacccgcttgcgcactgcatttctcgaatccgctcgaattgctgatcgccaccgtgctcagcgcccagaccaccgacaagcgtgtcaacacggtcaccccggaactgttcgccacctaccccaccgcccgtgacttggcggccgcgaacccggcccaagtcgaagacatcattcatccgctggggttctaccgttcgaaaacccagcatctcatcggactggccacggcactggacgaacggttcggcggcgtggtgccgcgcacgatggatgaactgaccagcttgccgggggtcggccgcaaaaccgcgaacgtcgtgctcggcaacgcgttcgatatccccggattcccggtcgatacgcatgtgatgcgcgtaaccggacgactgcgttggcggtcggattggcggtccgcacaccctgatcccgtgaaaatcgagaaggaaatcaccgcctgttttccgcccgaagagtggacgaatctcagccaccgactgattctgttcggccgggccacctgccacgcacgtacccccgactgcgccaactgcccgctgtccgacacctgccctagctatgcgccgcccgccggcaagagcacgtccaagcgctaactcatacctcatcatggtgaattgcggattctaggctgaatccaccgctagactgaaaaccatgcagcacagcaagcggaacaatacatggtccaagtgggggatttttctcggagtcgccgtggcactcggcgcactcgtggttgcgggatggacgttcatgcaaaaccggttccagccgggatcatccctcgatgccgatgtgaccattggcatcgacgatatgccgcaatccttggatattcggtccgattcctctgcggcagccgagcgcctgctcgtcgacaatgtgtatgagacattagtgaccgtcgatcaagacaacaagattcagccgggactggcgacaagctggaagacttccgatgacggactgaccgtcaccctgacactgcaatcgggcgtcaccttctcgaacggtcatacgttggacgcctcggacgccgtgtggtcgttgcaacagaacgtgaccaacaaggtggcggacgtcgacgaattgggcgatctgacgtcggtcgccaatccgaacgccaccacggtggtcattacgcttgccaagcccaatccgacgctgctgcgagcgctgtccggcaaactcggcattgtctacgattccgagtcgtccagtgccgattatcaacgcaaagccataggttccggaccattcaccgtggccgatttccagcctggccattccctgaagctggcgcgcagcgatacctaccatggcaccaaagcggccagcaatatcgttgaatttatgcaatactccgacgccgatgcgctcagcaaggccctgaccgacggcagtctcgatatggcggcaccggtttcggcttcgacggccaccggtttgaacggcaaggatggcttgaccgtcaaggagggggccactacggataaggtgctgctggcctacaacaacggcatcgattcgctgctctccgacgaacaggcgcgtaaagccttccgctatcaaatcgacgcagccggcatcgcctccgcccaacccgacgcagccggagcattgggcggccccatcagcccgctggaacccggatacgaagatttgaccggactgtatccgcatgacgaaaaccaagctgggcagatgttctcctacttcggtgcgcaatatctgactacggtgaatctggtggttcccgaagaataccggtcgttggccgaaaccatcaagcagcagatcgagcggcagccgcgccccacggtgaaccttgaagtgctctccgatgaggattatgccaaacgaatcaaggacggcaaatgggaactgaccgtgatgagcatggacggcacggatgatgccggcatattcgccgaccccgattccatgttccattacgaccataccgaagcgcaacaggcctatgcggatgctcgcgccgccactaatgacgccgattatgaggcacgaatgaaggcgtacgcccggctgatcagcgaggatgcggccagtgattggctgtatacccgcaaatgcttcactgtggcgtccaccaaggtctccggctacccgacctcgatgatcaatcgtcgcatgccgctggccgggttgacggtgaagtaggcaaccttcagtcacggacgggctacgcccgatagtccttggctcactatcgttcgatcgttcgtatctcgcctgcgaacagcctactgggctgtttactgtacagttcggcttgtcatgcaacgtgcataaactttggctttatgactgaaggcaaatccatcatcaacgccaacctcaccccgctgcccgacaaggtcggtgtggacggacttgaggacaagtggcgcgccgtctgggatgaagacggcacctacaaattccgcaatacccgcgaccgcaaggccgtctactccatcgacaccccgccgcccaccgtctccggttcgctgcacgtgggtcacgtgttctcttacacgcacaccgatgtgattgcgcgttacaagcgcatgcgcggctacgacgtgttctacccgatgggttgggatgacaacggcctgcctaccgagcgccgtgtgcagaactactatggcgtgcgcgtggacgtgtctctgccttacgacccggacttcaagccgccgttcgagggcactgatggcaagaagatcgacgccaaggatcaggtgccgatttcccgcaagaacttcatcgagctgtgcgagcgtctgactgctcaggatgagaagctgtttgaggccctgtggcgcaagctgggcctgtccatcgactggtcgcagacctaccacaccatcggccagcacccgcggcgcgtggctcagaaggccttcctgcgcaaccttgcccgcggcgaggcctaccagcaggacgccccc

SEQ ID NO: 2112 - DNA, 21713 bp, Unknown
  R51_24m  MAG No. k141_3309
gttgaagtatgccgggcaggtgatgacggcgtcggtgacgggctcgccgaggtatgcctcggcgtccctcttcagcttcatcaggatctgcgcggaaatctcctgcggggtccacttcttgccgtcgatgtcgacggtccagtcggtgcccatgtggcgcttgacggaagaaatagtgcggtcaacgttggtcacggcctgacgcttggccacttcgccgacaaggatctcgccggacttggagaaggccaccacggacggcgtggtgcgcgcgccttcagcgttgacgataacggtgggctcgccaccttcaagagttgcgatgcaggaattcgtggttcccagatcgataccaactgcgcgtgccataatgtgtgctccttaattactcgtttgttcttacgttctttgcccaagttccgattggtcgtctcttggaccttccaaacttgagcctacatcactcaacttccatttggcaagttctattcccaatttcaacacaaaaagttgagtatgtttggctcaagtttttttgggagtgactgacggcgatgacggagtggtgcgtctggagccaaaatccacttatacagaaaactgcaaggggtgactggagcgggacggagcggctagtgtatggagtcatgtcggacgcgactcaatcagcgcatgaaccaccagcgactttccgcatcggcattctggataacgacgcctgtgcgctggattgcatcgcgcggctggcgacttcgacccatatccatggccgcatcgttgacgtatggagcactacttccccggccgtggcgattttggaatgccaatccggcagtcgtcataccgacgtgctgctgattgatatggcgcttgatggcgtcaccgggccacagatcgccgccgaaatccaccggcgagcgcccggcatcgtgctgatcgggcttaccgtcggccttgccttcgggcttaccgtcggccttgccttcgggcttgccgtcgggtttgttaccgggcgccccatcagccttaccatcagccttgttaccgggcgcgccatcggccttgccatcagacttgccagcggcggcgcgcaattgcagcgcatggggtgtgtcggcgacgttattgtcgctggggcatcgatgcgctgaataactcagacacagtgtttgtcgccgattttctgcgggaattgtttggcaatatcgccaggtatgccgatccgacgcagcgttacgtggtgctggtttccgccgctcaggaccgcgtcaccattgatgtgacggaccgcccacgtcaaggtggcacgacgcttgaggggcggcattccgggcttgcgtactatcgggagcgtgtgctgcatgcgcacggggattgggatgtacgggagaaacgcgggcagtgggtactgcatgcttcagtgccggtcgataacgctggctaatcgacaacaccggctcatcaataacgccggctaattgataccgccaatcactcgataacgccagccagtcaataacgccggtccccggccgcgccggcgtgggtcgcgagcgaggccgccatcgcgaccgcgcagaccgcggcggccaccgcgacgcccttgtgctgtttcaccttgtgcatgaaaggttcctttccactgaccgcacggtgagtgcaatcgcgaaggccatcccacgcactgcacccggtatgccacgctcttcggcaaccatgccaaacttatcgccgcataccggggcgcacccggatgttgcagaaaactgcaaccgggctcagctgcgcagcaaaatttcttcgagcgcgccggccaccgcatcgggcatgtcggtgatccagaaatcgttggcgtagcgcggaccacggttcatggtgcgcagggcgccgatcgcgccgatgccgagcttgtggaccgcctgcagcgcgagctccttggtgcggtagagcatctgggcgtgcagcagtaggtccatcgcgtccgattcgatcggattgtcggcgatgcgcagaccgccgggaatctcgatgcgcagactggcagccgagctgataccgacgacggacacggtcaggctcatggtcgcctcgtcgtacgccaccgttgcctcgaccggagcctcgccggaccatgcacgcacgccgctggccgcatcgaccggcgcgacgccgcggaacacgaccgtccagtcgcgcgactcgggtacggcggacgtatcgccggtaaccggcgcgacggtgaaggcgctgggcgacgcatcggccccgccccacgtgaacgctatcgcggtgtcggcgctggtggcgccccacgtgccgcgatcctcgcgcatgacgaacgagccgtcggcaccagggaacaccagcacgcgcagggcctgcgggttggcgatagagttgatcgcttcgccggattccgcgacgtcctgcaacggcacgatcgcgccggccttggcgaacaccggcgtgcggtcgagcgagcgccagacctccagtcggcggccggcggcgtcggatgagacgtatcggcggccgtcgaagaagtcgaaccactccccctgcggcagccaggcgtcggcgcggccgcggcaggcggcggcatcgcccggggagacgattggcgcgaccacaagctcggtgccgaagcggaactcgtccggcacctcgtaggcgtccggtgtatccgggttctgccagtacatcggctcgaccagcggacggccggcttcggcggcacggtagttcatggtgtacaagtacggcatcatcgcgtggcgcagacgcagcgcgtccaccatcgcggcgctcacgtcacggttgaagttccacggctccttgccggagaacggcgagctggacgaatgcagtcggttgatcgggctgaacgcaccgagctggtaccagcgggcctccagctcttcgttgcggtagccgaacatgtggccgccgatgtcgtggctccaccagccatacccgatgttggaagcggtggcggtgaactgcggctggaaggcgagcgattcccaggtcacgatcgtgtctccggagaagccgaccgggtagcggtgggagccagggccggcgtaccgggagaaggtgagcggccagttgccgccgcgccctgagtcgaggtagtgcatgtggttgagcatccacagcgggtcgagacccttctggcgggtcacgccgccctgctgccagtccagccaccagaagtcgacgccttcggcctccatgcggtggtgcatgtcgaaataggcgtccacgaagtccgggctggtgaggtcgaattccacgttctcctcggtggccgggtcgatgccgacgcgcttggcaacttcggggtaggcgtcctcgaacgcgcgcacgccgtcgcgcgggtggacgttcagtgtggtgcgcaggccgcgccggtgcaggtcggcgaggaaggccggcgggtcggggaacagttcgcggttccacgagtagccggtccagccggaaccgtacttcgggtccacgtcgtccacgcgatgccagtccatgtcgatcacggaggtggtgaacgggatgccctcgcgcttgaagcggtccatcagggccagatagccgtcctgcgtgtaccggtagtagcggctccaccagttgcccatggcgaagcgcggcaggagcggcgtggggccggtcaggcgatagaagtcgcgtacggcctcgatgtagcggtggccatagccgaagaagtacaagtccgtttcggcggtggcgcgcggggatacccaggtgccgaacgggttcgccttgccgttcactgtgtcggtttcgatgatgatgttggcggcggaatcgtcgatgacggcccagccgtcgcgcgagatcacgccgtcgccgagctcgatggcgccgtccgcctcgtccagcgtgcgggcggtgcctttgaggttgccgcgctgggcgtcgccgtaatgccaggtgttgaactgggtgtcggccacgcctttgacgaccacgctcaggccttccttgctgaacggctgctggtcgtagacgatggtcagggccgctgtgtcgatgatgacgcggccgtcacgttcggtgacggcgtatgacaccacctccccgaaatcgcggttgagcaccgtctgcgtgggacgatcctcgaacgtgccgtcatcggaccattcgaagcgtacaagcgaatcggtgatcagcccgatgcgccagcaatcgccggccaccacgttctccccgcgcatgacgggacgggcatccactgtgaaatctttcggatcaggcgactttgccatggttctcccccttcgcgagaaagtgcgttgtgctgtattcaactatggtgcatggtatgtggttgcggcctcccggtcagggtgggaagccgcaacgcgtgcccggccggcagccggctcaggccgattcagaccggggccgtctcaggccgatggccaaccggcccggcaggccgtctcaggctgctccggctacttgccggagccggtggcgatgccggcgatgaactgcttctggaagatcatgtagaccacgatcaccgggacgatcgccagcgaggtcgcggcgaacaggccgccgtaatcagtgccgtactggccgttgaacgccttcagtccgacggcgagcagctgcttgttctcgtcggtgaccatcaggaacggccacaggtagtcctcccagttccacaggaacgtaaagatggcgagcgcggcgatggtgttgtggctcatcggcaggatgatgctgtggaaaatgcgcgtgtcggatgcaccgtcgagtttggccgcctctatcagctcgtcggagatgccgccgatggactggcggaacaggaagatgccgaaggcgctgatcaggccggggatcacaagcgatgagtatgtatcctgcagaccccagttggtgaacatctcatactgcgggatgatggtcacggcccacgggatcatcatggtgctcatcaccacgccgaacagcaggtcgcggccgcggaaatgcatcttggagaacacgaatccgagcacggcgctggtgtagatcgcgatgacggttttgagaccggccacgaacagcgagttggcaaacagtcgcagaaagttgaatttctcctggatgttcacgtagttctcgacgctggacggcgtggggaacaggccgccggtcaccttgacgatctcgctgttcggggcgaacgacgagatcagcatccagatgaacgggacgacggtgatgaaggcgacgacgaaaagtagtgcggtcaggatccaaccgacgatgttgcgtttcttgttcatgacagatccgtatctcccgaaaccttgaacatgatgagcgtcagtacgccggtgaacaggaagagcacaacggcctgcgcggaggcgacgccgaagttgtacttctggaacgcctgatcgaagatgaggtagctgatggtgtaggtggaggtgcccgggccgccctcggtcatgacgaggatctgcacgtatgcctgcaggtagctgatcagcgaggtgatgacgatgaacagcgtgctggatttgagcagcggcagcgtgatcttgaagaaggtctgcacgctgttcgcaccgtcgatggacgcggcctcgtacacgtcgcgcggcaggttcatgatgccggcgagatagaggacggtcgcgtagccgaaatccttccagatcgtcatgatgatgatcgcgggcatggcccatttggtgtcgtgcagccagttgatgtcaaggccggtgacacggtcgatcatgccgaactgcgggtcgaacatccacatccacacgaacgaaacggcgacgagcggcgtgatggtcggcatgtagaacagtccccgcagggtgtccttgcacttgacgagcttggagctgagcaacagcgcgagaccgaggccaagcacgatgcggaagacggtggagacgcccgcgaacaccacggtgttcagcatggaggtccagaacagcttgtcggtgaggatctgcgcgaagttggcgagtccgacccattcgtatgtgccgaccagcgggttccagtcatggaggctgccggcgaacgccttgaatatcgggtaggcgaggaagacggcgaaatacaccaccaggaacgtgactgcgatgttgcgtagggtaaaaatgcggctgagcgcggatccggcggcgttcttgcttttcatcggatctcgcctcgcttggattgcatcatggactggctcatatctaatgctcctgtatcgaaagaggttggtggccgcagcagggaggaggaaaggaaacgccctgccgcggcccggggtccggccaatgccggccggttgtcagggaagaggacgaacggcccggcttggcctacttgtgttcgtcgtagaaggcgtacttgctttccatcgactggaagtcggagctcttcatgtcggtgtccatctggctttgcgcttccttgagcgccttatcgatgctcatgccgttctggaacacgttctcgaatgcggccttgccgctggtttcaactgtggcgggcgccgggccgggccagatcaggcggtcgacgcgcggctggagagcggccatgatcggattggagaggatgtcctcatccttctgcaggctcaccttcgcggggaaggagttgagttcggccgccgccacacgaatgtagtcgtcgttggcgaggatgaacttgatgaagtcctgcgcgacggcctgctgttccttggtctggttgccattgacgcccggcgtggattcgccgttgtagcggtcatatgcgaacggggtgtccttggtgaaggtcggggtggcgaagacgccgtagtcgatgtccgggtacttctccttgagcgtgcctcccatatggccccaggcgtagatcatcgcagtctgcccgttgccgaagctctgggtgtagtcgttgccgaaatcgacggatccgaccttgtacttgttgtacaggtcctgcaggaactgcatgttctccttggtcgtcgcgttgtcgtagttggccttcttgccgtcggcgctgaacagcagttcgcccttctggtagttgaggccctggtagatggcggagtaggcgtcgccgttgaagttgaagccggcctgggtcatcttgccgccgtcggtcttggtgagcttctgggcgaccttgatgaactcgtcccacgtggtcgggatgtcgtcgtcggtcaggccggcctcggaccacagggtcttgttgtaatagatgctgccggtactgatcacggagtcgatgtacttgaccttgccgttgtcgtcctcgtgcacgtcggcggtagagtagtcggcctccaacgcggccgtgtcgatgtcgtagttggccgcgtacgggcggatcagggagtcacaggagttgtggacattgaacagcgcgggcccgtttttgcccttgagcgccagcggaagcttggtccagtagtcgtcccacgcgacgttgacgggcttgatggtcacattcgggtagatctcctgatacttctcgatcatcgcgtagaccgggtcgacgcccttgctgccccagctccagtactcgagctggatcggcttgccgttgttgacaaggtggttcggatcgtactgaatggtctgccccattacatcaagacccttgtcggcgttggtgtcggtcgtgccagtgccggtgttgccgctgccgcacgccgcgagagataaaatgctcacggttgcaatcgctgcggagcatactttcttaaggttcatggttcttcctacttccttgtagatccttgaggacaagcaacagaatacgatcgtcgagcctgtttgacaagtcggttgcccaccatctacaacccattacatttgcaaccagttacattgcaacaatgtgagcgtgcacataggttttttcttcggcgtgtcgcaaatgtaaaccattacatattcagtttccattttgccctgcaatgccctacaatgttgcatatatgaatccgccccgacacccgccccttcgagtggcggaacgatcgggtcatacaatgagccgcatccacatcggcaacgtaccgggcagcagacgggaggaacgcatgaaagccagcatcgaagacgtggcccgcaaggcgggcgtatccacagccactgtgtcccgtgcattctccaaacccgagatggtgtcggaaaagacccgcaccaaggtcatgctcgcggcggaccagctcgacttctcggtctcacgcacggccggaatcctcaaatccgggcgatcctaccgcgtggcactgctggtgggcagcggcaaaatagaatggttcacggcgcggcttatcgaggggctcaacgaggtgctccgcaacgccggctacgatctggtcgtctatccgatcggcgacgaggacgcgcgcaggacgttcttcgacgagctgccggtgcgcggcaacgcggacgccgtgatcgtctcgtcgttcgcgatcagccattcggagatcaaacggctcaacacgacgcgcatcccgctgatcggcatcaacatcacgtccagcgatttcaccgcgtcggccagcatcgacgaccgggtcggcatcaagctgatcgtccgccatctcgcggcgctcagccaccgccgcatcatgtacatgtacgaggagttcacgtccacgctcgggttcagttcgcgcaaccgcatctctggcttccgcgatgcggtcgatgagctggacggtgtcgacggtcgcatcgtcgccgtcgaccccggcgacgacatcgccaacgccgcactctccgagctgctcgccagtgacaatccccccaccgcaatctgctttcatcaggattcccaagcgatctcgttgctgttcaagttgcagcgcaacggcatcgcggtccctgacgacgtgtcgatcaccgggttcgacaacagtacgttctccagcgaagcagggctgaccacggtgcggcaaaagccctacgacatggccgtctgcgcggcgaagaaggctctcgacctcatcgagggacgccagccggaaatcccccacgagaccttccccgtccagctgctggtgcgatcgaccaccgccccgccgcgctcctgacaccgccccgcaccccctctcagggaatcggaaggcacggcatcgcaacgacaaaaagtcttccgtcgattcccgatgaggggcccggcggaagacttagcatgcccgtcagccggcaaccagccgatggcaggcataggcatcagggccttggtcagtggcggttccgcatgaagcgcagcgccaccgcgccgcggatgcgcggctgagtggggccggatcagtcgttattcgggccgctgttgtcggactgggctttgccgttcctgcgagctatcgccatgaacgtgacgcaggcgatgacgggcaggaggatggcggcgagcgttgcggcgcggcggatggcatcggacgttgcctttccggacttggcgtcgcctgacttggcggacgctgcggaatcggcggacttggcggcggtgtcatcgcccttatgcggtgtttcgccggtgaaccaggcggggtcggacggatcgtatttccgggtgccggtccagtttgcgggcgtcgcgccggcgtatagggcgacggccgagcccttggccacggtggcggtgaaggtgccgtcagtcgggcaggtcatgtccggcacggaggtgcggggcgccgggagcgccgtcgtcgacgctggcgtagtagtagccggagaagatgtgcggctggccgtaatcgtaggcgagcatgaaggcgttggcgagcaggtagctggtgccgtcacgggtggtgagcgaggagccgttgcgctcggtgtcccagttggtcacccatacggccgccttatcggaatctacccaagtcggtccgccgatggcgtccaggccgcccgccgcgacggtgatgctgccgccgaacacggcaggcaggcgtttgttataagtggattcggagactttgccggtggcgaggtagttgactggctggatcgacgccacttcgctgccgttcccgatgacctcctgttcgaagaagatgccgtccacgtcccggccggtctttgcggcgagcttggctttgatggcggccacgtcttgcgcggcgatgtgcttgaccgcgtccacgcggaatccgtagacgcccatgtccagcagcgtggccagatagtcggcgatggtgtcttgcacatggtcctggctggtgtcgaggtcttgcaggccgctcaggcggcagttctgcacttcgtcggcgttggaatagtcggcgatgttcttggcgcaggtgtggaagtcgcccttggtgtatccgacggcggggaaattgccggcggagtcgtaggtgttgccggcggtgcccgagcccgacgtgacgtggcgttgcgagaccgggttcaacccgagtctgtccagaccgagcagcacccggccgtcgaacgcgctagactcggaaccaggccgcgcggttttcttcactttttcgatcacacaccgaataaaaccgcacggcccatacacacccaaatgcgaagggccagtaatatcgccaggcactggggactggcagcactccacccgacgattcatgcgaggaggacacatgggcaaggcaggcatctatcaggtggcgaaggcggccggcgtatccatttccacggtgtcgcgcgcgttcacccgccccgagctcgtctcccggaagacgcggcacaaggtgctggaagtggccgacaagctcgatttcaacatctcccgctccgccacggcactgaagtccggccagacctaccgcgtggcgatgctgatgaacgaggagatcaccagctggttcaacacccagacgttcgccggcatcgaatcggtgatgcacccggccggctatgacatctccctgttccagcacatcgacaccgcggccaaccgacatgagttcttcaccgagctgcccatccggcgcaatgtggacgccgtgttcgtggcctcgtttgccatcgacccgcacgaggtggagcagctgcagcgcatccatgtgccgatcatcggcatcaatacgccgtcttccgagggctttgacgccaccatcagcatcgacgacgaaaaaggcatgtacacggccacgcagcatctcatcaacctcgggcaccggcacatcgtctacccctgctccgaggcggccgggctcgattcctcgatcgacgcgcgcgcccgcggcttcatccgcgcctgcgaggacgccgaaggccgccacgacatcaactggcaggtgctttcggtgccgcgcggcccggccttcgccgactccgcgctgtccgcgctgctggcgttggacaagttcccggacgccatctgctgccagatggatatgatggcgattccgctggtgctcaagctggagcgatacgggcaccgcacaccgcgcgactactcgatcgtcggctttgacgacagcccgtacgccgacaccatcaacctgaccaccatgaggcaggacccgtatgcgatgggacgcacggcggccgaaaaagcgctcaaactcatcgccggcgagacgccggacaccccgcatgaggtgatcgaggcgcaactcgtgccacgcagcacggatatgccgtttggggagatggcgtaggggaggaatcgaccaacggaatcggccaagggccgatgctgtatcttccgcgggccgccggcccgttcagagctctccctccggccgattccgagactacgccgccaccaacgcgccaaacaccagcagtaccgggtagatcacatagaacgcccacttggtccatggttgcttgaaaccctgctcgccgttgcggtagtgcaggaaggccacgccgatggcgggcgtgatgcacatcaccgcgcccaacagcccggcggtgaacatcatcgaattctcgcgtgcgttgaggaagtagaacaccatcacgaacgacagcgtgagcacgcccgtgtacagcacgcgctgatctacgcccacatgcagcagcaaatcccacagcaggcccgcgataatgaccagcacagtcagcgtccaacggaaggcgccgtggtatttttttgccagccagtccaccagcgccagcacgaccagggcgatgagcagtccgaacaccgggttctgcacgctcaggctgaagggctcgccggtcataatcaggtcgtatggcacctcgctgatcacggccacgacgagcagtcgcagcccgtacgcccatgcgttatgcgtatgacggtagccgtcgaacaacagccacgaataaatcggcacggcgatccaggaagccgccgcgcacagtacgatcgcggtcagcgctgtcatgtcttggctcgggtcgcccaccagcgcaggcagtatcgcgacgctcgccacgttgagcgccatgaatatcacgccaatcaccttgagacggaacacggacagtcccttgcgacggcgctgctcgccgcgccgcgtcttctccatttcgacttcgttcatgtgttcctccgttgttgtgatcatttgggctgtgggagttgtgtggcgccccggcggccactcccagtcggctttgccgacagcccccgccagcgggggctttattaggctatgtcaggtattgcaatagttcagcataatcggggccggccagcgacaaggcggcatgcgcactgacctgcgagtcgctggcgggcgagatctcggtgcgcagatagacgccggcgatgcccgccgacgcggcgcccaggatatccgcacgttcgtcgttgccgaccatgagcacgcggtcaggcgtcagatgctcggtctcaagcgcccgacgaaagattgcgggtgatggtttgcgcacgcccacctcactggaaatgacgatgcgatcgaacgcccgatccaacccaagcgcggccagttccggccgcgtatagcaggattgcgcgttgctgacaagcacaacgcgctttcctgcgactcgcaatcgcgccagcagttccggcgcgcccggatacacccgcagcaggctggtactcgcctgccgaaacgtccatgccaacgatcgtgccatagcgtcgtcattccggcactcccccgccaacgccgcgtataccggcagcaaatcgggctcggcccactcgccgtgcgcggcgacggcggcatcgcgaatcggctgtgccaaggtttcgaatcgccgctggagctcggcgttgccggcgtacgtcacgccgcagtcagacaaggccgaacgcaacgcatcccaggcggcagccgatgtctcatcggtacgaatatccaccagagtgccgtatagatcgaaaaacaccgcatccacggtcggtacggtgtcggcctcatcgaccaccctcagtccggcgttgccggacagctcccgccggagggagcgggagtcgggagcgaaacggtcagtcatcacgccacctttccggggtatgcggtgtgcgccgccggcgggagcgagcatcgccgtcagccacgattgcggcgccagacggtgaaggtgtacgggggcaggggcagcagtcgctgttccaccgcgcccggcatatcgctgccggagcaatagatgcactgccattcgttgggcgcgattttcgagacctcgccgtacgggccgggtatctccagatcggtggtgagctgggtctgcgggctgccggtaggattgatggccacgcaatcgtcgccgacgcggaacaccacggtctcgtcgtcgcgcggcacgatcatgcgagcgccgccgaagtaggccgggttgccgcgccgcagttggatcagcgcggcgtaatggtcgaccagatcgcccatgcgttgcgcccggcgccaatccagctggttcaacgcggccggactgctgaacgaatcggagacgccgtgtttggtgcgggcgaattcctcgccggacagcatgaacggcacgccggcggaggcgaatacgatgccggccgccagtcggttggcgcgcatcaggtcctcgcacgcctcgccttcggctgaatagtccgtatcggtggggatgcggcgcatggccgcgcacagcttgtcccacaatgtcaggtcgtcgtgggcggaaacgtattggatgacctgccccacgctggcggtctcgcgcaaggtgccgcgccagccgtcttcggcatgacggatgtcgtcagcgtaatcggcggccgcaccggtcaggtagccgggcacccactggtagaacacatggccgcgcaccgcgtcacgggtggagtcgcagaacgcgccgatgcgtgggctcaggtagggcatgccgcgcttgtcggccagaatcgcgccgggcaacagcgcggtttcgcgggccgcccacggttcgccgtgcatggagatcgtggcaccgccaggcagctggtcgagtgcggtgcgcacggcgttcatcgtgtccacgtcgatcaggcccatgaggtcgaatcggaagccgtcgatatggtattcgcgcgcccagtagaccacggaatcgacgatgtacttgcgcatcatcgggtgttcggtggccacgtcgttggtgcaggccgagccgtcggcgaaggtgccgtcggcgcggcggcgcagcgcgtagccgggaatcatacgttcgaaccagttgtcggtggagaacatgtggttgtagaccacgtccatgatcaccttgatgccggcattatgcagcgactggatcatctgtttgcattcgcggatgcgtacggcgccgtcatacggattggtgctgtacgagccttcgggaacgttgtagttgagcggatcgtagccccagttgaagccgcgggcggggtcggtgcgtgggatcgattcgtcgatggaaccgtagtcgtagaacggcatgagctgcacggcggtgatgccgagacgtttgaggtaggccatgcaggtggggaactcgccggcaccgtccacgctggtgtccgggtgggtgaaggccagataggtgccgcgatgctcttccggaatgccgctgtgttcgtcgttgctgaagtcgccgatgtgggtttcccaaatcaccaggtcgcggctggggatgtgcgggcggcggtcctcggcccagcctgccgggttggtttggtcgaggtcgacgaccatgctgcgccggccgttcacgccggccgcgcgggcccacgggtcggcggtgcgattgacggtgccgtccgcgaatcggaccagatagtcgtagtaggtgccgtggccgatgccgtcgcagcgcaccagccaggtgccgtccgcgcccggagtgaggtcggcctgcgtttcaggctcgggagccgtctccggcgatccagccgtgaacaggcgcagggtgacaccgctggccgtgggtgcccagacgcggaaggtggtgcctttggcatccgggaacgcaccgaggtcgtcatcctgatagacgggataatcggggcagggcatcgccagttcggctggcgtccaatcggctaccgccaacgcggagatctgctgttccatgggggttctcctttgttcaaatcttgcctgcgcgacagctcgcctgcggcccctgcaattacgggctcgcctgcggcgaggctcagtatcaccttcgttcggctcccgcctcactcaggcggagcctcggggaagcccactgggcttccccgcaagggcagacgcgccagcgtcagcccttgacagctccgcccatcgactcctggtagaagcgctgcatgacgatgaacaggatggcaatcgggactgagatgattaccgcggcggcggcgaagcgggcgaaccaatcgttgagatactcacggctgagcatctggtagaggccgagcgccacggtgtagttatcctgtgtgcgggcgatggccttggccatcacgaagtcgagccacgggcccaagaacgaggtgagggcctgatagacgagcattggcttgcacaccgggatgatgatcttggtgaacacctgccagcgagtgcatccgtcaaggtaggcggcctcatcaagcgacatcggaatcgtgtccatgtagcccttcatcacgtagaagcccgcgccggcaccagccgagtagacgagaatcaacgccacggtgacgcccacgccctgggtcaggcccaacgacttcagaatgaagtagatcactaccacggacatgatgcccgggaacatgcccagcaccagcacaatgttcatgaacgacttgcggaaacggaagcgcatgcggctcatgcagaacgccacgcacagtacgaagaacacgctgatcagacacaccacgatggaaatcaccagcgtatgcatgaacatgcgcgggaagttcaggatgtgggtgtcggtgaatagcttggtgtaattctccaacgtgtattcggtggggaaaaaggtctcgttgtaggggccgggattcttgttgaagctctccagcaccacccacacaatcggaatcacccagatcaccgcaagcacggcgagcaacagatggcttaggacatcgcccacgatgcggcgcttgcgctggtcatgccagaacggattgctggcggacttaggggttgcgatgtcggtacgaggggtcgcggtctgcgcgttgctgctcatcggaatcctccttcattcttgtaggaagcgctgctgcggtaggtaatcagggagaccactgccaaggtgacgaacgtgaagatgccgatgacggcacccaggttgtagtctccacggtccaccgtgagcttgtacagccaggtgataagcaggtcggtcttgccggccgtatcgcccaccggggtcggattgccgccggacagcaggtagatgacgttgaagttgttcacattgccggtgaacgtggtaatcaggtacggggtgagcacgaagaccaggtagggcatcgtgatgcgggtgaaggtctgccaccagttcgcgccgtcgatggtggcggcttcgtactgttcggcggggatgttctgcaggatgccggtgatctgcatgatggtgaacgggatgccgatccacaggttgacgacgatcacggtcacgcgggcccacatggtgtcggtgaagaacggcagcgggctgtcgacccacccccaagacatcagcaggcggttgatggcaccttccggctggagcatctggttaatgaccagcagcgagacgaactgcggcacggcgattgacagcgagaacgccgcacgccagaagcccttgagtcgggtagtacgacgattgatgatcatcgcgaggaacaggcctaggaagaagttcaggaacgtcgcgaagaacgcccaaatcagggtccaggccaacacactgccaaactgggcggcattaatctcgccggtggcgctgaacagctgggtgaagttcttgaagccgacccagtcgaacagcagcacgtgatcgggatcgtagttggtgaacgcgatgcacatcataatcagcgtcggcaggacggtgaatacaaggatgccggccaccggcaacgccatgaacatgacctgcgcgttgcgatcggtgatgttcttcaggtcttcgatgaaggtcggcgccttgccggtctctcgggcgagcacctgtgccttgtacgcgctgcgcacggcatacgaccagaacacaaggaacagtacggtgatgaacacggcggccacaccatagaccatcagcagcaccgaattgtcaccggcatcgtaatgccaataaccatcgatcttctgtttggtctgggtgcgggagccgagcgagcccagcattgcgagcgccggcccgccagccgtcaccatgtaggcgatatacgccacttcgatggccaggaacaccagtcccttggccacctgcttacgggccaggttgcctgcgcccaataccaggaacgacagtcgggtcagggcatcgccttgggtggccgccgcgcgcaacgtgtagtgcgacggaggaatgtagtccgccttgcggcggcgtggtgcgcgtttcgctgcgcgcggcatggctgtggtttccatgattggtctttcttctcgcgttctacaggaggctctggtatgaggccatccactgctcggtgagtttggccgagttggcgtgggtgacttccttgttgtagatggaattgccgaagttctcgcacggtacccagaagttgttcatctcggcgatggacggctgcaccacggacgtctcggcgatggtgtccatctgggcctgggccacggcgtctttctcgatggccggatcggaggcaagctcgctgtccgagggaatcaccgaacgcatcttatagtgcttgcgctgtgattcggtgccggacaggaatgcggcgaactggtcggcggccaccggatgcttggtgtacgggttccagccgtagatggtggagccggcgaaggccttcatctgcacttgcttgccgttgagcgtgaagctgggcagcttggccacgccccagtcgtcgccgagattctcacggaccgtggcggcgtcccagttgccggtgaagaccacgtcgaccttgccgcttttcagcccggccaggccggagccgttcttgtcgttgacgaagttcgggttgttgcgcaagtcgacgaggtaatcggtgacggcggcgccgattgcaccgccgaactgcacgcccgacttggcgtcggtgccgtctttgccgaacagtgtgccgccggcaccgatatagaaggcgggcagataccaggagttggtcagcgggaatgagaccttgcctttggcgagcatggcgtccagcgaggtgatgtcttgctcggtgaacttgcttttgcggtagtacatgaaccaggtgttgccggccagcggcacaccgtagacgttgccgtcctcgccggtgacggtctgtagcatcgtggcattgcctttggtctgcttggcgagctgtttcatcgtcgggtcgctcacttggccgacggcgccggcatcgagcagggtgcccagctggtcgctggcgaacgtgtaaacatctgcggctacggtcggatcctgcttggctatgccggcggcgtctgccgaggccacgttctggtttttccacgtgatgctgtattcggggtgctgctgttcgaatgcggcctccatggtctgcagccacgaatccgtgttggcttggtcctcttgggaggcccacaccacaagcgtgatatgctccgcgtctccgcccgcgcttgcggacccgcaggcggacaggcccgtgacgaacagcgcacaggcggaaatcgccgctagggctttcttccatcgtgccatcatcgttgattttcctttcttcggacgccgactccagtatcggctcctgccacgcacacccttgggtactacgtttccgttttcggcctgatacaggggaatcgcggaagattgggggggtacgtcgttgttgcttgagttcagtgtaactgaaattgcgaacgtatgcaagccaattgcaatcagccataattgcagagtcttaaatccttgatatttcaacgtttatcccgcgtttctctagattgacagcgttcgcaatcatgcagtatcattaagcaacatcccgcaagaatctgtaaaaacaaccgttattcggacccggtagagaagccagatccatcacacctgaaggaaggaccacgatgacgcaacagccccagacttaccccaagccagcctggctggaaaacgcccgattctacgaggtctatccgcaatcgttcgctgactcgaatggtgacggcatcggcgatattcccggcatcaccggcaagctcgactacatcgccgctttggggtgcaacgcgctgtggatcaacccctgtttcgactcgccgttcaaggacgccggctatgacgtgcgcgactatacacaagtcgcgccgcgttacggcaccaatgacgacctgatcgcgctgttcgaagccgcccaccggcgcggcatgcacgtgctgctcgacctggtccccggccacaccagcgaagaacacccctggttccaagccagctcccgcccgaaccctgctgagcgcactattgtcgcctcctccgatgggccgagccgtaaagaaaacaccggagacccgccgacagccccctctgaggagggggctgtcggcgaagccgactgggggagagaccagcccaccaatgtctccaaccgctacatctggaccgactcctggatcgccggcggcgacggtctgcccttcatcggcggcgagactgagcgagacggcacctacatcctcaacttcttcaaatgccagccggccctcaattacggtttcgcacacccgcaccaggcatggcagaaaccggcgctcggcccggatgccctggccacgtgcgacgcgatgatcgacgtgatgcgcttctggctggcccgcggcgcggacggtttccgagtggacatggccgacagcctcgtcaagcacgacgacgccggcaaaccatacacaatccgcacctggcagtacatgttctcgaaaatccgccctgaattccccgaggcggcgtttgtcgccgaatggggccgaccgaacgaatcgatgcaggccgggttcgacatggacttctacctcgactggcgctgggacggccacccgaatggctacaacctgctgctgcgcaatactgatacgcctatggaacacgaaggcgattccagttatttcaacgccgattcaggtgcctcaatcgccccattcctcgcggaatacctgccgcaactcgccgattgccgcgcggcgggcggccatttcaacctcatcacctgcaaccacgacaccttgcgcacggcccagcgcctcgccgaacgcgagctcaaggtggcgtacggcatgctgctgaccatgcccggctgcccgttcctctactacggcgacgaaatcggcatgcgctaccgcgcgctgcccaccaaggaaggcggctacgtgcgcaccggcagccgcacgccgatgcaatgggcgtccgacgctccgaatctcggcttctccacggccccggcggacgcgctgtatctgccgaccgatccggccgacgatgcgccgacggtgaccggcgaggcttcgcgaccgcattcgctgttcaactggatccgctcagtactggcgttgcgcgccgcccagccggcactggccgccggcgccgggttcagcgtggtcgccgcgcccgcggacggccgcgcgttcgcctatctacgcacggccgcgccgaacgacgacagcggcgacggcacggcggccgggcctctcctcatcgccatgaatccgggccgccacagcgaaaccgtgggcctgccggacacgctctcccccgatgccgtcatgctgctcggcctcggcgagccggccgtgggcgacgggcagctgacgctctccccgcagtcgttcgccgtgctcggataacccgctaattgcccaactcaccgaatgtattgcaatcgttgtcaatatgagttacggtaaagatagaacagctcgaacattggtctgtcagattgccggaacctcaacgcagagcggccctcgaacagcaatgcaaacgactagcagtacccgatttgcaagcaaggagtcatcatgactgacgcgcacggcaacgacgcagcgaccagcaccggcaccatcgcagacaccaccaacgacgccgcttccggtgccccgcagcgcgcggaaagcgcggaacgactcgcccgtccgctggtcaagctggccaaagcatgcgggctttcca

SEQ ID NO: 2113 - DNA, 12476 bp, Unknown
  R51_24m  MAG No. k141_3316
cccagcgcggtgagtacggcataggtcacgccgaagttcaacgcggttcgccatcgggcggccgccagcaggggcaacaggaacagcacgaccatgacgatttgcgtggcgagccctacatggaagaacagcatgaggttcaccaccagcagaaggaagagtctcgcgcgcggatcgagcgtccggcgggcaggaagatggagccgaagccgctggtgaacagggtgctcaccagtgtggcgatgcacaccatcacgaagtacagggccgcaaacacgccgatggtgatgaggtcggagacctccagtttgccggatttggcgggcttgttgagctggtcagaggttttggcgggcgtgttcggtgcggtcacgatgttttccgtttcgtatgcattgacaatattcctctcgccaatctaacgatgatttcccgcaaggcaatagtctgtctgtgatttttgcgtgcgaaacaatagagctcccctctttgaaggggagcctgagtgttccatcaaaaccgaatgctcgcccggaactcgccttcggccggttggccgagttccagcctggctcccatcgcctcgcatgccgcactggcgatggacaggccgagccccacgccgggcacggcgctgatacgcgagttttcgccgcgatggaacggttgggtcagctcgttcagatcgtccggcagcatctcatccgtggtgttcgtgacggtcagacggggtccgcttccatcctcatccgatacgacggtcacgtcgatcgacccatcatccgtgttgtgcacgacggcattgcgcagcaggttgccgaccgccagttccagcaacgccgggtcggcggcgatgagaaacatgtccgcgtcgccgccggccttgttcacggttatggtgatgcgacgcttggtggcggcatcgtcgatatccgcaagggagttgccgacgcatccgtacaaatctgtggatgtgcgtgccgttgatgcgggactcatctgtgtcacatcgcccgcctgcttgccgccgatggtcccgctttgaatacgggacaaggtcagcagcgcctgcaccagttgcgcgccgcgccgattggcatccagtgcgcgctgtaccgacggtcgcacatcctcggggaaccgcccctgggccaacggcgcgtccagattggtctccaccgcggcaatcggcgtgcgtagctcgtgcgaggcattggacacgaaccgccgctccgcttcggatgcggcctgaatccggtcgagcatgccgttgatggcgtcaccgagctgcgtgacttcggaggattggccggcagctcgaccgtccgtgcggctgtccgtgctatgatcccaatcctcggtcccgcgtctgcccgcacgccggagctggggcctacggcgagatggcggcccattcacgtcgatgcgcgtatcaagtttggccgggtccaatgccgccgcctgcgcgctgatggaggtcagttgccgggacatgcgcgaggtgaccagccagatgatcagaatgctggtgatcccgaagaacacgaagatgatggccgcgctgatgcgcaatccggtggcgatgttgtcctggttccacacggagacgccatacggggtgttgatggtatacgacccgtccttgccccattccacctgatagtcaccgtcgcccatatcgccgccgacgctggatgttccagtgatatcgttcagacctgtgccgcttccccgggaaaacattcgcgggtcggaatccgggcgtttgccggtgccggaaccgctgtgctggctttcgacctgcatctcagggtttttggcggtgaccgtcgtggcgtacgtgaacatgctgttgaccacaatggtctgcacgagggtcgccgatcccatggcgatgaggaacacgagactgatggccaacgtcagtttggcgcggaatgatttgggccgcagtttgccggcaagcgcctgtatacgacctgatgctttcgccgtgttcgtcgccttcattgcagccggtatccttccccgcgtgtcgagacgatggcctcgcgatcggcgagtttgcgccgtagcgaatagatggtggttttgatcacgtcggtcgggtcggcggcggtcggctcatcccaaaccgcatcgtagagttcgtgcgcggtcacgtatccgccttccgcacgcatgagctccagcaatatgccgtactccttgggtgtgagtttgacgagcgtgcgcccgtggtcgcggaacacgagccggcgtgtggaatcgagggtgatgtcgccgcgcgtgagcacggctgcggtcgcgttgctggtcccgctgcgccgttgcagggcgcggatacgggccagcagttcgggataggcgaacggtttggtcaggtaatcgtcggcccctaggtccagcccgctcacgcggtcgctgacctcggcggcggccgtcagcatgattacggccacgggaatgcggttcgcggcgacggtggccatcaccgcgtcaccggacaataccggcagatcacggtcgagcagcatgatgtccacgttcgtgccggcaaggatcttcaacgcttcgacgccggtggttgccagactggtcgcgtacccctcgtagcgcagcgcgtcgtccaacgcggcggccagttcgcggtcgtcctcgacgatcagaatccgcatcatgtccccttccgagccttcccgaaccaatggcatcacccaacattttcccgattctacggtaaggcgaaagtaatccgtccgcttaccgacgctccacggtgagggcgattggatggaagtcgtcacaatcgactcacggaatggagacggtaatgtccactactcatacgcgcctggtacggcgaatcgcaatgcttacgtccgcactctcgctggcttcgatgctgggcgcctgctcgtcaccgctggcggcagtcggaacaggctcaggtgccgacgatcggtccgatgcgacgaccaccaccgacgccacggcgaagcgattcgccgcctgcctgaccggcaaaggattcgacgcgcgtacggctgctggcgtgtcgtccggctccggctcgggcaaacaagccccgaccaaaaacgcggtcgcactgcgcatgatcggcaccgacggcaagccggtcgcctcccaaggcaacagcctcagcgcatccgacgacggcccgcaactctacccgaacgctgcctacacgtcgatggaagacgacagcacctgggtggtgttcaaggacgccaaggcgctcgccggctcaccctacggatccaaacagcgggaatacgccgactgcgaggccaagaaccccgacttcacccagcccattccggacatggggccgcaacaccagtattccggggaagacaagcaggcggcgctcgcctacgcccaggccgcgcgtaagaagggcttcgactgggtcaaggacccggacgccgatacgcccacctcaatcacgattcccggcaccgtaagcgaatccgaactgcgccgattcctcaaggaatgcccgaccgatggcgcgaacatctcctatgccttcgctggcaccaccgaggaattcggctatgactacaacaaagtcctctccgaattcacctccggcagcgcgtccaccgaagccgcgccccagcaatgagacggccatccgataacggacaaaggagcaatcatgacacggacggaagcgcgcagattcgggaaacaccgcagaatcgtgacgatgattatcgcggcgatcgccgtgatcggactggccgcggtgtgcgtggcggtgaggccgtggacgttggccgggcacgtcaccgcgaccgggcagactggccgatcgcagcaggtggatgtgtccacgctgcgcacgcaggaggtgaccaagggcgtactcaacgccgagacccggctcggcgcgagtctgtaatacgatgacgcctccgatttcgcggccgcttccggcacaatcacccaactgccggtggccggcaaacagatcaacaccggcgaacaggtgtacgagatggacggcgcgcccgtgccgctgttccatggcgaccgcccgttctggcggacgatcggcgatggcgtctccgacggcccggacgtcacgcaactggagcagaacctgcaggaactcggattctatggcggcgaggtcggaccgcatttcaactggctgacccgcgaggcgatccggcaatggcagcgctcgctcggcctgaccggcgacgcggtcaccggcacattcgacccgaatacggtggccctggccgcggccgcaccaatccgcatcacggcggtgaacgcgaaactcggccaatcacaggtcagcccggcaagctatacgggcgtcaccctgcatgcgcaggccacgttgaccgccacgcaggcggcgatgttcaaagccggagacaaggcgcaggtcgtgctgccggacaacaccaccgtcgaaacgacgctcgcctcggtcgatcagggcgggcagaagaccggcgacaacgggcaagccacacagccatcggcgcgcatcgacttcccggaccagtcgcaggtggcggctttcgggccgacggccgtgcaagtcatcatcccgaacgccgatgcctcgaccggggaggcgctgatcgtgccggtgaccgcactgatcgccagcgccggcagcgcgtatgcggtcgaagcggtacgcggcggcaagttggtgcgtgtgccggtgtcaatcgggctggtgtccgacgcgcaagtgcaaatcaccaagtccgacggcctcaaggcgggagacaaggtggtggtctcatgaacgacatcgagtttgcccccgctggcccagagcatggggcattgctgacgttggagcatgtgacgaaggcgtttccaggcaaggacgggagcgtgctggagatattgcatgatacgtcactggccatcgatcgcagcgagctcgtggccatcgtcgggccgtccggctcgggcaaaagcacgctgctgtcgttactgggcacgctggacatgccgacctcgggaatattgcgatacgacggcggggatgtgaatgcgatgggtgagcggcagcgcagcgtcctgcgggccgcgcgcatcggcttcgtgttccagcagttccatctgatcgccaccgtatccgccttggagaacgtgatgacaggcctgcaatacacaaccctgccgcgcggcgaacgtcggcaacgggccgccgaggcgttggaacaggtcggattggggaaccgcctgcatcaccggccggcccagttgtcgggcggcgaacagcagcgtgtggccatcgcccgcgccctggccaaacggccggacatcatcttcgccgacgagccgaccggcgcgctggactgcgaaaccggccacaccatcgtcgacctgctgctcacggcggccgattccggcgcaagcctggtcatggtcacccacgaccagaccatcgccgcacgtttccccaggcgtctgcacatccaagacggcctagtcaccgaactcgacaagccgaatcaagccccctctgacgaggggctgtcagccaaaggctgactgggggagagatatgagtgaacgtactcctatgagtaaaccaatacgcacgcgaattgcggatttgatgcatgcggcttgggttggggccgccgggcgggcgtcccgcacggtgctggcatcgctgggcatcgcgcttggcgtggccgcatatgtggcgttgtccggcatcgccgcatcgaaccaggcagcgctcctcgcccaactcgacgcgcttggcgcgaatctgtcggtggtcgcccccggcgtggacgccgcccagcagaaggttccgctgccggattacgcgcccacaaccatcgcccgtcagccgcaggtcgaacgggtcggtgtcttcgacaccgcgccagagaaggtgcagatcttcaagaacgggctgtgccccaaaaccaacggcaacgcgctggccctcgccatcatgcggcccggcgcactcgacgccgtcggagcaagcctcgcccaaggtcatggcatcgacgcgaacaacgagcacctgcccgtcgccgtgctcggctcggacgccgcctaccggctcggcgtcaacgagcccggcgaccgcatcctcatcgacaacgcatggtacggcgtcatcggcatcctgaaccccacgccgcaggctgaaaacctgaacgccgccgtcatcatcggcgagcaatgggcgctcggccggtaccccgaccaggccgacaccatcggacggatcagcgccatctacgtgcgcaccacgcccggcgacgccgaaggcacccgccgcacgctcgcccacgccgccaacccggccggcggcaacgtgtccgtcaccgcgtccgccgacctatccaaagcgcgcaacaccaccaacgattcactgaccacgctcggcctgatgatcggcgtgatcgcgctggccgtgggcggcatgagcatcgtcaacatgatgattgtcaccgtgatggaacgtcgcggcgaaatcggcctgagacgcgcgctcggcgccacgcccggcaacatccgcatgcaattcgtcaccgaagcggccctcctgtccacactcggcggattcgccggcatcgcgctcggcgccggcgctgccatcggcgtcgccgccagtgccggccagccgatcgccctcgactggacctccctgccgctcgcctgggccgccgccatcctggtcggcatcctcgccggcctctacccggcctcccgcgccgcccgtctcaccccgaccgaggccctgcgcggcgaataggggcgacggctggagtgaacgatcaccatgagtgcgcagcctcaatgtcacttttactgcacatgatgacatgtgcagtaaaagtgacatattggtgctgggcgggagagagcacgcgtggtgcgggcggggtgtggttcgcggctatcggctagtatggtgcggtcacgacagagggaggcatgctgtggccgatgtgatgcgggagctggaacggctgcgaccggtgtatgagacgggcgtcctgcggttgctgttgcgccagaacgcgatgctgtacgtgtcgctgctgcgttccacgttcgacccgctcaccggcgagctgccgcgcgagaccgtggaggagcggttcgcgcaaagtctgaacgctctggccgacgccggcgaatatgcgccgcgcgaggaccagaccttcgccgaggccgcccatcagatcctcgccgacctgacccgtgaaggcgaaggcgactacgcctggctcgccaactcgcatgatgcggccacacaccgattcctctaccgtttgacggcccgcgcccaccgcgccatcgaggcactgagcaggctcgaagacgaatcacgcgccctgtccggcgcgcaggccaacagcatcatcatggaaatcgaacacgcgcgcatgcagctgaccgccgaccccggcgagcgcatcaaacttctcaaccgtgaaatcaaggaacgcaagcacgagatcaaacgcatccaacagggcaagcagcacgccacgctgagcgaagcccaagtggaggacgtgatcgccgtgatccacaacacgctgcgcggcgtgcccatcgacctgcgcgaactcgtgctcgacgagcgggacaacggcgacgccttgcgccggcgcatgcagaccggcgacatcagcgtggacgagaacctgacccgctaccacgacgaataccgccgctcgttcagcgaatcggacagcggccgccgcttcgaggacgccttccaggtgatcatcaccgacgagggccgccagcaaatcgacgaagccctgcgcgccatcgccaaaaccccgtatctggccggcgaatccggcctgctgctcggccagatacgcgacgaactggcccgcatctacgacggcatcgaggccgtgcgtcgtcagatgcgcgtctccgacgaggcgatcagccggctcgtgcgccagcaaaccgacactcgctaccgtacgatgctcacccgcttgaaccgactgtacgcgcgcctcaacgcagatgcgaaaacccatatgggagacgcctcgcgcccgtgcgacacggccaccgcggacgcgctgttcgcgccattgccgatgcgcccggccaaatccatgacccgcgccaccgcacccggcctgagcgacctcgccgccgaagccccgcaggcgactccggtggccgatctgcgggatatggtcaacagcggcggcccccgactcctgcgcatggtcagcctcatccggcgcaacccggtgaccgttgacaggtccgatgacaggtccaacgcaaccctcgtggacatcgccgccagcttcaaccggctgcccgaaagcgaacgccgcgaaagcgagatcgtcggcttcctgggcgggctgggagccgtaagcggcagcgccatcgccgacgagccgtccactgacggcatcggcatcgacagcgacatcgccaccgagccggccccggcgcagcgcggcgataccgcgacttggcattgcgtatcgatcgacggcgagccccggcactggatcactagaccggtgctggccgacatggacgagctgaacatcattgtggaggaaggatgaccgtggccgaggaacacgaggagcacatggacaacgccaacccgtacgccctgttcgaaggcgacaccggcgacatgccggccgaggcacgcatggccgccatcgccctcaaacgcgaccgctatatcagcgggcccacctacgacaccgtgctcgacaaccgcgacgccgtcgtacgctccctgaacaacgacctgctcgacttggtgatcaacgaacgctaccgcatcatgtacgccacgcccgtggccggcgacgacgtgaccctgcgctcgctcaaaacccgtgtcagcctcaaacgcgaggaggccgcgctgctcgccttcctgcgcatccgcgtcctcgaatacgagaacgtgcacgccgaccccgccgactggctcgtcagctttgaggagatccgcgccgcgctcgccaccggcgccggttacctggcagcccgcaatgacgaggaaggcgtggcaaagcagatcggcgccatcgtctccgcgatgatcacctacgggtatttggcgcgcctggacgacgaagccatgtaccagatcacgccgctcgtgcccgtggtgctcgaccgcgaactggccgacacctggctcgacgtcgcggaacacggcgacggcgacacggaagatgacgatgacgacgagaagggagccgaatgatgcaggcgacagacgtgcagatgatcgcggaccggtggatgctggaatcccgccgactcatcaactggggctcctatgagggctaccacgaattccgcccctccacggaccacaagctgccggtgaccctgctcgccggcgccagcgaatccggcaaatccacgctggtcgacgcgcagatctccctgctgtacccgaccggcacgccgttcaacaaggcctcgaactccggccgctccgaacgcagcgactacacctacctgcgcggcatggtcggcgtgggcagcaccgaaaccggcgacgagccgctctacctgcgcggtcgcgacgagaacggcgcgccgcaacccgtgtggggcgccatcgtggacacctatcgcaaccagaccaccggccaggtgctttcctgcgccaaattcctctacctgatgcccggcgacggccgcggcgacgtgcgccgccagtacgtggtctggggcaagcccgtggaccccaggcgcatggaccaataccgtgacgccccgttcacaccagcccagctcaaagccacctaccccgactgcctcacattccccagcgccgaagcgttccacacacacatctggagcgcaatgggcctgagcgaggccgcctgccgactgctgcacaagatccagtccgccgacgcgccctcccggctcgacgacatcttcaaacaaggcgtgctcggcgtgcccgaagccctggacctggcccgcaccacggtcgaggactacgaacgttacgacgagaacttccacgccatggacgagaagacccgccgcatggacacgctgcgcggcatccaacaggcctacggcgaatacgccgccgcacgcggcaaggcccgcgccttcgaaccggtcaagccggccgtcgacggcacggtgccggccgtgctgcgcgactgggcattggcccgcatgcgcggcgaagtcgccgtccaactgcccgccgaccgcgccgaacaacagaacagcgaggcggaagccaagctgctgcgccgccgaaccgaagacctgcgcacccgcctcgacatgatccgaggccagatgcagggtctggacggcggcaacctgacccgactcgaactcgaactcgaccaggcccgccgcaccctcgaagacatgcaagccaaccgaacacgaatcgaacaaacgttcgcatccatcggcgagacgctgcccggcaacgaacagtcctggaacgaacgccgcatcaacgccgtgaacttcaaacgcgaatacaacaaacgagacggcgaatgcgaggaagccctcaccgccgccatcaacgcacgggccggcgcacgcggcgacctcgaacgactgcaacgcgacttcgaccggcaacgctcccagcgcacccgcatctcccagcagatggacgaaacccgcgccatgctctgccgcgccaccggactcacccccgccgaactgccgtacgtggccgaactcatggacgtgaacgaacacgaggaagactggcgtctcgccatgaacgtcgcctacgcgcccatcgcccagaccatcctcgtcgacaagcgccacgaacagggcttcgccgcaaaagtcagcaccatcgacccgcgcaccatgccccgacgcacctggcagttcgtggacaccgcacgccactacgacgacaccggcgcgcacgcgaacatactcaccggagaacaggacggcgactggctgtccggcaaactgcgctaccgcgacgactcgcccttcgccgactggctgcgctcgcagacccaggacgaacgattcgacgccctatgcgtcaccgccatcgacgacaccgaccgcaccaaccgtcaggtgcaggccgacggtcagatcaaatccggcgcacgcggccagcacggcaccaaagaccgcgcccaggtcatcggattcgtcaacgaaacctacctcaacgcgctcgcagcgcaggtcgacgccgcccgcaacgcgctcagccaagccgacaccgactacacggccgccaaaacacagtccgataacctccaccgcgaactcgaactggccaaccagctcgcctacacgtcctgggaacgcatcgacatcgccggcgcgcaacggaccatcacggacacgcaggacgccatcgcatccatcaaaaacgatcccaaactcgccgaactcgccaaacagcgcgacgaactgaacgccgaactcgaccgtgtggaacgccagcgcatcgaatccgaccaggccgcggcccgcgccggcagcgccgtcgaagcggcgctcatctggctgcgcgaccatgccgacaccggcacgacggacgccgccggtgccaccgccgacaatgacgatgacgccgcttccggcccgctgccggacgaagtcacggcggcgctcgccgaatcctacgacaaccgattcgccgggctggcggacgcggccatgcgcgcgcacatgatcatcggcgcgggcgcggcaggaacgcaggcgccgggggagaacttccccgaacgcaccatcgccggcatcggcaaggacatggcctcccgcatcaatctgctgaacggccaggccgacgccgcgcgcaccggcgtcgaatcgaaaatgagcacctacatcgcgctctacgcggccgacgatgattcgctgaccgccagcgtggaggactaccggtactatctcgacgaactcgctagcctcacccagctggccgcggtcgccgccaccgacgccgaataccggcgctgcctcgaacagctgctcaggagcttcctgaccatcaaacgcgccatcgacacggatgccagcgacatccacgaccagcttgaccgcatcaacgccatgctcaagggccaacagttcggccccaagcacggcagcctgtccctgcacgcggacgtgcgccgtcccgagcgcaccttctgggcgcagctcatccgcgtcatcggcaccctgaacgattggaaatccgccgacgtcaacgattccgacgcctcgcgcaaggctttcgcggcctgcgcgccgatggtcgggctgctgcgcgccgaactcgcgcaggtcaaggacacgaacggcgtgaaaagctacggcgcccgcaacctcgacccgcgctgccgctcgtccttctacgccatcgtgcatcatgccgacggtccggacgaacgcatcacctccaccggcggccgttcgggcggcgccttgcaggagctcacctc

SEQ ID NO: 2114 - DNA, 5154 bp, Unknown
  R51_24m  MAG No. k141_3393
tcgggaatgccattgtctggtcctagagcagattccgtggcgttttttgccgagtcgggtcctagggtggagcacaacgactacgatggtgcgggtaacgcgatacaaggagtggaacttcatatgccgaagatgtttggaaccgatggtgttcgaggactggccaatagggatttgaccgcacgtctggcgttggatttgggcgatgccgccgtgcgtgtgctcggcgacgccggcacccaagacgatcagcctgagggacgccgccgcgcgctcgtgggccgtgacacccgtgtgtccggtgattttctggcttccgccctgtccgcgggcatggccgccggcggcttcgacgtgatcgatgccggcatcatccccactcctggcgtggcctacctgacctccgtgctcaacgtcgaaatgggtgccgtgatctccgcctcccacaacccgatgcccgacaacggcatcaagttcttcgcacgcggcggcttcaagctgcccgaccagaaggaagacgacatcgaggccgtgctcggccaggactgggaccgcccgaccggtgccggcgtgggccgcgtgagccacgaccagaccaccgccaccaacctgtacatcgatcatctggtggccaccatcgctccgctgaacgatgacaaaacccagcccaagccgctcaagggcctgaagatcgtggccgactgcgccaacggcgccacttccgtggtggctcccgaagccctgcgccgtgccggtgcggatgtaatcgtgatcaacgcctcgccggacggctacaacatcaacaagaacgccggttccacccaccccgagcagctgcaggccatggtcaaggccaccgatgccgtgatgggcgtggccttcgacggcgacgccgaccgttgcctcgccgtggacgaagacggcaacatgatcaacggcgaccagatcatgggcattctggcccgtgccaagcagcgcgaaggcaagctcaaccacgacaccctcgtggtcaccgtgatgagcaacctcggtctgaagctcgccctgaaagacatgggcatcaagaccgtggaaaccgccgtgggcgatcgttacgtgcttgaggaaatgctcaagggcgattactcgcttggcggcgagcagtccggccacgtgatcaaccgcgaattcgccaccaccggcgacggcaccctgaccgcactgaccctgtgcaacgaggtcgtcaagtccggcaagagcctgaaggagctcgccgccgacttcccgcagctgccgcagaccctcatcaacgtgccgaacgtggacaagaaagccgccgccaccaacaagcgcatccaggatgccgtggcccgcgaggaggaactgctgggagacaccggccgtgtgttgctgcgcccctccggcaccgaaccgctcgtacgcgtgatggccgaagccgccacccaggcctacgccgacgaagtctgcacccgcctcgccaagatcgtcgccgaagaactcgcgctgtagcacccttccctaaggaaaagcaatgtttggaaagaatgccaaagtcgacctcgaactcaaccgtgatgtcgaacaactcatcaaaaccggcggcaaggagaagctcctgcccatcgtgcaggccggcgaaccggtgttgcgccaacggacggtggcctaccatggccagctttccaagcgtacgctcgccaaactcatcgatacgatgcacaccaccatgctggaggcgcccggcgtggggctcgccgccacccagatcggcttggggctcgcgctcgccgtggtcgaagaccacgtgcgcgacgacgaggatgatccgcgcgaaatcgcggaattccccttccacgtgatcatcaatccgagctacaaacccaccagcgacaaaaccgcctcgttctacgaaggctgcctgagcttcgacggataccaggccgtgcgcaagcgttggctcgacatcaccgccgaatgggatgatgaagacggcaagcaccacagcgagccgttgcacggctggcccgcacgcatcttccagcacgagaccgatcatttgagcggcgaactgtatatcgatcgcgccgaaatccgttcgctgaccaccaccgaaaacctcgaggattattggtgcgacgacccggtacccaccgaggccgccgaagaactcggcttcgcactatgatcgaccgcacatggctggacgccgccaagggagacattccccaatgggcggcgtccatgcccaaagacgccgacggcaccaccattgactgggactgggtgcgttcgctggacctgatgcatggcatcagcgtattgctggcgcttgctgcagatggtgagcaatatgacaaaaccgcagcacagcctcagctcgggttggaccaaccggaactgaggccacaagctatccacgacgcattgaaggtcgattacgccacacgcgagcatctggaatcaatcatcgcccaatgcaacagcacattcatgaccgattacgatcgattcatcggctcctatcgtctgcctcgcgcgctcgcctacgccaatcgtcggctcaacgacaacatcaacacgctgttgcatctgggcgaacagcaacacctatgggtggtcagtcgcgaacggcgggggaggactaccgttgccgtgctcaggccgtactccggcagccgcccatcgaacgatgaccaaggcatgctgaatctgagcggtgaaaccggtgacgcatctgccggaaacactgctgccgaaaacagcgatgtcaagttccccacaacagtcgccttggacgatatccaagaccgtacggcggcgattcttgacgcacgcgccgaacgacgtaaggcccagcgcttccagaagcgtgcgggcgatgcggcgatggcccgcgccaatctctccggcgcgacttcgccgggtggtgccgcctcgtctggcaacgctaccggccaccatcccaagcccgactggcgcgacgcctatctgcccggccgcgacgtggatgcggtgatgggcatcgacatcgaaaccaccggcatcgatccggcgcgtgactacatcatcgacgtcggcttcgagttcatgaacatggccagtccgcgcccggccggcgaacctgagacatacgcctatgagcagggctattacgccgccggcgacgcctacggccagtcccgtctcgcttttggcgtgccgccggaaaacgcggcgctcggcaacgccctcatcgccaaactcaccggcatcgatgtacgcggccgcagcagcgaggccgggtaccgactcttcgacgaatggccccaagcccaggccggcctgctcgcgcggcttacccagcagccgtacgtggcgcataacgccaccttcgaacatagctggttcatgctgaacgtcgccggatacgcggaaagctaccgtgccgggcgcatcaccatcatcgataccctgccgatgagccggcagtgggaccccggcgcggtacccaccaacgagcatccttacggagacaacacgctcgacgcctacgccaaacgtcagggcgcgcttgattccgcccacaacgaacgccacttgggccttgaggattcgcacatcatgctggtggccatgaaacaccatctggcggcgctgaaagcgcaaaggaaagggccgtgggggcccgccggcagggctggcgtcggcggcaagtcctgcggtcgtaagcggtgagtacactattggtctcgtgagtaactatcaggacggccgacagcagcgtgagaaccgccgccgcaccatcgtgcgtgtggtgtgtgtcgtcatagctgtggccatgctcggctccctgatcatcccggcgatttacgcggggctttgacgttgccttcgcatattcgtgcccgcagttgaacacgtctgatgcgagggatttgtgaggtcgcccggccggctatcggcaaggcaggcccggaaccttctggcagcatggattgcaggcggatgcgtgtgtggcgcggcaatgcccgccaacgccagaggaatgtgcgaaggctgtcaacaaggacgtgacttcccaaagaatctcaaagaatcaacagtaaggtaaaccacgatggcagaatttgactttacccaggcgatcggcgaagcccgcgccaaatacgaatccatcgccaaggcgctggacgtcgaccggctcaaggccgatatcaaggatctcgaaacgcaggccgcggccccgggcctgtgggatgatccggaaaacgcccagaagatcaccagccggctgtccgccgcggaatcgcagctgaagcgtctgaactccgcctcccagcgcatcgacgatgtggaaacgctcgttgaactcggccacgaggagggcgaccaggactctctggacgaggcgcaaagcgaaatcggcgagattcagaaggatctcgaccagatggagatccagaccctgctcgatggcgaatacgacgaacgttccgccgtggtgaccatccgctccggtgccggcggcgtcgacgcggccgatttcgcacagatgctgttgcgcatgtacctgcgctactgcgagcgtaacggcttcaaggccaaggtcatggacacctcctacgccgaagaggcgggcatcaagtccgccaccttccaggtggatgccccctatgcttacggccgactgtccgtggagggcggtacccaccgtctggtgcgcatctccccgttcgacaaccagggccgccgccagaccagcttcgccgccgtggaagtggtgccgctggttgaggccaccgatcacatcgacattccggatacggacatccgcgtggacacctactgctcctccggccccggcggccagggcgtgaacaccacgtactcggccgtgcgcatcacccaccttcccaccggcatcgtggtgaccatgcaggatgagcgttcgcagattcagaaccgtgcctccgccatggccgtgctccagtcccgactgctcgtgctgcgccacgaggaggaggccaagaagaagaaggagctcgccggcgacatcaaggccagctggggcgatcagatgcgctcctacgtgctgcacccctaccagatggtcaaggatctgcgcaccggctacgaaaccagccagacccaggccgtgttcgacggcgacatcaa

SEQ ID NO: 2115 - DNA, 3901 bp, Unknown
  R51_24m  MAG No. k141_3426
ccaacattctccaacaaacaatccgtggcgaatggtattccaatggtataccaatcgtatcaaatcgttggaattccgccgttctttccgtgggggccgttgatttcattatacgttactggatgtggaaggtgtgctgaactagcaccttttgtttccgactaagaccccttagaatgtcaacaattccaaggggtcttggcgtattggaaatgttcctggctagagaggtacagatggatttagcaacatttcgcaacaaataatatgatttaggtcttctgcacgttgcgggggttggttatggttcatccagatgagaacaggagcaaacctatgagcaagatgagtggcatgacggaatactatgcttcagcctaccgtttgccgtcaggcttcgagcattgctcgaaactgaagccggtggcagaggcagcgacggcgttgcgtcggtggtgagacaagacatgagcttctggcgacgctgggggatgttcaatgtcagtaatggttcaaggtttggactgctgacgtcgctgagacaccttagcgtcgttaacgggtcaggttctggcgatcaaacgacggtaaaaaggggcttagcgtcgttagctgtacataagttggcacggcaacgacactggagcgcgtgatcgtcggtgccgtgccaaactttggccaacctccgacaaatgagaaggactaacgtcggtggctgctcaaagtttggcgcgctggcgacgctgtaagaaaaaaagtgtggagtcgaaccggcaatagcatttattcggtttgttctctagtccaattgcgtcaggcaaggcctgttgtaggctcgggtacgacgggctgtagcgccgaataaggatgaacgggaacagaacgaagacggactgagacgaaccgaagcggtaccagaggggagcggctcatgcaggtggtgttggagaacaacatcgtttttgtggtcatcgagtatttagcaatcctgtgttggggattgtcgggcggacttgccgccattcgcaagggctacgacatcttcaccatcatgctgtgcggatggcttaccgcactcggcggcggtcttgtgcgcgacgtgatgctcggtgccctgccgccggtcggcatcaccgacaaaggctatgtgctcaccacgctgttttccggcattatcgtggtggtggcccacccggagatcaccaaactcaaatggacgatgactgtcatcgatgctctgggcctcggactattcgcagtcagcggcaccgcaaaagctctggcctacggttcctcaggcatgacagccgtattccttggcatgttcacagcactggccggcggcctcattcgtgacatcttcatcggcgatgtgccaatgattattcgagacaaacacctctatgccgtgccctcgttcatcggttgcattctgaccgtgcttgtatggcgtggtgtgcactacggttggttcgacatgtgctcggaaatgctgctcgacgtgctgatcgtcatcatcgtggtggcgctgcgcctgctctcggtcggcttcaacgtcaccttgcccggagccgtcgagcgtcatcgcgtctacctgcccagcgaaagccgatatctcaagcgcccggtcatccatccgcacgccgataccgtcgatcccggcgataccaccaaggacgaagaagacaagcctcaggatgattcaagaccgcctcagggctaactgccttcaaagaggtacatttggccttctgcaaaatgacaactgctttcaaagaggtacctgaagcacgaaacgtcgagtataagcgttgcaatgacggcgtttatacttgggctttctcggattcggtacctttctgaacggagatgtcatttcgcaagaccgccaatgtacctctttgaacggagatataaaaagtcccgcaagccagatgacttgcgggacttgctaaaaccttaagaggcttatgctcacagagcgttgatcgcaacagcgaggccggacttgcggttggcggcctggttcttgtggatcacgccagcgccagcagccttgtcgagcttctgggcggcaaccttgtaggcggcctcggcggcagccttgtcaccggcggcgatggcttcgcgggtggcgcggatggcggtcttcaggccggacttcacagccacgttgcgaaggtgcgccttctcattggtgagcacgcgcttcttctgcgacttaatgtttgccacgtttactccaaacgatgtgtgttataaggacatacaaaaggtagaggatagcatgagccccggaaaaacccgcgcaatgccacgccgaatacagtccctcggctacactaggtgaagtttgagtatatgccaagaggaggaatgcgttggtcgtccaacacaatcagccgggttccacggatcagtcggtgattcgcaacttctgtatcatcgcgcacatcgaccacggcaagtcgaccgtggccgaccgcatcctgcagttaagcggcattgtgcccgagcgcgagatgcgcgatcgcttcctcgaccgtatggatatcgagcaggagcgcggcatcaccatcaaatcccaggccgtgcgcgtgccatggacctttgacggcaccgaatacacgctcggtatgatcgacacccccggccacgtggacttcacctatgaggtgtcccgcgcactggccgcctgcgaaggcgcggtgctgctcgtcgacgctacccagggcatcgaggcgcagaccctgtctaacctgtacatggccatcgaccatgatctggccatcattcccgtgctcaacaagatcgacctgccgtccgccgagccggacaagcatgccgaggagatcgcaggtctgatcggctgcgagccgagcgacgtgctgcgcgtctccggcaaaaccggcgaaggcgtggccgacctgctcgaccagatcgtcatggacgtgcccgccccgcacggcgaccccgaggcccctgcccgcgcgctgatcttcgactccgtctacgatccctaccgcggcatcgtcacctacatccgtatggaggacggcgaactgcacgaccgcgaaaaggtccacatgatgggcattggcatgacccacgatcccatcgagatcggtgtgatcagccccgatatgacccgtaccaaggcactcggtgccggtgaggtcggctacatcatcaccggtgcgaaagatgtgagtcagtccaaggtgggcgacaccctgacctcggccgtccgcccggccaccgagccgctgcccggctaccgcgaccccaagccgatggtctacgccggtttgttcccgatcgacaacgcgcaattccccgaactgcgtgatgcactcgacaagctcaagctcaacgacgccgccctgatctacacgccggaaacctccgtggccttgggcttcggcttccgctgcggcttcctgggtctgctgcacatggagatcgtcaacgagcgactctcccgcgagttcggcctcgacctgatccagaccgccccgaacgtcacctacgacgtgaccgccgaggacggcagtcagcatcatgtgaccaacccgagcgaattcccggacggcaagatcaagaagatcgtcgagccgatggttgccgccgacatcatcacacccaaggaatttatcggtgcggtgatggatctgtgccaggaccaccgcggcattatgggcacgatggagtacatctccaccgatcgtgtcgagatgcactaccgcattccactggccgaaatcgtgttcgacttcttcgaccagctcaagtcccgcaccaagggctacgcttccctcgattaccatgaggatggcgagcagtccgccgatttggtcaaggtggacatccttattcagggcgagaaggtcgatgcgttcag

SEQ ID NO: 2116 - DNA, 7765 bp, Unknown
  R51_24m  MAG No. k141_3894
gccctggctgcggctgtaggtgccaagaaggcctctatggccgatcccaaggtggcaatgcgcgaatccggctatgtggtaggtggcatctcgccgttgggccagaagacacgtcataagactgtgttggatgaaagcgccatgcaattcgaccagattctggtctccggcggcaaacgcggactgtccgtaggcgtgaacccgcaggacctgctcaaggtcttgaacgccgttgccgcaccaatcggcacgtggtagtcatccttggctcccctctgtgaggggagccaaggatgactacttcttcctgcgcaactccgccggcagcacgaagtgcatgttttccttgatggtttcgacggacttcataccggtgaagcccaagttttgcagagcgtcaatcacaccggacaccagttcgtccggcacggaggcacctgaggagacccccacggactccagtccgacgaaccacgccggatcaagctcgctggcatcatccacgcgatacgctttgccgcgcttccccaagccctcctgcgccacctccatcagtcgcacggaattcgaggagttggccgatccgacaatcaccacgcaaccggactgctgggccaccagtttgaccgcagcctgacgattcgacgtggcatagcagatatccgaactcggcggctcttgaatccacgggaacttggccttcagcgcggcaatggtgccggcggtctcatccacgctcaacgtggtctgcgagagcagcaccagcttggtgtcgggcgcaaaatccaacgaatcgacatccgattcatgctcgatcaagtgcacatgttcgggactctcccccaccacgccgaccgcttcatcgtggcccttgtgcccgatatagacgatttcatacccctcgcgcacgaaacgcagcacctcacggtgcaccttacccaccagagggcaggtggcatccaccacatgcatgccacgacgttcggcttccgccttcactaccggagatacgccatgggcggaaaacaccaccggaatacccgcttgggcagcagcatccggaatctccgccaattcctggacgaacaccgcgccttgcccggccaaatcctcgaccacatgcttgttgtgcacgatctgccggcgcacatataccgggggcagcccatcctcgcgcgttcgctttccggaagcctccgcggctttgagaatggtctgtacggtaagaatcgcacggtccacacccgcgcagaagcctcgcggatcagcgagcacaacgcttttggtcatcggaacctcctgaacgtcaatagtgtttttccagtgtaaggcagggattacaggaatctgccgtcacaacttttccgcgtctcccacgaatcaccggtttccaaggaatccacgtgcttctcgcatgatggtgtgagactcgtcactccacgtattgctaccgtgtctgtacgaattgtttattatatgccggctatcgccaatccccgcctcgatagaggagacgcgctagactggggccagcgatagcaggagctaccggcccaccaacctcactacgggagtgattccatgacgagtaaaacaccacgcaccggaaatcagtattcgattcactatggcgattattccgccgtcatctgcgaactcggcgccaagattcgccgattcgattatcaaggcaaggaaattttctgcccgttcggagtcaacgacctgacccccacctgtaacggttatgtgctggccccgtggccaaaccgcatcgaaaacggcgaatacgatttcaatggcaagcattactgcgcgccggtcaacgaatatcatcccgcaccgcgcaacaacgcgaaccacggatacgcctaccactacatgtggaagcttgaatcgttgaccgatagcgccgtgacgctttcactgcgcttccccaacctggacggatacccgttcgatgtgaccgtgaccgtcacatacgaactcggcgacaacggcatgaccgtgaccgtcaatgcccgcaatgatggcgacgagccggcaccgtgggctctcggcctgcatccgtggctggccaacggcaagcagggcgcgacttccgccgagcgtgacgccgactccgccgcctgccacctgcagatcaaggccgccagtcatgtgacggtgaacgaggcgctgattcccaccggcaccgaaccggttaccggcatctacgacctgaacgatggcccgacgctcgaaggccgcgcctttgatgatgcctgggtcgacgtggagcgtgccgccgatggtacgaccaccaccacattcacccgcccggacggtattgaagtgaagctcattggcgatgagacgatcaatgcttggcagtgctacaccgccactggcgcgccgttcgccgagcatccgtatggtatcgccgtcgaaccgatgaccgccccggccaatgccttccgcactggtgaccacttggtgacgctcgcccccaatggcgactacaccactgtggtccgctacgaagtagtccagaagtagttccgttacgctggctcccctccagaggggagccaattttttatccttatgtgccgccgcgtcttgggacttgtgcgatacgattgtgagcggtaacaatctgtttcacaaaggagtgtgcactatggctttgaagcctcgcactggtaaccaatatgtcatctcgtccggcgaatggagtgccgtcgtcaccgaactgggtgccagcctgcgcgagctgaagtggcgcggcgaagacctcatcgtccccttcgactcgaacaaggtcatcccctgctgcaacggctgggtgctggcaccgtacccgaaccgcgtgaccaatggtcagtattctttcgatggcgaagactaccagatgccgatcgacgagttcgaccgccaatcctccctgcacggctacgcctaccgctacatgtgggagctcgttgatttgcaggaatcacatgtgacgctctcctggcgttcccccgacatcgccggctacccgtttgatatcaccatcaccgccacttatgcacttgacgagaacggtctcacggaaaccttcaccgtgcacaacaacgacagcgtgaaggccccatgggcatttggcatccacccgtggctggccaacggcaagcacgccaccggtcaggccattaccgccgacaacgagtcctgccgtcttgagctgcactgcgatacccacgtgaccgtagacgaacacctgctgcccaccggcgaagagccggtttccggcatcttcgacctgcgcgataaccccacgctggagggacgtggcttcgacgatgcctggaccgatatcaccaaccgcggcgaagacggcagcacttccgccgtgttcacccgccccgacggcatcaaggtcacgctgaccggcgacaagaccatcaactcctggcaggtgtgcaccggcaacgaaatcggcgagaaggctcgtcaggccggcgtggccgtcgaaccgatgaccgcctacgccgacgccttccgcaccggcaaggatctggttgtgctcgagccgggcgatgactacaccaccgtggtcaccttccacgccgaacaaatctgaaaaaccgaataaccaagcctgacgatcatcgccacatggacacccgtgttgcatcacgtcgtacttatgtggcataattccgaaggcttatttttttactgcagcaaaggagtccatcatgggcatgcgcggacgtaagcgcaaggatcgtcgtaagaaggccgccaaccacggcaagcgtcctaacgcctgattcttcgcgtttcttatagaacgctcaaggcccgtctgatgatacatcagacgggccttgttgtatatgtcgttacttatcttcgccgcagcagtgatcaagcgtggccttgagccgggccatcagacattcgggtgccacatccgggcgcaagtaggcacgcaacgcggcaatcaacgcctgttcacgctcgtcgcagcaggtacgggggtcaaaacagtcgccctccgtaacgatatgcacgtctgtctggaccgacgcagcggccgagccggtatctactgaacgatgatgcaccgccgtgatatgcacttcggtctggcttaccgtgccatcggccgccgtacgggttatggagatatggcgagtacgctctaccggctgatcgttcatcagatctcctttcccgaaagcttgcttgactgttgtggcgtgtgggcgtgagtcgcatgactatgtctcactacggcttgcgtgtcgccattgctgccaacagttcgttcactactttcattatggccggaatcggcgattcgaccaacgttttcgctcaacttcgcggatggtgaaccagccaacgaaccagtcacgtacccgcgctctttcgcatacgaggcgagctcacgcttgagttgcgtgcgggcgcgattcaggcggctcatcaccgtgccgattttcacgccctgctcatcggccacctgttggtaggacttgccgtcgatggcggcgtcgatgaacacctgccggcgttccggcgagagtttggcgagcgcggtcatgatttcctcgggtgcgaaggcgtccaaatattcctcttcagcggacttgagcccgcccgacgtatgttcggcggcatcgtaaatgtcccaatcgtcgtattcgccagtggagtcgttggcacgctgcgggcgccgcttggccttggcatactggttgaagtaggcattgcgctcgatggtggtcatccacgcctcgaagttggagcccggctgaaatgagtcgaaggccttgaacccgcgttcgaaggtgtcctggaccagatcctgcgcgtcatcgggattgttggtcagcctcatcgcctgccggtacagtgcattgacggcgggcatggcgagctgctcgaatctggcgcgcttggctgccatggactcgcccgatccggctgactgcccggattgcgtagttgcttcgcttgtcgtcacggttcaccattctaatcaaatcatgtgcccatatcgtggtcgatgacgtgtgagccacaatacgctgcaccccacctgtagaatggcgtatcggctagataatagggagaaacaattatggctttgactttggcttcggccgctgacctgctcaaggaacaccatctgctgcgtgaaatcatccaaggggatgtctggaccgacgacccggcccgtatcgcttcggcggatgaaccgttcgccggcatcacctacgacacccgcaaggtcacgcagggcaccctgctgtgctgcaagggccgattcaaggccgagtatctgaacggcatcgacgaagccggcctggccgcatacgtggccgaaaccgagtactcagccgcaaccgccgcccccggcctgatcgtcaacgacgcacgcaaggcgatgagcctgctgtccgccgcgttctacggatatccgcagaacgagctcacggtcatcggcgtcaccggcaccaagggcaagacgaccacctcgtacttcacgcaggcgcttatcaacgccgtctccggcggcaaggccgcattgttctcctcggtcgataattgccttgacggccacacctacgtcgaatccgatctgaccacgcccgaatcgatggacgccttccgcatgatgcgcgaggcggccgataacggcatgaagtatctggtgatggaggtctcctcccaggcgtacaaggtggaccgcgtctacggactgactttcgatgtggccgcgttcctcaacatctcccccgaccacatcagcccgatcgaacaccccacgttcgaggattacctgtattgcaagcgccagatcatcgccaacgcgaagtcgctggtactcggcgcggacagtctgcacgccgatctgttgcgggaggacgcggcggcagccggcatcggcgtgaccaccttcgccctgcatgacgcggataatgccggcaccagtgcggacgtcgtcgcctggcccgccgacacggcgcacgcctccttccacatcgccgacggagatcagacccttggcgactaccatctgtccatcgatggcgacttcaactacctcaacgcggcggcggccatcgccatcgcccatgcggctggcgtatcgctcgatgacgccggcgcactgcacgccatcgaatccgtacgtatcgccggccgtatggaacagttccgcgacccgcagtcgaacacgctcgccatcgtcgattatgcgcacaactacgcatccgtcaccgcgctgcttgacttcgtctacgagcgttggggcgaggaaaacccgcgtatcacgctggtgaccggatcggccggcaacaaggcctacgatcgtcgtaaggaaatcgtcgaggctgccgagaaccgtatcgcgaacttcattttcaccgccgaagatacggacaccgagccgttcatcgacatctgcatggaaatgcaaggctacatcacgaacaaggatgtggcctccacggtgatttccgaccgtccgacggccatcaccaacgccatttacgatgcccgtgcgcacgccgaccgattcaacatcctgctgattatcggcaagggcaacgagcgttggatcaaggaccatcacaagcatgtgccgttcgacggcgacgatcacgtcgtcgaacgcatgtttggcttgtgacgggattccggccaatcagatcctgatcggattccgattggcccacatcagatcacgcgcaatacgaccaaaccagaaacacgacatacggatacgaacgaaaaaggatagctgaatcgtaatgatcacgttggagaaagttgacggagccacactggaagccgaagccgagaaggccggcatcacgttgcctatcgaacagaccaaggtttggtctggttttcaggcggatatcgacggacgcacgccatggggcgattatctgatcaagcgtgatggtgaattggtcgccgtgatctcctttatcgattttgagacgcacggttatcattatctgcgctcgatgcatgggccggcgtgggtcgccaagcccaccgaggctgaggagcgcgaggtcgtcgacgccatcgtggacaccgtcaagaaggccgacaagaacatcgcgttcctgcgtatcgacacctggttcgccgatggtacggagaaggtgctgtccacagtgccgtacgaccagaccgtggtcatcgacgtcaccggtggcgatgatgagattctggctcggatgaagcgtcgtggacgccgtgacgtgcgcaagtctctgcgcgagtgcccggccgaggttgccgatgagacggataaggcgctggccgatttctccgaatattacgatgtgatggtcgagaccggccagcgcgatggattcacgcctgctccgatgagcgactattccgatatgatcggcgcgttgggtgccgatcattgccgtgtgttcgccgcacgtattgaagaccgtgtggtggcatggtcgattgtcaccgtgaacggcacgcatgcggtgcgctactatgccggcatgcgcaacgaggttatgcgtctgcatgtgaccgacaagctgctgtattccgaatgctgcatcctaggctcgcagggtattactgaatacgatctcatgggcatcggctccgatttcgcgccgtctctcaagggccttaacgagttcaagtgcaagttcaccgaggaaatcaccccggtggcccccgcccgcgacgtacccatcaagaaggtcttctacaagacgctgcagactgtaca

SEQ ID NO: 2117 - DNA, 9287 bp, Unknown
  R51_24m  MAG No. k141_3950
ctggaaagcggggtcgactctgattccggcgtagtgcgtgtgggcttggtcactcggccttgccctcgtcggcgggcttgtcggcggcactggtgtcggctgcggcagcagctttgtcgccggcttcggcggcggccttcttggcgtcatccaccgtctcgctcaccttgcgcttgagctcggtgttcagcgccttgccctgctcgaccgtaatctcacccttcttgacgagttcgtcgacgagctcgctgctcttctcatatccggtggcaagggctccgatgcccgccagcaggaccttgcgcaggccatcacccagaagatcaaaatcagccatgatacccctccttcgaggtccgacatggcctggtgccatgtctcgtaccaccaagcctagcgcaaacaacagggcaatgtactagaccctcagactgatttcgactgatttttcgctgattggtacttaccgaggactcaccgagaattcaccgaggacgttcggcggcagccttgcgcgcgttggtggctacttgatcgatccgggcgagctccttggcttgttcgggggtctgatcggacgtatcgaacgtaccgtaacgacgagtcacggcggtttcgataaggaaatcgctgatggcggggtttttaggcagcaacgagccgtgcatgtaggtgccgatcacgttgtgcacgcgcgcgccctcggtatgatcttcgccattgttgcctcggccgtcctgatcgacggtgccgagtggctgaacgccttcgcgcaggaaggtctggccggagtggttctcatagcccatcacatcgccgaactggtcggaatgctcaacaagattgccgatcatacgcacgttctggcccacggtataagcaccgataacgccgatgccatccagacgggtgccgtccacggtttcaaagtactcgccgaacagctggtacaggccgcagatcatcagcatcggcgtaccgtctgcggcaagcgagcgcagcaggtcggcgcgatggtagaagtcgtcgatgattttcttctggccggtgtcttggccgccgcctcccagaataaggtccacctggtcgggccagtcgtcgccttgattgtactggtggacgaccggttcgtaaccgtacagttccagccggcggcggatagtcagcacgttgccggaatcgccgtagatgttcatgtctttgggatacagggacaccacatcaattgttctgtccatgtcacgttctccttgtcgatgtcttcccgctaaggggaagtcttattcctcaccatgtcctcctgcaggcgggaggtggcgcgcgggcgctagagggtggttacttgcccacgccagcgtcccgtacttcggtgatgcggcccagtacggcgcgggttttgagcatggcggtgtaggtgcagtagatgtgcttgcgtgtgccgggattggcgttgacgaatgcggtgaccgcctgttcgaggtcggtgttcgtatcggcgactggcacttggtcataccccaagcgcaatgccatgtcccaggcacgcacaccggagaccatggcgacaccggacgcgcgtaaagaggtgaagtccacgtcccatagccagctcatgtcgcggccgtcggcatattcgtcgttgatggcgatcatggtgtccgcgttggccgggtcgaagctggcgagcgagaggcggaagcccatcgggttcttgaccagcagcagttcgaccggggaaccgttgacgtcgatgacctcgccacggccgaaagccggcgtgacgcgggaaacggcggcgatgagctcgtcggcggacacggcgcaggcgttggctgcggcagtggccttggatgcggcggcattgtcttgcatcaccgcacgtaccacggcgagcgcggcggccgcgttgtacaggttgtagacgccttcaagtttgacgtcggtggcgtagtcctggctgtccatctggaaggtggccttgtggtcgcccacggcggtaagtgtcacgtcggcggggagttctgccgtgcctgcggaagctcccctctccgaggggagctgtccgcgaagcggactgaggggagtactgactgaagggagcggcccggccataccttccaccgacacggtcgtggccatgtcgtcatcggacgggaaatagtggcgcaaatcgtcggcgaggccgaagtatcgcactgtggtgccagccggggccttcgcggcgagcgcggcgatacgcgggtcctcgcggttcagtaccacagtgccggtagtcgccgcagccacatggctgagcagtttggccgtggtgtcgatttcaccgaatcggtcaagctgatcgcgcatcacgttcagcagcaacgcataacggggcttgacctgcttgacgaagtggacggcgtacgcctcatcgagctcgagtacggcgatgtccgcgtccaatttgccgccgaaagtgacttcggtgagcagtgcggagaccacgccgcgcacgaagttcgagccggtcggattggtgaacaccttcaatcccagatcggagagcatcgaggcgaccatgcgggtggtggtggtcttgccgttcgtgccggacaccaataccacgccaagcggcaactgcccgagcgtacgggtcaggaagccggggtcaatcttttctacgactttgccgggcaaagccgaaccgccatgtttggtgacgcgggatgcaaaccgcacgaagcggcctgcggccacggtggcgaacgcataccacggtttgcgggtctgcaccacggacgattggtcttgcgaaacatcgcgtgaaacgttgcttgccatcatcacaccccctgattgctgttgtagtcctgcgacatgtccttgaatttggacgtggcaccgaggaaggcgaggtggaaggtttcggtcgggccgttacggtgcttggccatgatgatatcggcctcgccggggcggtcttccttgtcgtagaagtcagggcggtggaccaggaacaccacgtcggcgtcctgttcgattgagccggattcacgcaggtcggagagctgcggcttcttgtcgttacgcatttccgggccacggttcagctgggaaagggccacgaccggcacttcgagttccttggccaagagcttcagggcacgggagaattcggacacctcttgctgacgggattccacggccttgcccgaggtcatcagctgcaggtagtcgatgaccacgagtttcagatcgttggtctgcttcagacgacggcatttcgcacggatctccatgaggctcatgttcgggctgtcgtcaatgaacagtggcgcattctgcatcttggtccagaactggttcagggtgttccagcgttcgggggtgatgtcgtcggcgcggcgcagggcggccatcggaatattggtttcggcggagataatacgctgagcgagctccaccttgctcatctccaagctgaagaccacggaagtcatgttgtggtgcaacgcggcggcgcgggcgaagtcgatgccgagcgtggacttacccatggccggacgtcctgcgacgacgaccatctgtccgggctgcaggccctgggtcacgtcgtcgatgtcgcggaatccggtcggcacgcccttgttgacgagaccctgctgcagtttgtccagctggtcgagcgcgtcgtggaccaccgggccgatggcggcatagtcctgacgcaccttgcccatcgacatctcgtagatctcggactgggcgaggttaaccacatcctcagcctgcgatccctcggcggaataaccgagctgggcgattttggtgccggcggcgatcacattgcgcaaaatggcccgctgatggacgatctccgcgtagtacatggcattggcggcggtcggtacggatgcgacgaggctgtgcagatagtccgcgccgccgaccttgtcgaggttgccatccgccaacagctggttggccacgagcaccacgtccaccggctggctggcggaaaacagatcaatgattgcgttgtagatcgtctggtgcttgggctggtagaaatcggtgacgtcaatggtctgcgaaacttcgccgatggcatccttactcatcagcatgccgccgagcacggccatttccgcgtcgtcatcgtgcgggggcacgcggtcgaaaatcgggtcgccagctgccgccgcctgcgcgccgccccggcccgcgcggtcgccacgatcgccacgatccgagccactgccgaacccattctgatacgagtgttcacttccttctgccatagccctcaagtataggaggtggcgtggcgagcggaagatatcgcacgactacgttcattaggtcgattcctcactcattaggtcactgtgcttggtaacaccacaaaccatgcgcttggaatggcggcattctgaggcgctcgatcaatatctctcaaagtccaccgacctaatgaatgcacaatcgacctaatgaacgcatgaaagtgcaagtcgtgccgaatcatcgcgcaccaatttcatcgttggttcaccttgcggtcagcgcggcgacacgctgaagcgtcaaatgtggatagaaaaaatagttatccacattttggggataagtctggggataatccactcatttatccacatattggggataacttggtggacaagctgaggataactttgtacggctgcactaggtgcttgcgcaacgtagctaagcatgatatgcgtgtgagcgtgcatagcaactccaccagcattcatcgccaaatcattgcgttggcgctaccgacttttgggcagctcatcgcagaaccgacttttatccttattgacaccgccatcgtcggtcacattggcgatgccgctttggccggactgtccatcggatcgaccatcatcctcacggcagtcggactatgcatattcctggcctactcgaccactgctcaggtggcgcatctgctgggagcgggtcatcgtcgtgagggactgcaggcaggcattgacggcctatggctggccttgagcatcggcaccgtactgggattgggattgttcgcggctgccgagccattatgccgggcactgggcggtcagggcgaagtattggaacaagccgtgacctatacgcgcgcaatcgtgctgggtgcgccaggcatgctgatggtatatgcggcgaacggcattttccgaggattgcagaaggttcgtatcacgctgatcgctgcggtgggcggcgcggtggtgaacacggtgcttgatgtgttgttcgttattgtgctgaattggggcattgccggctccggagtggcgacgctgatagctcagtggttcatggggctgttcctggtaatccccgccattctgtggtcccgggcggacggtgcgagtctgcggcctcgtttggccggtattgcggcagccgggggcgacggactgccattgttcattcgtacattggcgattcgtgcggccatggtggctacggtcgcctgtgccgcgcgcatgggtactgccgtgttggccgggtttcaggccgtgaactcctcttggaattttgcgatgaacatgctggattccgtgggcatcgccggccagacgctggtggccacaacgctgggcgctggcagcgtgcagcaggcgcggcggttgacgcgggcgaccgggcgtgcggggctggtcaccggcgcggtaatcggcacggcttttgcggtagtcggcctgttcgccgggcacttcttctcccctacgccaaatattcagacgttgattgccgttggcatggtgacgatgggcatcttcttcccactgcaaggctggatgatggcaatcgacggcattcttatcggcgcgcgcgactaccgctatctggcaggcacctgcacgctgaccgccgtggtgtatgtgacgctcatactcatactggccaatatggtgacgccggcgctgacgagcgacctgatgcgtaccgccgtgctctgggccgcgttcaacgtggtgctcatgggcgggcgcagcctgtccaacgggctgcgcgtgcgctcggacgcatggatgaagtaggtatcggccgcgcgaagtgctgggcgattccgtttacatcgcggcgcgagcggcggaatacatgccgcgcacgatttgttcgcgccacttggaccagccgtattgcttggtgatggtctcaccggcggtggcaccgagcgaggagccgtcggcccgggtcaggtcgaacagcatatccaacagcatcttgtcgtggtgcaagcggtcggccaactcctccgccacggccggatcataggggtccttacccgtggcaaattcggatagggtcaaatgctcacgcaccagcacggtggcccagtcgacgatgtccggcgcgtagcccatacgcttgagaatcaccggcacatggcgggcaccctcggcggcgtgatcggccacgaacgcgcgcttgccgatgtcatgggtaataccggccaacagcaacgccttgaaatgatcgtcatcataccgtcccccggacggtgtctcacgacccagacgcgacgtgacctccaccatatgccgatcgatggtgtaccggtgggcggccgaggcggacggacggttgcggacgccgagccattccggcatccatcgacccggaatgtccacgaagtcgatgctctcccacacttccataagattcggcccgcatgcaagcagacgaataaacagctcgcgcgattcgtcatcccactggttgtcgtgaatcgggcagtgcttcagattaaccaaggtagacggattgatgggcagaccgaattcgccggccgccacggccatacgcaacgccagcttggcatccttggcaggctcggcaccgggtgccaacaccaattcgccttcgtgcttggccacgccgggagccaccacgtcgaattgcggggcttcacgcttgccgccagagcgctgagagaacatctggaagaacgcgaatcgcggcttttcgtgggtcagcgaatgtccagcgcgggatgcggtggaatcaagcgagaaggagatgcgccggccgatacgggcaagcagcgtctgcaaatcgtcgatcgagtaggcggcacgctcgttttcgggccaagtcggatcggcaaggccaagcatggcagccactttggcctgatagggcgtcagcatcaggttggtatccttgccggccaccagatggatgcagtcgcgtacgtcgagcagacgttccacggcttcgtcgtagatgccgtgcgggcggtcggccagccatgagacggcgagcgcggagacgagcaccgaatcgcgcaaacccccacgggtctccttgatgtcgggctgattgacgtattggaggcggccgaattcgtcgagtcgggctttggcggagtcgagcagttcgggcaggcgcttgcgggcggccttgcgccagcgttcgaggatggatgtggcggtggtggtaatcagagcagtgtcgccggcgatgggcttcacgtccagccagcccatggcggcgggaaggtcatggtcggtgacttcctcgcattgggcgcgcgtgcggatggagtggtcgaggtccagaccgctgtcccatagcgggtaccagagtttgttggccaactcgttgagctgctggtcgttcaacgtgcgaggctcgtagatgatgaccaagtcgaggtcggagctggggcccagttgaccacgtgccagcgagcctaccgcggcgaagccgatgccggagtcgggcacggggaaagagacatccttgcaggccgcattccacagctccgtgaggcattgcatggccagttccgtgcgggctttacgcttggtcgcaccattccggtagacaccatcgtcatccggctggctcatatccatgaatcgttgtttcaagccatctactgctgaagtcattgcttcatctttcattgccaaaaaggtccccgcacggcgtcaattcgcggcgtgcggggacctttcccatgcagtccatccccttctaggcatggacgtctgtgttatcagatcgcggcggaaccggtctcaccggtacgcacgcgggccacggagtccagcggagcgacccacaccttgccgtcaccgatggtgccggtgccggcggacttgatgatcacaccgaccagcgtctcggcatccgcgtcatcggacagcacttcaacgcgaatcttcggaatcaggtccacggtgtactcagcgccacggtagacctcggtgtggccgcgctgacggccgtagccgttggcctcggacacggtcagaccgtgcactccggcggccgcgagggcctccttgacgtcgtcgagcttatggggctggatgatagcggtgatgagcttcatctcacctcacctccttgagaacagagctggcagtaccagcaaaatcgtaagcacgttcgccctggtcggcaagatcgatgccgccgacttcctgagcttcggtgacgcgccaaccgatggtcttctccagagcgaaggcgatgatcgcggtgatcaccgcggagtagaggatggcgacgagagcgatgaccagctgaacgacaagctgcttccagtcgccgccagccagcaggccggtgccttcgccgaagaagccgacgaggacagtaccggtgaaaccaccaacgccatgcacgccgacgacgtcgagggagtcatcgtagccgaacttgaacttgagaccgcaggccaggcaggtcagaacaccagcgatggcacccatcacgatggcccacagcggggaaaccacatcggcggccggggtgatggcaaccaggccggcgaccatacccgaggcggcacccatagcggtgtagtggccggagcgaatcttctcggtgaagccccaggagagcatggcagcggcagtggcggcggaagtggagacccaagcgtagccagcggtgccgttggcggcgaaggcggaaccagcgttgaagccgaaccagccgaaccacagcaggaaggcgccgagcatcacgaacggcacgttgtgcgggcggaacggctgcgtgccgaagcccttacgcttgccgatgatgagcacgataatcagggcggcgactgcggcgttgatgtgcaccacggtaccacctgcgaaatcgtgggcggccgcgccgatagccttggagatggcgccgtcagcagacagcagaccaccgttccagaccatgtgggccataggagcgtagtcgaaggtaacccacagcgccacgaagatcatccaggtgctgtacttcacacgctcggcgatggcgcc

SEQ ID NO: 2118 - DNA, 4571 bp, Unknown
  R51_24m  MAG No. k141_4081
cagaacggcaacggccggaatggttacggcaatggcaacggcaacaacgatggcggcaccggtgatggcggcggcttctccgacccgttcggcctgtggtaaagctggttcagcgcgtcacacggcgttgagcggtaaccgctgaacaccgtgtcagacaagcaaaggcccgtggcagtgagcaaactcctgccacgggcctttcgtatgcgttattgtgccctgcgcccatgccgccaacgtagtttcgatatccggcatgtcgcgtgacgctcgttgatagggtaggccaagcactgagttcgggcggtgctccgaacaaagcgcataattcaatacaaaactgaacatttctttacgccgtgtatcggaaggtcgcgcgggagccgagcaaagcgaagccccaggcaaagccgccggtgggttaacaaggcgtgaccgcagcgccgattgcgcgggccacgcttgccgtgccgcaatcgactccgtatacgagcgtaaggagcaatgatgagcagactcatcagattcttcaccaaaattcttgacatctgcaagcttgtgccgatgcttccggtcgtcgtcatcgccgcgattccgttggctttactgggcgattggcgtccgtggggcaatgcgatggcgattccggtacttggcaatccgggcttcggccagtggctggttatcgcattggtgctgattatcgtgattgacactgtgcgcggcatgattgacgatttgcgccacgggcaggtcggggttgatgtgctggccgtggtcgcgatcctctccaccgtggccgtcgctgaatactgggcaagttggacggtgacgctgatgattacgtccggcgaggccattgaggaatacgcccaagccaaggccgagcgcagtctgaccgcgctgatggaggccgcgccgcagaccgcgcacgtcgtcaacctgcctggtgtggggcgtgggtttgctgccgataagggtgattcgtccgacagcttccggcgtgtgggcttggcaacggctgccgccgccgcgcaccgattcgacacggtgtcggtcgagcaggtgcagctgggcgatgtactcatggtgctgccgggcgaaaccgtgccggttgacggtgagctgctatccggcacggccacgcttgacctgagcaatatcaacggtgagccggtgccgcgtgaagtgttcgccggcgcccgcgtgatgtccggcgcggtgaacggctcgactgcattgaccatgcgtgccacccaggtggccgccgattcgcagtaccagcgcatcctcgagctcgtggcctccgcgcaggagtcgcgcccggccgtggtaaaaaccgccgaccgcttggctgtgccctttaccgtgctctcgctggcgattgccggcatcgcatgggcgatgtccggggtgccgacgcgattcgcccaggtgctggtgctggccacgccctgcccgctgctcatcgccgcaccggtggcgtacatcgccggaaccggacgcctcgccgcagccggcgtgcttatcaaagcgcaagatgtgctggaaaaccttggccgcgtcacgcaggtgttcttcgacaaaaccggtacgctcaccgtcaagcagccgcaggtcgtgcgcgtcgagatgctgcccggcgccgcaacccgtctcaacgaagaccatgtgctgatgatggccggcgtggtggaaagctactcggtgcacatcctgtccaaaggcattgccaaggctggcgtggaggcgatggcccgactgcgtcagcggttcgaggatggtcagcgcctatgccccgagccggaggccagctggcccggccatggacgggagtatccggtcgtcaagaacatcaatgaagacgccggcaaaggcgtttccggcgaggtgaacggccacgcggtgcgcgttggccggctgtctttcgcggccgccggggaggatggattcttggcggtcgatcggaccacccccagtcagtctgcgactgacagcccccgccagcgggggctcgatgcggcggtccccgccggggaggatggggccttggcggccggcgaggctgcccccctcagcccgcgaagcggccagctccccctaagagggggagctcagcaaaaagatgacctgcgcactcgctttggcctgctgcagccggatgagatggcgtcctacgtgtccgtcgacggccagctgatcgcacgcatcgtgctgcgcgatgtgccacgcgccaacgccaaaacggcgctcgccgatctgcatgaactcggcgttaccaagctcgccatgctcaccggtgataagcgtgcctcggctgagattatcgcgaacgaggtcggcatcgacgaagtccacgccgaactcttccctgaagacaaggtcgccgccgtcaaggccgctacggaggcaagcgtcgtgacgaccgggcgtacggaccatgacggcacccccgtagtcggtgccgcccccggcattcgggccgacgattcccaaccgtcgcgttctcgatacggccacgccgcaacccgcaaaccggtcacgatgatggtcggcgatggcgtgaacgacgccccggtactcgccgtcgccgatatcggtgtggccatgaccgacggcacatccaccgccgcttccgaaagcgctcaggtagtcattatgaatgacaatatcgccgccgtgccgcgcgccatcgccattgcacgccgcaccaagcgcgtgatgcttcaagccgtaatcgcgggccttgtgcttgccaccatcggcatgattgccgccgcgttcaacctcattccagtagtcgtcggtgccttcctccaggaggccatcgacgtggtgagcatcctctgggccctcaccgccctgattgatcgggattaggggatacggcccgccgcgtaccgcgacatggagccggccgacgcaccgattgcataccggtgcggcggccggcttgttttttgtcgtcgcttttcttgcgttcatgccgtaaggcccgttccgggcgatgccgatgccgtccgtttcgaatcgcagaaccgcgcccgtcggcgcccgggcgaaatccattcccgtgtattcccttgtgagcacagggttttcggcgtctcgttaacgaagacgtcatacgtgagatgttttggaaacacaagggcaacacgacgcgcgaaaggagttgggataaatgggcatgtaactgcttgagcgtcgtgcgagagaggaacaggcgtatggcgaagttgggaatgatacgaccggttgcggccgctatggtgctcgccttgaccagcggctgtggctggggccgcaccgtggccgacaaaaaggccatggaatccgatggtcccatcaagcccgatccgtatctcaaggcgtatgcgtgggccgggagcctgcagagcccgggttcggattcgtccaagtgagtgaagggagaaggaggaatgaacatgcttataccgcggattgtcgagggactgccaagcggctcgatatggtcccagcaggcccgattcgtatctcaaggcgtatgcgtgggccgggagcctgcagagcccgggttcggattcgtccaagtgaataaatggagatagagggatgaacatgcttgtaccgcagctggtcacgggattgtccaatggctcgatactgctctggcggcgctcgggctgtcgttgaccttcgggcagatggacgtgatcaacaacgcgcatggcgaattgatgatggccggtgcgtatacggcgtacgccatgagcacggtcttcgccagcaagacgcttgcactgggcctcgcgctggtcgttgcccgggttctagatagaagcgcaacacccgctctatggttggaggtgttcaggttctaactggagaaggtgttgcgcccatgacgagagtgtattcccacctgtcggccgaggagcgggtccggatcgacgagctgaggaaccgcgaggggctcggcgtgtgccagattgcgttgaggatcggccgcggcaagtccgcggtcagccgcgagccgggacgcggcctgtggttcgcgtccaacgagaacgactcctaccggccctacaggtcgaaacggctgaagacgggctcgtggacgagtcgctcggcatgctcacctacttcgcggacccgtactcgtcctaccagaggggcagcaacgagaaccgcaacgggcgcatccgccgctacctgcccaagaggaccggcttcgacgacctgacggacgaggacctgcaggccatcgtccaggagatcaacgacacccccatgaaggtcctggactgggaaacgcccaacgaggtttggtaccgcgagctcggcaaggcaatgtcaaagacaagtcacccaaggacgagtgttgcacttacaaattgaatccgggcctctgttgcaacggaaggttttgcgttaggctagagcgcgtgactgaatctgtgaacactgaacttcgtattgctgtaatcggcgctggcccggccggcgtctattcctccgacatcttcctgcgccagctcaagaaactgggcgaagaactcggcctcggcaccaaggcccgcatc

SEQ ID NO: 2119 - DNA, 36082 bp, Unknown
  R51_24m  MAG No. k141_4087
atcgtgctgccgatcctgcacctcaacggctacaagatcgccaacccgaccatcctgtcccgcatctccgacgaagagctccacgagttcttccacggcatgggttacgagccctacgagttcgtcgctggcttcgatgatgaggaccacatgtccatccaccgccgcttcgccgagctgtgggagaccatctgggacgagatctgcgacatcaaggccgccgctcagaccgacaacgtgcaccgtccgttctacccgatgctgatcttccgcaccccgaagggttggacctgcccgaagtacatcgacggcaagaagaccgagggctcttggcgcgctcaccaggtgccgctggcttccgcccgcgacaccgaggcccacttcgaggtcctcaagaactggctcgagtcctacaagccggaagagctgttcgacgccaacggcgctgtcaaggacgacgtccttgccttcatgccgaagggtgagctgcgtatcggtgccaacccgaacgccaacggtggtgtgattcgcgacgacctgaagctgccgaacctcgaggactacgaggtcaaggaagtggctgagtacggccacggctggggccagctcgaggccacccgtaccctgggtgcctacactcgcgacatcatcaagaacaacccgcgcgacttccgcatcttcggaccggatgagaccgcttccaaccgtctgcaggcttcctacgaagtcaccaacaagcagtgggatgccggctacatctccgacgaggtcgacgagcacatgcacgtctccggccaggtcgttgagcagctgtccgagcaccagatggaaggcttcctcgaggcctacctgctgaccggtcgtcacggcatctggagctcctacgagtccttcgtccacgtgatcgactccatgctgaaccagcacgccaagtggcttgaggctaccgtccgcgagattccgtggcgcaagccgatcgcctccatgaacctgctggtctcctcccacgtttggcgtcaggaccacaacggcttctcccaccaggacccgggtgtcacctccgtcctgctgaacaagtgcttccacaatgaccacgtcatcggcatctacttcgccaccgatgcgaacatgctgctggccattgccgagaagtgctacaagtccaccaacaagatcaacgccatcatcgccggcaagcagcctgctgccacctggctgaccctggacgaggctcgtgccgagctcgagaagggtgccgccgcttgggattgggcttccaccgccaagaacaacgatgaggccgaggtcgtgcttgccgccgccggcgatgtcccgactcaggagatcatggctgcttccgacaagctgaaggaactgggcgtcaagttcaaggttgtgaacgttgccgacctgctctccctgcagtccgccaaggagaacgacgaggctctgaccgacgaggagttcgccgacatcttcaccgccgacaagccggtgctgttcgcgtaccactcctacgctcacgacgtgcgcggcctgatctacgaccgtccgaaccacgacaacttcaacgtccacggctacgaggaggagggctccaccaccaccccgtacgacatggttcgtgtcaaccgcatcgaccgctacgagctgaccgctgaggccctgcgcatgatcgacgccgacaagtacgccgacaagatcgacgagctcgagaagttccgtgatgaggccttccagttcgccgtcgacaagggctacgaccacccggactacaccgactgggtgtactccggcgtgaacaccgacaagaagggtgccgtcaccgctaccgccgctaccgctggcgacaacgagtgataacacctccacggtgttgttagttcgctaacgccaaagggctcgggattcgtcccgagccctttgcttattcataagccccctctgacgaggaggctgtcatgcgaagcatgactgggggagagaaaagcggaagcgaaggcgagagccaagactgaaaacagcccataaattccccaccccaactaatccttaaggatgacaactccccatcaattcaatcctgcgcatgatggaaaccacgccattcctccataggcttggaaccagtatccgggcgcgaggctcggagccagccatgggggagagcacatgcagaaggatcagcagcagaccgcaatcatacaaccgttggacgctaccgacaccgtggaatcaagtgtcgacgcccttgcccaaggcgaggcggagaacgcggaagtcgccgaattcaaccgattaatgcgcgaacgtgagacgcgcaagaaaaagcgagtggtgcatcgcatcatcgtcgtcgccgtcgtggcggtactgattatcggctttatggtggtgcacgcgattattaccccgtcagatgggggcgtgtctccggtatccacggcaacggtggaacgtggccatttcgtcgaccaagtcagctccaccggttccatagaacccatcaactccaccgtcgtcgccccgcagatcgacggcaccatcggcgaagtcaaggtgcaggaaggcgcaaccgtcaacgccggcgacgtactgtttaccatcaacaacgacaagctcgatagcgacgtgaatcaggccgatctggctctgcgagcagcgaactcaaaccttaatgccgcccagcagcaggtgaatcaaatcaatgcgaccataggtcaggcacgtaatcaggatggtgaggaaggccaagccgctgccgatgatgcggccggacagctgcccgctgcacaaagcggcgtggagagcgcgcaggtcgccgttcagcaagcacaagccacctatgacgaggcggtcgcccaagccaacaagcgtacggtcactgctccggtctcgggcacggtgctgaccatgagcgcggtgcccggtgccgccatcggagcttcctccgatggctcatccacttccgccggcgcagacggtaaaccattgtgtcagatcgccgacctgagtcagatgaaggtcaatgtcaacatcaatgagctggatatcactaaagtggccaaggaccagagcgccaaagtcacgttctccgcggtgccgggactgacgctcgatgccaaggtggataccatcgccagcaccacgtcgcagttggctgattcctcggcaggcgggcagagtggcaacggcggcgtgggatacgccgtgcgtctcatcattcccgcccctgatccgaaactgaagccgggcatgacggccagtgtgaaaatcaccatgcagagcattgacaacgctttgatggtgccgctcgccgccatcgtggatgagggtaaggagagcagcgcggtcatgctcgagaccaacgccgaaacccatgagttcaagcgggtgcgagtcacggtcaaagccaagaacaacaccaaagccgttgtggaaggcaatgtgagcaagggcgatgtcatcatgcttgatggcgcttcggctgccgacaatactggcgatgctgcttcttccacctcgcaaaccgcggcttcggacgaaagggcacgctgatatgttcccgtttcgttccgacgcgagccgggcaaatcgcggcaaacggcgtaatgagaccattgccgtgcccaccgccacagccaacgtcatcgaggttgaaaacatcaaccgcatcttcgagacaggcgacacctacacccatgtgctcaaaggcatcaccatgaacgtgcgccaaggcgagttcctcgccatcatgggaccatccggttccggcaaatccacgctgatgaacacgctgggcctgctcgaccgcccatcatccggcacctaccgcctgtgcggcatggacgtgcagaatctgagtgatgacgaacgctccgaactgcgcgggtggctcatcggcttcgtgttccaatccttcaatctgctgccgcgcaccagcgtgctgcgcaacgtgatgctgcccctggcctattccgactgcccggtgcgtgaacgggaagggcgtgccatcaaagcactccaatcagtggcgttgagtccggaactgttcgaccgcaaaaccaatgaactctccggtggtcagatgcagcgcgtggccatcgccagagcgttggtacaggacccgccgctgattctcggcgacgagccgaccggcaacctggactccaaaaccggcgatgcggtgatgcacacgttcgaacagctcaagcagcaaggcaaaaccatcgtgctcatcacccacagccccgaagtggccgaacgcgccgaccgatgcctgcacatgcgtgacggcgtactgcgtgaagggatgtaccgatgagaacacgggatctgctggcggaaaccggctccgcactgagggcgaacaaaggcaaaagcgcactgaccattctcggcatcgtcatcggcattgccgcggtgattaccatgacctcactgatcggtggcattcgagactctctggtcggcgaactgggtatgaacgcggcgcgcacgatttcgatttacacggacgtcggcacccttgacgacgaacagatcactgcgatgcgcgaggaactgaccgactacgagtacttctcgccgacgaactatggtgccgcctcgtcaatcgccgcgcccggtaccaccgacaaggtgtcggcgagcatcaccggtgtcgacgagcatttcttcgatgtatccggagtgacgattggtcgtggacgggccttcacatcgagtgaagcaacgagtggtgcaatggtggtgattctcgacgggcagggcgtgcagaagctgttcggcagcgcggacattgacgccatcggcagaaccgtcacgcttgacggcaatgaagcaaccgttgtgggtgtggtcgagtcgtctggattgatgggcggcgtgggcggcgacagcgtgaatatctatatgcctgccaccactgtggcgctgcggtttgcgtcctcgaacatgggatacatgcagatctacggactggccaaggacggggttgatatcgaccagctcacggaacagacgaagaccgttgtcgctcgcatcatgcgtatcccaaccgaacagatcgaccagaatctgtcggtcgtaagcgcccaatcctccatcgaccagctttccagcttcatgagcgcattccaggtgctggcgggttcggtggccggggtctcgttgctggtgggcggcatcggcattatgaacatgatgctcaccaacgttaccgaacgcatccgcgaaattggcctgcgccgggcattgggtgccactcggcgtgacgtgaccgcgcagttcctcgccgaatccattgcaatcacagtgcttggaggtcttatcggcacgttgatcggctacttgctgtcgttgggcgccgctggattggtgtccggcatcgccggtggcatgagtatcgcgccagcagtttccgtgcagtccatcggactggcagtgggcatctgcatcgctgtcggcgtgattttcggctactatccagctaggcgcgcggcaaagctcgacccggtcgaagcgctacggcatcaataatcgcgtagcaccccgaaatgcagtagggcattgcgcacaccgtcgtggtccacgtcgtcggtgatgtaatcggcggcggcctttggctcggcggtcgcattgcccatcgcgaccccgatgccggcgtaggcgagcatatccgtgtcattgccgccatcgccgaaggccatggtctgcccgcgcgtgatgccgtaatgcgccatgaaccgctggatgccgcgcggcttgccgccatcggccggaatcagatccgtgaaatccggatgccaacgcaccccgcgcacattgctgcacagtcccaccagttcggcctccaactcgggtccgacaaagggactgatctggaaagtctcatgatccagcgcgcgggtgcgcgggtcctcaaaataccgggtcggtgcggttttgcccagtttgctccacgtggcgcgaagcagatcattggactggttgaagtacacgtaatccttctcgccgaaattgcacaccacatcggggtgacggtccagccagtcgagaatcacctcaatatcagcagtatccaaggcctgcgaggcaaagaagccggtgtcatcaaagcaatactgcccattgaacgccaccacgccatcgaacgtcaccggcatggtatccagcaccacgtgcatctgtgaaggcgcgcggcccgtgcaaatcagcaccttgacgcctgcggcctgcagccggtgaatcgcctcgattgtggaatccggcaccgtatgggtcgtgaaactggtgagcgtgccatcgatatcgaagaatacggctcggatatcggcattggcagtatcggtagtcatagcttccattgtcaaagcccctctcgacgtgctttccggcgtgttcggcacgcctatagcgggttatcaaacgcacgaatcccggccattgcatgcgcgccataaaagacacctatacggcaatcggccattttccgtcactttcgcggttcaagcgcgttatggtgttacccgacatcaattttggagagaggaaatccaatgacagcagcaacccagtcggcaactccggccgctcctaacaataacgagccggtgcgtgtgaaccacaccgtccgcaacgtcatcatcaccatcgtggtcgtggcgattatcgccgtggccgcgttcttcggctaccgcgcgtttgccggtgccaacgagtcgtccgccaagggcagcaagggcaacccggtcaagatcggcgtggtcggcgctaccaaccccgaatgggtcaagttcaagcaggacgccgagaaggccggcatctacgtcgacatcgtcgacttccaggactacacctccgaaaacccggcccttgactccggcgagctggacctcaacgaattccagcacctgctctacttggccaactacaacgtgagcaacaagaaggacctgcagcccatcggcggcaccgccatctacccgctcggcgtgtactccaccaaggtcaaggacatcaaggacctgaagcagggcgacaccgtcaccattccgaacgacgaaaccaaccaggcccgcgctatcggcgtgctcaaggccgccggtctcgtgacgctcaagggcgactggaccgccttctccactccggccgacatcgacgaagccaagagcaaggtcaaggtcaccccgctcaaggccgaacaggtggccaccaccctgaaggacccgaccatcgccgctggtgtgatcaacaacgactacgtggccgacgccggtctcaacccgaaggacgccatctaccaggatgacgccgaatccgaagaagctcgcccctacatcaacgtgtgggtggcccgcaaggcggacgtgaacaacgagacctacaagaagctcgtttccatctaccagcagaaggatgtgctcgacgccctgcaggagaactccggcggtaccgcggtgttcgccgacaagttcagcgccagcgagctgcaaggcttcctgtccgacattgagaaggacgccaaagcccagcagtgagccgtggctgatacgagtgcacgactaacctgtccatagccattaccaccaagcggagcgagtacccgagccaacaatcgggattcgctccgcttccgtgaccggacatcaacaaccagcatcagggagcactatgagcgaccccatcatcaccttcgaccatgtcgtgaaggaattcaaaacacgcggacgcggcgcgaacatcgcacgagccgtggatgacgtcagcctgaccatcgatcgcggcgacatcttcggcatcatcggctattccggtgcaggcaaatccacactggtccggcttatcaacgcgctcgaacgacccacctccggcaccgtgaccgtgctcggcaccgatatcacctctttgagtgagaccaagctgcggcccatccgccagaaaatcggcatgattttccagcagttcaacctgttctccaccaaaaccgtggcgcagaacatcgcctacccgctgcaactcgatcactggcgcaaggactatcaggatcgtcgcgtcaacgaacttctcgaattcgtgggccttagtgagcacgcaaacaaatacccctcgcagctgtccggcggccagaagcagcgcgtcggcatcgcccgcgcactggccactaatccggagattctgctcgccgacgaagccaccagcgcgctcgacccggaaaccaccaccgaagtgctggccttgctcaagcgtgtgaacgaggaattcggcatcaccattgtgcttatcacccatcagatgaacgtggtccagcagattgccggccgcgtggccgtaatgagcgccggacgcgtggtcgaatccggcgacgtatacgacgtgttcgccgcgccccagcagccggtgaccaagcgattcatcgccaccgccctgtccggcctgcccgaggaagaccgggtcgagcgattgcaccacgaatggtcgggccgcatcgtcaccgtgctcatccgccaaaaggacgtttccggcagccatggccacgaactcaaggcatccggacagaacatctccgaactcatcgccaaatacggcgtcgaatccagcctgctctacggcggcatcgacacggtcaaggggaccgccatcggtgccatcacctacgaattcaacgggcccggctggcacgtggacgaattcctgcgcgagctcgccgccaatagcgacgtcattgacttcggcaccgccgcaaagcccgtggcttacgccgacgcagttgccggacatgcctcctacgccgaagaccgcgcccatgacccactggcggccgatactgccaccgcgcccgctgtatccgccgccgcacatgaaggagacaacgcatgatcatcctcgccaactcgcgtagcgactggaacgtgctgcgcccactattgttcgaatccatcggccagaccctgaccatggtgctcgtcacccttgtcatcggcggattcctcggcctgatcctcggcgtggtgctctatggcacccgccccggcaacctgttcgagaacgcggtcgtctaccgcatccttgacatcatcgtcaacatcgtgcgcccgattccgttcatcattttcctggcagccatgcagccgctcaccatcgtcgtggtcggcacgtccatcggcaccgtggccgccatcttcccgatggtggtcatgtgcaccttcgccacttctcgtctggtcgaacagaatctcgtgccggtcgactcgggagtaatcgaggccgcgcgttcgatgggtgccggcaagctcaccatcatccgcaccgtactcatccccgaagccctggcaccgctgatcctggcctacgccttcctgttcatcggcgtgcttgacatgtctgccatggccggctacatcggcggtggcggtctcggtaacttcgccatcgcctacggctaccagaagttcgaccagaccgtcacctggacggccgtgatcatcatgatcgtactggtccaggtggtgcagggcatcgccaacgccatcgccaaacgactgctcaaacgccagcaataacaaggcatactgaccccatagatcgcggccctcgccaatatgaagcgagggccgcaatatattcttcgcgctactagaatcgggaaccatgagtgaacatatcgacatcgaccacgaactcatcaccatccgccactacctgcacgcccatccggagcgtagtttccgtgaattcgacaccagcatctatctgaccgaccagctcaaggcgcacggcatcgagatcctgcacaacccgctggagactggtgttgtggggctcattcagggcgaggccggtcccgggccgcgtatcgggctgcgcgccgacatcgacggcctgcccatcgtggaagactccggactggagttcagctccgtcaatgaaggcgtgatgcacggctgcggccacgacctgcacatgaccggtctgctcggtgccgccttctggctcgccgagcaccgtgacaagttcgccggctcaatcaagattctgttccagccgagtgaggagaccggccaaggcgctcgcgccatgatcgacgccggactcgtggatgacgtcgaagccattatcggcacgcacaacaaccccaactatgcgtccggccagctggccatcggcgtcgagccgatgatggccggctgcgtgaaattccgcgtgaccctccacgcccaaggcacccacgccggctacccgtacaagggcaccgggcccatcgaagcgctcgccagtattattctgagcctgcagaccatcgtgagccgcaacgtcacgcccttccacccgctggtgctgtccgttaccgaagtgcacggtggccatgtgtggaacgtggtgcccgccgaagccggattccaagggactgtgcgctatttccacaagtcggatggcaatctggtcggccgccgattcaaggaagtggtggaacacaccgccgaggcatacggtatcagcgccgatgtggtctgggatgatttccaagacccgctggtctccgatccaggtcttgccaaggccgtggcggcggatgtcaacgactacgcgcagctcgaaccgatacgtcagtcgatggcgggggaggacttctgcgaattcgccaaggtgacgttgccggtgttcgcgttcgtcgggtcaaacggccaggaaggttgcgccgactggcatagcccgcatttcgtgggtctcgacgaatccattcccaccttcgtcaacttctacgtcaacgccgccctgcgcgtgctcaacgagctgaggtaaatccttttttggctcccctctggaggctgaggcgttaggcagacagcccaatgggctgtctgcagccgaaggtgaggcgacagccgaaccagatatgcgcgggcctcgcccgtccataagtgcaggacgagctatcagcgaagctgactgaggggagtggcattcgttcattaggtcgattcatcgtccattaggtcggtgaacgacgatactggttgttggaatcgcgccattgcaacgactgatatcgcattgcagtgacctaatgaacgcaaaaacgacctaatgaatgacgccaagccggaagaacaggcaatccgacgccatacgcggctacactaagaagctatgacacagcttcgcttcgcactcgcccagatcgacacctgcgtcggcgcgctcgatgccaacgccgccaaagtgctcgactactcccgtaaagccgccgcagggaatgcccaagtggttgttttcccggaaatgaccctcaccggataccccatcgaagatctggccctgcgccgcaccttccgccaagccgcatgggacaaggccaacgaactcgccgcccagctcaacgacgacggcctcggcaatctgttcgtggtggttggcaccgtgggcactgatcgtaagacctccaagccgcgcaaccgactggtggtattgcatcagggcgtggtctgggccggctacgacaagcacttcctgcccaactacggcgtgttcgacgaattccgtatcttctccgccggcgaccgttccgtgaccctcgacgtggatggtgccaccatcggcgtggccatctgcgaggacatctggcaggatggtggcccggtggccgacctggccaccaagaacatcgacctgctgctcaccatcaacggctcgccgtatgaggaaggcaagaccaacacccgtttcgagctcgcccagcgtcgtgccgccgaagtcaacgccccggtcatctacctgaatcaggtcggcggtcaggacgacctggtcttcgacggtggcagcttcgtggtcgatgccgacggcacgcttatcgaacgcggcccgatgttcatggaaaacctgacgttctgggacttcgattccaccgccgaacatcaggtcaaggccgagatcgttccggaactcgacccggacgaagaggtatacactgcctgcgtgctcggcctcaaggactacatggccaagaaccacttcaccggcgtgacgctgggcctctcaggaggcatcgactccgcactggtagccgccatggcggccgacgcatgcggcggcgagaacgtctggggcatctccatgccctccatgtactcctccgatggttccaaagacgacgccgctgacctggcctccaacatcggtgcccattacgaggtccagcctattgagccattgttcaacgcctaccaacagcaacttgaccttgatggcgtctccgccgagaacctgcaggcccgcatccgcggtgtgatcgtgatggccagttccaattctcgcggcctgctcgccgtggccaccggcaacaagtcagagctcgcctgcggctactcaaccatctacggcgatgcggtcggcggctacgcacccatcaaggacctgctcaagacccgtgtctgggagatcagccgttggcgtaacaaggccgcggccgcaggcgtcggtatcggcgggctcaagatcgtgggcaacgaggacggcaacgccggcatcccgttgaaggacggcgtgatgattccggtctcatccatcgagaaggctccctcggccgagttgcgccccgggcagaaggactccgactccctgcccgaatacgcgctgctcgacaaggtgctcgctgcatacatcgagcacgcgcacggccgcgccgacctgttggccgacggcttcgaccaggccaccgtggacactgtgatgcgattggtggaccgcgccgaatggaagcgccgccaatacccgttgggaccaaaggtcacggccctcgcgttcggccgcgaccgccgactgcccgtcaccaacgcgttcagggaataaacatatattgctcccgccagcgggagcaagtaataccgttgaggaggtaccaatgacagacgataacaagaagcagtggtatttcaacaccgtcaagaagcaggccgagctgggcatggtctcaccgattgaacagcgcatgggtccgtacaagaccaaggaagatgccgaacacgcctgggacatcgtggtggaccgcaacgccagatgggaggaggagaactggcgctggaagaactacggtgtgaaatccgcgcaagcgaacgatgaagactgacggccaaaacagacggatacggttctgctgtcaatctcaagaccgaaccgctcaccaagccgctcatacgaacatcacagtatgagcggtttcccatatctggagacgtgcaatagccccatcaatacctagaaaccattggaatggtagcgttcacaaaaaacaatgtgagatagctcactcccaatttcggcttttcccaagcaagtgccaactacactgttgaaccaagggttccgtgaagatgcgaaacctacaaccccatttaaggagtgacatgaccgcagtagaaaatgcagctgtctcccaagaggagctcgacgccaaggcatgggccggcttcaccgagggcaactggcagaaggatattgacgtccgcgacttcatccagaagaactacaccccgtacgagggcgacgagacattcctggctcctgccaccgagaagaccaagcacctgtggaagtacctcgacgacaactacctggccgtggagcgcaagcagcgcgtctacgacgtggacacccacaccccggctggcatcgatgccttcccggccggctacatcgactccccggaagtcgacaacgtgatcgtcggcttgcagaccgacgtgccctgcaagcgcgccatgatgccgaacggcggctggcgtatggtcgagcaggccatcaaggaagccggcaaggagccggatccggagatcaagaagatcttcaccaagtaccgcaagacccacaatgacggcgtgttcggcgtctacaccaagaacatcaaggtcgcccgccacaacaagatcctcaccggtctgccggatgcctacggccgtggccgcatcatcggcgactaccgtcgtgttgccctgtacggtgtcaacaagctgatcgccttcaagaagcgcgacaaggactccatcccgtaccgcaacgacttcaccgagccggagatcgagcactggatccgcttccgcgaggagcacgacgagcagatcaaggctctgaagcagctcatcaacctcggcaatgagtacggcctggacctgtcccgccctgctcagaccgcccaggaagccgtgcagtggacctacatgggctacctggcctccatcaagtcccaggacggcgccgccatgtccttcggccgtaactccgccttcctcgactgcttcatcgagcgcgacctcgaggccggcaagatcaccgagaccgacgcccaggagctcatcgacaacatcgtcatgaagctgcgtatcgtccgcttcctgcgcaccaaggactacgacaacatcttctccggcgacccgtactgggcgacctggtccgacgccggcttcggcgacgatggccgtccgatggtcaccaagacctccttccgtctgctcaacaccctgacccttgagcacctcggacctggccctgagccgaacatcaccatcttctgggatccgaagctgccggaaggctacaagcgcttctgcgccaagatctccatcgacacctcggccatccagtacgagtccgacaaggaaatccgttcccactggggcgacgacgccgccatcgcatgctgcgtctccccgatgcgcgtgggcaagcagatgcagttcttcgccgctcgcgtgaactccgccaaggccctgctgtacgccatcaacggcggccgcgatgagatgaccggcatgcaggtcatcgacaagggcatcatcgacccggtcaccccggaagccgacggcactctggactacgaaaaggtcaagaacaactacgagaaggctctcgagtggctgtccgaaacctacgtcgaagcgctgaacatcatccactacatgcacgataagtacgcctacgagtccatcgagatggccctacacgacaaggaggtgtaccgcaccctcggttgcggcatgtccggtctgtccatcgccgccgactccctgtccgccatcaagtacgccaaggtgtacccgatcaccaacaaggaagccaagaacctcgaaggccacgagtacgagtacgtcgaaggcgccgacgacgatctggtcgtcggctaccgcaccgagggcgagttcccggtctacggcaacgacgacgaccgcgccgacgacatcgccaagtgggtcgtctccaccgtgatgggccaggtcaagcgcctgcccgtctaccgtggcgccgtcccgacccagtccatcctgaccatcacctccaacgtggagtacggcaagaacaccggttccttcccgtcccgccacaagaagggcaccccgtacgccccgggtgccaacccggagaacggcatggactcgcacggcatgctgccgtccatgttctccgtcggcaagatcgactacaacgacgccctcgacggcatctcgctgaccaacaccatcacccccgatggcctgggccgcgatgaagccgagcgcatcggcaacctggtcggcatcctggacgcgggcaacggccacggcctctaccacgcgaacatcaacgttctgcgccgcgagaccatggaggatgccgtcgagcaccccgaaaagtacccgcacctgaccgtgcgtgtctccggctacgcggtgaacttcgtcaagctcaccaaggagcagcagctcgacgtcatctcccgtaccttccaccagggcgccgtcgtcgactgatgaccaaccccgcgaaccgcggcaatgactaactgaaggggtggggcacggctccaccccttccttattttccacagaccttcgcatcatttggaacaggaggacaactatgcccgcaacacccacgttccgcaccacgaccaggcatatgctcaaggaatcgaagacctatgcctcgcagactttgatgggcggcctttccggctttgaatccccaatcggactcgaccgacgtgaccgcctttccgccctgaaatccggcgatatcggcttcgtccactcttgggacatcaacacctccgtggatggaccgggcacccgcatgaccgtgttcatgtccggctgcccgctgcgctgccagtactgccagaacccggacacttggaagatgcgcgacggcaagcccgtctaccttgacgccatgatcaagaaggtcgatcgttacaaggacctgttcaaggccacgcatggcggtatcaccttctccggcggcgaatccatgatgcagcccgccttcgtctcgcgtgtgttccatgccgccaaggagatgggcgtgcacacctgcctcgacacgtccggcttcctcaacacgagctacaccgacgagatgctcgaggacatcgacctgtgtctgctcgacgtcaaatccggcgacgaggagacctatcacaaggtcaccggcggcaccttgcagcccaccatcgattttggccagcgactggccaaggccggcaagaagatctgggtacgatttgtgctcgtgccgggcctgaccgactccgaagagaacgtcgaaaacgtggcgaagatctgcgagtccttcggtgatgccgtcgaacacatcgacgtgctgggattccaccagcttggccgcccgaagtggcacgaactgcgcatcccatacccgctggagaaccagaagggacccaacgccgccacccgcgaacgggtagccaaccagttcaaggaccacggcttcaccgtgttttaaattgcagggccgaaccgcgcgtaaataccacgattcggcccgttcgcccataccctagagatatggccgacatctacgcatttcctatgggagcgtccaacgacggacgccccgtacgccctcagggtgtgccggatgaagtatgggcagctgtcgaatccgtcagcaccatgaagcgcatccatgacgtgcgctatcgggagattcccgtgccttccaccttggccgattatggtatcggcgtggaattcgaagcgggagagcgtgccctcggcgatgccttttccaccggtcttggcaacgatgccgaatcacgaatcgccacaggctggatcatgatgctttatgctcatgagctgcgcattgaccgggattccaactggcgttgcgtggcgttcgcgcggctgccgctggaaaccgccgaaaacgattctctgacccccggcatgtactgggatgacatgtgcgactatttcgacggcatcgagccggattcggtatccggcacagtcaccgtgacccaaaacacggcttttggttcgatggccggctccaccagcgccgggtgtgagattcgcgtctcatggaccccgcttgacgggaccggaccggacggtactatggacgccggcgcacaaatccgctcgtgggccgcattcatcagatccaccatccgttttgaggaggatgacgccagttgagtgacgtccgtgacaccgaaccccgactgctgaaagagcctcgcgggggagtgcccgatgtcacttcgtcgctggatggctatcatcgagcctgcgatgcgctggccgaggcgacgggctcgctggccgccgacgccgaacgggcgtccggattccgctatggacatgaggattggctgattcagttcaaacgtgaaggtgcgggcatcgccttgcttgatcccgtcgccctgacacgggccggagctgactggaatgaattcaatgacgccgtgggcgatgctacatggattctgcatgattctctgatggacttgcccggattcgccgaaatcggactcaaacccaaggccttgttcgacacggaaatagcggcgcgattgctcggcctgcaccgcttcggtctggccgccgtcaccgaacactacctcggcatcacgctggccaaagagcattccgccgccgattggtcctaccgtccgctgccgcgcgactggcgcaactatgcggcgctcgacgtggaggtgcttatcgaactcgaaaccttgatgcgtcgtgacctgaaagccgcaggcaaggacgagtgggccgctgaagagttttctcacgctttggttgcgggccttgccccgcgcaaacctcatccgattccttggctgcgtatctcgcgcatcacccagctgagtcgtgatccgaggggcttggccatcgccaaatccctatgggaggagcgcgaccggctcgcccggcgatacgacatcgctcccagcctgttattgaccgattcgtcaatcatcgaggccgcgaccaacaagccgcacaatgccgcccaattccgcgcgctccgatccctgaacgagcgtgtgcgcattcataccggcaccgagcaggacaaaatgttcgagcggtacgcgccgattcagcgtacggtcaagccgaaggtctggaagcaggccatcgaccgcgccatggccctgaagcccacccaatggcctaccatgcccgcccccgaacaggacgaaaacggtgtggtgaacgcgccccgatccatgcgactgtggcaacagcgccatccggagcgttatgaccgtctgcagcgggtacggcgtgtgatcaaccgcatcgccgaagacacccgcacgccggccgagatgatcatcaagccacagatcctacgcaacctgtgctgggtggaagacccggtggaagtggacgtcgagacgttcctgatcgagcagggcgcaagaaactggcaggtgaaactcattgcaccgtccgtaagtggcgttatcatgtagaggttgccttacggcagaactgtaagaaataacgacttttgaggagtcattagcgtgaagatcagcgttcgtaacctcgagcccaccaaggtgaagctcaccgtcactgttgaaccggaagagctcaacccgtatctggatgcggcccgtaaggaaatcgccaagcaggtgaacgttcccggcttccgtaagggccacgttcccggcaagatcatcgaccagcgcatcggtttcgccgccgtcgccggtgaggccgtgaacgacgcggtcccggagctgtactccaaggccctggatgagaagaagattcgtccgatggctcagccggagttcgacgtgcaggatgttccgcagtccgccaacgacgagaccaagctgaagttcaccgccaccgtcgagcgtcgtcctgacatcgaactgccggaaatcgacggtcttgagatcgccatctccaagccggaagtcaaggatgaggacgtcgacaagcgcctcgagaccctgcgtcagcgcttcggcaccttggtcggcgtggaccgcccggccgccaagggcgacttcgccaacatcgacctgactgctgagattgacggcgagaccgtcgactcccaggaaggcgtgagctacgagctcggctccaacaccatgctcgacggtctggacgaggctcttgacggcctgtccgccggcgaggagaccaccttcgaaggcacgctggaagccggcgagcacgagggccagaaggccaccgtgaaggtcaaggtcaactccgtcaaggctgaggaactgccggagctgaacgatgagttcgcttccgaagcttccgagttcgacactctggacgagctcaaggctgacatccgcaaggctgccgctcaggacgccgaaggtcgtcaggccaccgaggctcgcgatgccttcatcgccaagctgcaggaaggtctcgagatcccggtgccgaagggtgtcaaggccaacatggtcgaagagcagctcaagggcatgaccccggacccggagaaggccaccaaggagcagaaggctcaggccgaggagaccgtggagaaggatctgcgcgatcagatggtgctcgacgccctggccgagaagctggacgttcaggtgtcccagtccgacgtgttcaacttcctcgcttccatcgcccagcagtacggcatggacccgaacaacttcatccaggccatcatcaagaatggccagcttggctccgctgtgcaggaagtcggccgttccaagggtctgctcgccggcatgcgcgccgtcaagttcaccgctgatggcgaggttgtggacctctccggcttcctgggcgaggccgctgaggacgaagagtccgagtccgtcgaggccgcttccgctgctgccgccgtggccgacgaactgtccgccaaggatgacgccaaggacgctgagtgagcatagcctcatcgcgttagcgtgattgtttgagcccggaatcgtgtttcacggttccgggctcttcctattctggtaaaaggactatttctttggctcccctttggggggagctgtcgggcgtagcgagactgaggggagttcccaaggcatactcgttgcatagcgtgcggaggttgacatgcagccaacggttactatcaaacgccttggttggctcgctgcggcgaccattgtgctcggcgtgctcatcggtgtgggagcaggtctgctgaccctgttgctctacggcgttgaacatgtgctgctcggctacatcgaaggcccagaattgtctggtccattcggcgtgcccgctgcacgccgtgtgatatcggtgaccgtgggactcggcatcgcgggcattatctggtatctgctacgacacaaaacgactgtggtgccctcagtcaagaaggccgtggcgggaaagcgaatgcctttctggcaaaccattgtgcatgtggtgttgcagattttcatcgtcggctccggtgcctcgatcggccgagaagtcgccccacgcgaactcggcgccatgatcgcgcaacgtttttgcgacctgttccatatcgagggcgttgatggtatcgaccggcgcatggtggtggcagtggctgccggtgccggtctaggaggcgtctatgacgcgccgctggccggcatgttcttcgccgtcgaaatcctgttggtggatgtgacgatcgaaaaggttgcgtttggactgggcgtgtctgccattgccgcattcgtggcggttgcgatcaaagggcattgcctgttctacgacatcaccgccatgcaaccggaatccacgccaacgttaatgctgttcgctctgatctgcggtgcggcatgtggagtgggcggcgcattgttccgaaaaggttcgcaatgggcggaagcacacaagccgaccggcaaggccattccgtggcagatgccgctggctggtctcatcaccggtttggtggcgattgttgtgccgcaggtgatgggcaacggccgtgccgcagcgcaacttggattcagcacgttcattcctgaaaccgccggcactgctggtgccatgcagtcggcatcttcagcggccgcctctccatggaacttgctgacgggcggcggtaatgtatccgattcggcctctggcgggggagcgggctctggaatggcctcgttttgggccatgcttcagggtgggagcggctcttctggatccgtgatgaacgccggtttcccgctgtcccagtccaatatctggatgttgctgggtgtgttggcactcacctttgtcgccaaggcgctggtgacgctgatgaccattcgctccggtgcatcgggcggtgtgctgcagcccggcatcgcattaggttccacgctgggtgcgatgctcggcctcgtatggatactgatgtttccgactgattcggtaaccgcgtgtgccttgatcggtgcggcttcgttgctttcggcctcacagcaggcaccgcttatggccatgtgcttggtgatggagctgaccgaagcgccgattaccttcttcgtgccagtcggcatggccgtggccacgtcgtcgttgatatcaaagtggttgctgagtcgtaagtaagtagatgcatatattctggctcccctctctgaggggagctgtcgaacacagtgagactgaggggagccgaggtaaagaaagctatgtcagaaaacaccgaagtccgtgcggcacttgaatcgcttgccgctgagccgctcactgagcagattgactactatcgaaagccattcatggtgttgtgggccgccattcaggaggccgccagcgatgtggccgaagactacgacttgcctgcggatatggcccaattatgggtggccgaacagatgcgccaagtcgccgattcactggtcgatcggctcgcggaaaaagccgtggcccatggtgccagcaagtccaacgtggcgcgagccgccggtgccagccccgccaatgccgcccgtcgcttcccgcgtctgggcgacgatgccgcctcccagacccgcctcctcattgacgacgtcctcgacaccttggaataacccgaaatccctacgctacccgccaaaaagcacgcgaaaagccgccttcagtcgcttcaaggcggtagtctgaacaatgttcgagtaattagaaggagaatcaaggtgagcaatacctttgcgaccttgccggtcatggcgggcgatgacgtcccggccggccccgtcgacccgattttcaaccgtctgctcaaagaccgcatcatctggatgggtgaagaggtcaaggacgatatggccaaccgcatctgcgctcagctgctgatgctggccgccgaggacccgaagaaggacatctggctgtacatcaactcgccgggcggctccatcaccgcaggcatggccatctacgacaccatgcagctcatcgagcctgacgtggcgaccgtgggcctgggcatgtgcgcttccatgggccagttcctgctgagctccggcaccaagggcaagcgttacctgacctcgcacgcccgtgtgctcatgcaccagccttccggcggcatcggcggcaccgccactgacgtgcgcatcaacgccgagctcatcatggacatgaagaaaaccatgagcgagctgaccgctgagcagaccggccacaccctcgaggagatctaccgcgacaacgaatacgaccactggttcaccgcccaggaagccctcgactatggcttcgtggacaagctcgtgaccacgccggacaccatcggcaacaaccagcagggggagtgagactcatggcaagtgaagaagcaaagttcgccgcccgtgccgaccgcttggccggccgtcatggcgtagccggtttcatgccggccgccgcccgcgcagcccagcccgcgccgaccaaccgttacatcatgccgcagttcgtggagaagaccccgtatggcatgaagacccaggacgcctactcccgcctgttcgaggatcgcatcatcttcctcggcgtgcaggtggacgacgcctccgccgacgacgtgatggcccagctgctggtccttgaatcccaggatccgaaccgtgacgtgatgatgtacatcaactcacccggcggttcgatgacggccatgaccgccatctacgacaccatgcagtacatcaagcccgacgtgcagaccgtgtgtctcggccaggccgcctccgccgccgccattctgctggcctccggcaccaagggcaagcgcctgatgctgccgaacgcccgtgtgctcatccaccagccggccatcgaccaaggattcggcaaggccacggagatcgagattcaggccaaggaaatgctgcgtatgcgcgaatggctggaggagaccctcgccaagcacaccggccaggatgtcgagaagattcgccgcgacatcgaagtggacactttcctgaccgctcctgaagccaaggaatacggcatcgtggacgaggtgctggaacaccgccagtaaaacttccgaacattgcaataccctcggtcggcaacgaccgggggtattgtatttcaaggatgacaatgataatgcgcagcgtggcggttcgacggtgcggcgcggtcggcaaaggagaatcatgggacgtgtggtgagctacaacgaggacgtaccccgttgcacgttctgcggcaaaaccgaacgtcaggtcagaaaactggtggccggtcccaacgcctccatctgcgatgaatgcatcgccctgtgcgtggacatcatctccgaggagcgtgtcaaagatgccgaggtcaattcgctgagcctgcccaagcccgctcagatcttcgattatctcaaccgctacgtcatcggtcaggagaacgccaagcgcgcattgtccgtggccgtatacaatcattacaaacgcgtcaatatggagcttcaggagtccgctgagcagcttgacgggaataacgggcacggtggccagaccggcaaacaagccaagcaatccgctcccgcccagacgcgtgctacccgccgcaacagtgaccctttggctgacgttgaggtcgccaaatcaaacattctgttgctcggccccaccggtgtgggcaaaacctatcttgcacaggcgttggcccgcgtaatgaacgtgccattcgtcatcaccgacgccaccaccctgaccgaggccggctatgtaggcgacgatgtggaaaccgtgctccaacgtcttctccaagccgcggatggcgacgtaagccgagcccagcacggcatcatctacattgacgaaatcgataagatcgcgcgcaaatcaggtgagaacacctccatcacccgtgacgtgtccggtgagggcgttcagcaggcgttgctgaagattttggaaggcaccatcgcctccgtgccgttggagggcacgcgcaagcataaggagcaggacactgcgcagatggacacacgcggcatcctattcatctgcggcggtgcgttcgtgggactgacggatattgttcgcaagcgattgggccgtcgagagaccggcttcggcgcgaattggcacgacgccgacatgaaagacgaggaattgctcgaacaggtcaatgccgatgatctggccgagttcgggctgttgcctgagttcatcggacgtttgccggtcaccagtgtgctgaaggaacttaccgtagacgatctgacggcgattctcacccagccagccaacgcgctgatcaagcagtaccgtaagctgttcgccgtcgacggcgtcgacctgcagttcaccgaacaggccattcgggcgattgctgatatcgccatcaagcaggggaccggcgcgcgcgggttgcgttcgattatcgaacgtacgttgcaggacacgatgttccagttgccgagtttggatgatgtgaagcaggtgattgtggacaaggcgtccgtagagggttccagtacgcccaaactcttgcgcgaagccgtggatgtgccgcagggacgcctcaaagttgcgtagtcggttttgcttgaccgagtccgtacacatgcggcgtgaggccagtaaatacgccgttgcggtggcgattaggatggtgcgactcgccgcaacacgccgagttgcattcatctgaacggcgtgtattatatatcgagttgtctgaaaagacaacatgcgccagtagcccagcggattagagcagctgactacggatcagcaggtcgcaggttcgaatcctgtctggcgcactcccgaaccacggggacaacagtggtatgcgccagtagcccagcggattagagcagctgactacggatcagcaggtcgcaggttcgaatcctgtctggcgcacagtaagcctcgaaagcgaaatgcttccgaggcttttccaattgtattggcccgtttgagtcggccacacaggggtggggtaaggttgcccttcgcgactcagcccggagcggaacgtcctgagatattccgtactattacatacggttcatccaagaaagtacagcaaggagacgcgatggccacgaccgccggcgcgaagaaaggactttggtccaccatcaggcgaatcgccgcctcagaccgtatttccggactcatcatgctcggcttcgcgctcaccggcctggtgctcgcgaacctgcccgccaccgcgcatgcgttcgagaccgtagcggaaacgcatctgttcatcccctacaccaatctcgacctgccgattggccattgggcccaggatggtctgcttaccatcttcttcctgaccgtgggcctcgaactgaagcaggaactcaccaccggctcgctcgccaatccgaaagcggccgccgtgccgatgctgtgcgcggtgggcggcatgatcgccccgcccatcctgttcctggccgtcacggcattgttctctcagatcgggcctggtgaacccggcacgctgattctgaccaccaccggcagcagcattccgttctcggagatgtcgcacggctgggcagtgcccaccgccacggatatcgcgttctcactggccgtgctcgccctgtttgccaaggccctgcccggttcgatccgcgcgttcctgatgacgcttgccaccgtcgatgacctgctggccattattctgatcgccgtattcttctcctcgatcaacgcctggtattggttcatcggcatcgtcgtgtgcgccgtcatctgggcatacctcgtacgactgaaaaaagtgccgtggattgcggtcggcatcgtcggcgtcctcgcttggatcatgatgttcgaggcaggcgtgcatcccacactggccggcgtgctggttggcctgctgactccctcccgtgaaatgcacggcgaactttcaccgcgtgccgaacgctatgccaacaagcttcagccattctccgcactgctggccctgcccatcttcgccctgttcgccaccggcgtgcacttcgagtcggtgagcccgctgttgctggcttcgccgttggttatcgcactgattgtggctttggtggtcggcaaacctttgggcatcatcaccaccgcatggctggccacgcatgtgggcgggctcaagatggccaaggggctgcgcgtgcgcgacatgattcccgctgccgtcgcctgcggcattggcttcactgtgtccttcctcatcgcctcgctggcgtacaagaatgcggaactttccgctgaggcgcgcttcggcgtgctggtggcctccctgatcgccgctgcgatttccggtgtgctgctgagccgtcagtccaagagattcgagaaggccgcagccgcagcagcggccgatgcggaggatgacgaatcgattgatggcgatggcgctggtcagaccggtcgcaccacaaagtccaccacgcccacggaacaccccggcaccctcgccgacggcaccgccagtgtggagattgacttccgccactgatggcttagacgatccctactccattgttggccttgtttcgtgaaaaccgtacgctgaggcgcgctcaccgtacgttcttcacgagatgaggccttatttcgtgaaaaccgtacgctgagtgtcactcaccgtacgttcttcacgaagtcaaggatgatttcgcggaaaacgtatgcagagcttcaggcgctagaatgcgaagagtcgatagcaccgtacaggaggatattggatggcaaagaagcagaagaaatccaagaagaacgacggcaaaaaggccgctgaagcaaagaatctagccgaggccgcatccaagtccacagtcgtggacgatatggaaccattggaagccacagccgcgaatgatgcggcaacgttggaggccgagacggcaaccgaggctgccgcaacgccggtgaacccggtcgacttggaggacgtctcgccgctgggcgacacctatcatcgcggcccggtgattctacgcggccagatgattccctcggacaataccaccgccaatctgctgaaacccgaccaggacaccgactggctgcacatggacccatggcgtgtgctgcgcatccaatcggaattcgtggacggtttcggggcgctcgccgagctcggacctgcggtctctattttcggctccgcacgcacccagcgcaccgaatcgatctacaaggcggcccggcgcatgggtagccagatagccaagcgcaacatcgccgtcatcaccggcggtggtcccggcatcatggaagccgcgaataggggagcggcactggctggcggcaaatccgtgggactcggcatcgaattgccgcacgagcaggggttgaaccagtgggtgaacctcggcatgagcttccggtacttctttgtgcggaaaaccatgttcgtcaagtattcctccggcgtgatcgtgtgcccgggcggcttcggcacactggatgagatgttcgagctgctgaccttggtccagacccacaaggtggcgaatattccggtggtgctctacggcaaggaatactggcaggggctctttgactggctcaacggtccggtggccgagcacggcatgatttcggcaatcgacccgaaactggtcaccgtgaccgatgacgccgacgaagccgtggaggtggccgtcagcgcaattgtgaggtaagcgagatagagtggctcccctctccgaggggagccaagggcagagttactttttgtaggcgatgagcaggcctgtgccgtcaggggtaagcgtggactcgaaaccttcgtcatcttcgacggtggtgagcagctcacgcatggcgatggccttgtcgctgcggtcggccggattaatcatgccgccctgaccgtcctccaacgccagcacatcggtgaacacgatcacgccgtgcgcgcgcagcagacgggaggcctgggcgaacgtggcggcatagttctcggcgtcgcccgccaccacgatcagatcgtaatcattggcgttgaggcgcggcagaaacacgctggccggggcgttcaccgcacgcaacgtggtgtcggtctcatcctgcagttcggcgaacgccttgcgaatcagcgcgatgccctgagcggtggaatcgaccgcagtcagcaggcccttgttatccagcgcatgggcgagctgcaaggtctccaccagcgagccggtgcctacggcgatgaccgaagcggcgccggtgatgcgcaccagcatgcccagcagacgggcctgcgcggccgaaccctgcaactggccggacttgtcggcggccgtacgggcgtcggtcaacgcattggattcacgttcgcgcgcgtgttcctcggtgaattcccatgccttggtgaggttggtgtactgcgttctgtccataattcgttcctttatgtcttctctcgtgcgggcacccggtggatgtatcgactacgtgttgcagcgattgccgtagctggtcgtggcgcggcttagcgctcgcggaccttggccacgatctgccacatctcctcgcccacatcgatgccgcgcgggcagtggcgggagcaggcgcgcacggactggcaggcggccacgccgtcggcggtgtcgatggcgtccatacgctccatggccttggtgtcgcgcgaatcgttgacgaaacgggaggcccaaatcagcgaggccgggccgatgaaagcgtcgccgccggcgtacaccgggcaggcgccttcgcacacgccgcaggcgatgcagttgctcagcagctcgtatttggcgagttgttcggggttctgcaggtattcgaacacgtccaccttgccttcggcggtggtggcgagcacgccgtccgcctgaagatatggggtgagcttccttatttggttgagcatcgggtcgatgtcggcgatgaggtcgcgttgcggcgggaagccgggcagggatgccagttcgatgactcccagcgagccgtttgcggccgagtcctggtcggctgccgcgtttgcgccgttttccgcggaatcgtcggattcttcggactcggtgccggtgtgccggaacccttcgtcatcgacttcggggatggcgccgggctgcttggcccaatcgcggatggtggccgtgcacagcagggtgggggtgccgttgatggccacggcgtccgaaccgcacatgccgtgaccgcacgaatagcggaaggccagcgtcgggtcgacggtgcgtttgatggtcagcaggcagtcgagcacggtgtccgaggggcgcgcgggaatcgtgtattcctgcacccactgcttgccgcgcggacgacggcgtgccgccgaatccgagccgccgccgaatggggagcttttcttggcgaacgggctgccgccgcgtgcacgttcggcgcgctcgggtcgcggcgtgaaacgatgcacttgcagggtaaccgtcgtgttgctcgcctcagccatgttctgcctccatgaaacagtgggatgtcaagtccaatatcagccaacctattgtgccacaagccctaggcggcttggtattaccaccagcggatcagtactcgcgcttcttgggcggatagtcggtgatgtgcaccggcttgaaacttgccggaccatcatcggcgaccatcgagtgagcaaggaaatgctcatcgtcgcgttcggggaaatcaagtcgttgcatggatccgcgggattcctgacgggattcggaagcgtgcagcatggcctcggccagttcgattagatgacggacttcccagatggcggtgacctcctgattgaaagcggcggtcttgtcatgggcccgcaaggtatcggcaaccggtgtgatgtcgttgttgatctgagtcaacgccgtatcgatggtctgagcggtgcaacgtacggccagagcctgctccatcactgatccgagttgggccatgagctgataaggattggcggtgggcccgccatcgtctgaatcgtccatcggcccggcgagcagttcgtcaagctctgccttgcgggaatcggcagcctgatcggcggcatcggtcagcatgtcatcggtcgaatcatcggccatgggggagtcaaccgggttctcgacgatgcgtgcggccatcgtctgaccagcacgtgtaccgaacaggcaggcgtcgagcagagaattgccgcccagacgattcgcaccatgtacggagacacaagagcattcgccagcggagaacagtccatcgactacctgcacggcaccgtcggcccaacggtacacctcgccattggtggtgatggggatgccgcccatcgtgtaatgcgcagtgggcttgatgggcaccaggtccttggccggatcgaggttcgcgtactgctcgatggtttcgactacctgcggtagcacttccttcatacgttcggggtcgatgccggtcatatccagccagacgcagtccttcggaccatccgggtccttcggatcggcgacgccgcggccggcgtcgatctccgccatgatggagcgggagacaacgtcgcgcgcggacagatccctatgctccggggcgtagcgttccatgaacgcctcgccgtcggcgttcctcaggatgccgccctcggcgcgggccgcctcggacagcaggatgccggtgtgcgcgagcccggtgggatggaactgcacgaattcgatgtcctccagctgcaggccggcggccaaggccaatgccatgccgtcgccggtcaggtcccaggaattcgatgtggtatggaacagtcggcccgcgccaccggtggcaagaagcacgttgcgcgcgtggatggcctgaatcttgcccgaatgcgtgtcaaatgccacgatgccggccgcctgcttgccgtcgtcggcgagcaccaggtcggtcacataccattcctcggcgaactcgacgccggcggccacgcactgctgccacaaggtgtgcagaatctggtggccgatgcggtcggccgcataggcggcgcgcttgaccggggcaccgccgaactcgcgcgtgtggccgccgaaccggcgctgggcgatatgcccgtcatcggtacgggagaaggccacgccctgacgctccaggttgatcacggtctgcggcgcgtattcggcgagcagtttggccgcgtcctggtcgacgagccagtcgccgcccttgatggtgtcgtagtaatgccagtgccagtcatcggactccacattgcccaggctcgcggcgatgccgccctcggccgaaccggtgtgcgaacgcagcggctgcagtttggagaccacgaggatcttcgggtccacgccttgttccttgagctcggtgattttgggggagcgcagcagtcccaacgccgccgacaggccggccgctccggcgccgacgatcaccgcatcatacatatcttccaaacgtttcggactcatgggttcgattctcgcacacccgccgaacagtcttcgagccgtgtcatgaaagccgattagccgacacggctgctcagcttgagtatgccggcatcccgctcgatcactcccttcagctccaatgcgccgagtagctcaagtatggtgccgatattgggaatctcgtcgggtaccgtctctcgcgccacacgcaatagtgcgtccggggtgacgatgagatgtcgtttacggcattcacgaatcaatgccactaatgtgcgttccatttccggcagcttggcgataatgatacgttgttgggcttccttctcgggatcgagcttcggcttgacacgaagatccggcatctgatgcgacgagggcggctcttcacccttgctcttgttggcaccggcctcggcagttgcgctcgccggcccatccttggattgaacgagtgtaggctgagtatgcttggtcctaagacgtttcgaatgacctgaatcttgtgacgactcctgtgacgccgatgattccgaggatgctggcgataacggagtcgttgccggcacttccatggcctcctcgttttcggacgagtcctgacctgtggatttcggtatgcctgggcatgccgccataacgggcttatgccgttcatggcatatatcctcagtggatgtggcggcacacagaatcatcgcccggtggtcgccgatcatcttattgcacccggcgttgcaaggctgattgatgtcaccgggaaccgcatacacttcgcgcagcaattcgcatgcccatcccgcggtgttgagcgctccggaacgcaaccgggcttgcgtcacaatcaatgtggaagacatggccgcgataatgcggttgcggagtagaaaacgacgggcttcgggaatcgtccctgggcacagttcactgatcagtgcaccaccctgcgcctcgatacgttcgaacagcgtgcggttacgcatcggtccgatatggttgagcccgccggcgaatacggcaacggttctgcccacattggcgggcattctgccgtgcagcgcattcaacgctccccaatgtgccgccgcatccgtgcccattgcgcctccggacacgaccagatgcccggcaacgactgcctgttcggctacggtgtgtgccacataccggccgtattcggtcacgtcccgtgaaccgacgatgccgaccggtttggcgcaactggtcaatgcgcgtggatcgcctttgatccacaaacacagcggtggcgcccaatcggagcgaatggacaggtcggccaactgcgagggccaacatggatggccggggccgataatccattgcgtgccatccatagtgaaccagtcggccagttggatgatgtcttgcgagggcaggtccatcatgcggttatgccagccggccagtgcattgcggaaggagcgcatcgcattcgccgacgccttgcggccccatcgggtgaggccatccacgaacatgcggtcaatgcgtgacagcgccgggccgcagattccagatggctggcttggatgggattgcgccaacgcgtgccagagggattcggcgctttccgcgcctttgagcgcggcgtacatcatcacatccgccccatcaagacagaacgtgagcgcggcgcggtacaacgtatccgtgggaggcatgggaatggtgcgcgaaacagcgaggcccgtatcggtgtgatccacactgcctgcggtgccgccagattgtcggatatcagtagcgttactcatgtcatcctcgttctcatttcgatgccctgatggacgtcctgctcggtgggggacacgcggccggccagatcggcgagcgtccaagacagacgcatggcgcgatcggccccgcgcaatgtgagttgatgattggacagggcccgattgaccaattccatcgctttcagcgacgtattggcatgcagccatttgcccgaagcttgcgcgttgcacacccatccatactgtctgaaccggtccttggccacttgacgggcgcgaatcacacgagcttgtatcccggcactggactcgccgatcgtctcgctctgcgcggcaatgcgcgagaccggtggcactgccatctgaatatccacacgatccaatatcggtccggacaatcgcgagaaataacgtatacggtctttttcccggcaagcgcaacgttcgccggtaccgtaatagtatccgcacgggcaggggttggccgccatgatgagttggaatgaggccgggtaataggtgctgccttttgaacgggaaagcgccacatacccggattccaatggttcgcgcaacgtctgcagggcgcgtgcgctgaattccggtgcctcgtccaggaacagaatgcctcgatgcgcgcgcgtgatcgcgccgggaacggcgatgccgttgccaccacccaccaaggccgccgtgctggcggtgtggtgcggtgcctcgaacggcggcatgtcggtgatgccgtactgaggcagtatgccgcacagcgaccgtatcgacgccacctccagttgttccgcctcgttcaacgggcacatgataccgggcatacgtgaggccagcatggttttgccgctgcctggcgggccggtcatgatgagattatgtccgcctgccgccgccacttgcagcgcccatttggcatgttcctgacccagaacctcgttcatatcgccacaatcgttgggatggcttgtgggcgattgatccatggtggtctcgtcggcaaccggtgtatcagtaatcgtataggtggcatcgccgcccatcagttcgatgagctcacccacatgcctcacacccactacatccagtccatccaccatcgaagcctcgtcaagattgcgatggggaacaatcattttgcgcacgccacgttcctcggcatgcagcatgatcgggagcagcccatgaatcggcagcaccgagccgtcaagattcacttcgccgagcacaatggtatcttccaagcaatcatgccctatggcacccgccgcgcataggacgctggccgcgatggccagatcatgcgacgaaccacgtttgggcatggccgcagggctcatgttcacggtcacgcgggtttgcggccaaccgaatccagtggcttgacacgccgatttcacgcgctcgcgggcttcggacaacgatgcatccggcaatccgatgatgctgaagtatggcaagccagggctgatgaaagcctgcacttggacgatgaaggccttaaggccgatcagtccgactgagagagtgctgccgatagccatgtctactcctttcgcaatgtgtttcgcaacgtggctgttttttgggggggacgaattcagaaggcgttttcgatgtgatgcacgagcggtctgcccacccgaagcacgatggtgacgacatcgaaacggactgccgtatgcggcacacgattacgccggtcaagcagccaatcgcaggcggctttcctgagattgtgctgtttcgccggcgtgacggcctcttgcggatatccgtaatgcatggaccggcgtgatttcacttcgacgaacaccaccgtgtactcgggattgagcatcacgatgtccaattcgccgtaacgggtatgccaattgcggctcaaggtcgtccaaccgtgttcctccagccacgcggcggcatactgctcgccgagcgcaccgaactgtttgggcgtcagattgcggtcgcccatcgtggccgcaatccgttccgaaggcagcgttgcctgcggatcaggtgaagccagcatgggctggtgaaaggcaagaccggcgtcgatgccagacttcgtcgtcggctgggtaggtggtaaagcgttcatgattccactgtgcgggttacttatgtaagagcacaagcgcaaccggcaaatgtggatactatgacgcggtttggcgtgttgtggataacgtgtggatgaaaacccggttatccaccattagttcagaaggtttaccaaggctccccag

SEQ ID NO: 2120 - DNA, 2640 bp, Unknown
  R51_24m  MAG No. k141_4119
caggaaatggcgtatctggaaagaagcggaggaaaagctgctgcgtgagtgcggcgttgatgaagcgaccattgagcagatacgcatggcggacagggcagacttcaattccaacaggcggttttaccgatggacgaatgatgacggacagtgacagcgcacttctgcagtcgtccttgtagacaaccgacaaaagcatccgcgcaactttttcagtgcgcacaacgcgccgtatcttacgcaagcgtaacctgtgttgtcagaatggctcgaattgccaacccgccatcatgtttgtaaggaataacggccgtatgcttaccgaatacaccacgcccggcgaatccatcgagatccgcgatgaccaaaccatctattcactgctcaccgaccgactggcccgcaccggtgccgacacggtaatcgcagccaagaaaatcggcccggggcgttggcagaacgtcaccaccggcgaattccacgagcgtgtggtctctgccgccaagggtctcatcgctttgggcatcaccaaaggcgacgcggtcactatcttctcctccacccgccttgaatggggcatcctcgacttcgcgctggctgcagtgggcgcggtgagcgtgccgatttacgacactgactccgccccgcaagcccagcgcatcatgaacgattccgcggtcaagctggcctttgccgacaaccgcgaacgctatgaccggctcgattcggtcaaggaccactgccccacgttgaagcagattcttatgattgacggcaacgcactgggtgctttggaaggcctcggcgtggccgtctccgacgaagagctggacgagcacgtggccaccgtgcgcaccaatgacctggctaccatcgtgtatacctctggctccaccggcaacccgaagggtgcggagctgacccacaagaacttcgtgtccattaccatcgccgcctcgcaggcgctgcatgaggtggttctcgacgatcacccgcgattgctgctcttcctgccgttggcccactgcttcgcgcgattcatccagtacgcctccatcgcctccgacgacggcgtggtcggctacctgccggacaccaagtcgctgctgccggatctgcgttcctttgagccgacctacctgctgggtgtgccgcgtgtgttcgagaaggtgtacaacgccgcctcgcacaaggccggcgccggctggaagggtcacctgttcttgaaggccgccgaggcagcgcgcgtctggagccgtaaggagcaggcgggcgagcagcacacgtttgccgaaatcgccgagcgcgccaagtatgaaacgctcgtctaccgcacggtgcgcggtgctctgggcccgaagatcaagtatgtggcctgcggcggcgcaccactttcgcttgatctggcgcatttctacaacggcatcggtctgccgatgattcagggttatggcatgaccgaaaccgccgccccgttcgccgccacgcgcgtgaccgacaatgtgatcggcacggtgggccagcccgctcccggctcctcgattcgcatttccgacgaaggcgaactgcaggtcaagggcccgaacgtgttccgcggctaccacaatctgccggagaagacggccgaggcgttcaccgccgacggctggctcaggaccggcgacttggccgagatcgatgacgccggccgcatcatcatcaccggtcgaatcaaggacattattattaccgccggcggcaagaacgtctcccccattccgctggaggaggagatcgtcaagtgcccgatcgtggagcactgcgtggtggtgggcgaccagcgcccgttcatcggcgcgctggtgacacttgacccggagtcgctggccatttggctgcccgcgcacggcctgtccacggagacgccggtcgaccggctcgccacgaacgccgcggtgcgcgaggagatccagcagtacgtggacaaggcgaatgcgacggtctcgcgtgccgaatccgtgcgcaagttcgccgtgctgggcacgcagttcacgcaggagaacaagtgcctgacgccgtcgctgaaggtagtgcgcccggccgtcaaccgcgtgttcgccgatgtgatcgacaacgagatctacaacggcaagcggtgaaacgcgcggttcgtaatccgacacaaaaaagggccttttgaaccgcacctccgatcatcgaatctggattactccagtccaacaatcggggtgcggttcaacctcgccgggcacttcatcattcatcactggcatgattccattatcacgcacattatggcgcagagcgaatacggcaccccggcaacgcgagtgggtcgccggggtgccggagcgcgggggtgccagaatgccgaagggccgggataccggagtgcccggtcgccggggtgccgaaatgccgaagcggtgtatgggtgccgcccggcccaggtgggtcacgcccgggtcagtttcttgctcctgagacgcagcacgacatcggcggagtcggcgacacgcttggaatgcgtcaccacgattacgcatttgccgagctgatgggcggcatgctgcagcagatgaatcacctcgtcggtcatctccgggtcgaggctgcccgtcggctcgtccgcgaggatcg

SEQ ID NO: 2121 - DNA, 9629 bp, Unknown
  R51_24m  MAG No. k141_4226
cagtgtcataccctcgcagtgcagcagtccgtttatctattggaaagcaacactagcgcatccaggccggaagtcgtggtacatatccatatcctgctgcggttataggaaatcccctccgagtttcctcgaaggggatttcttaagtcgctagttcaagcgaagattcttgtctgatgataatcaggcgaggatcttggtcacacgaccggagccgacggtgtggccgccttcacgcacagcgaaggtcaggccctcctccatggcgatgggctgaatcagctcaacggtgaaggtggcgtggtcgccgggctgaaccatctcgacgccttccggcagctcgatgacgccggtgacgtcggtggtgcggaagtagaactgcggacggtagttggagaagaacggcgagtgacggccgccttcgtccttggtcagcacgtagacttcgccctcgaacttggtgtgcggggtgacggagcccggcttggccacgacctggccacgctcgacatcctcacggccgaggccacgcagcagcagaccggtgttgtcgccagcctcgcaggcgtccatggtcttgtggaaggtctcgatggaggtgacggtggtctgctgggtcggacggataccaacgatctcgaccggggtgttgacggccagctggccacgctcgacacgaccggtgacaacggtaccacggccagagatggtgaagacgtcctcgatcggcatcaggaacggcttgtccaggtcgtgaaccggggtcgggatgtagtcatcgacggcggccatgaggtccttgacggactggacccacttctcgtggtccggagcgtcgtcgtgcagggcgccgtaggcggaggtgtggattaccgggcagtcgcgatcgaagccgttctcgtcgaggaggtcacgaacctcttcttcgacgagctcgatgagctcttcatcgtcgaccatgtcgcacttgttgagggcgacgaggatcttcgggacgccaacctgacgggcgagcagcacgtgctcgcgagtctgggccatcgggccgtcggtggcggccacaacgaggatggcgccatccatctgggcggcaccggtgatcatgttcttcacgaagtcggcgtggcccgggcagtcgacgtgagcgtagtgacgcttctcggtctggtactcgatgtgggcgatgttgatggtgataccgcgggcggcctcttccggagcggagtcgatctggttgaagtcgtactccgggttgacatccgggaactcctcgtgcagcaccttggagatggcggcagtcagggtagtcttaccgtggtcgacgtggccgatggtaccgatgttaacgtgcggcttagtacgctcgtacttttcctttgccattacttttgtcctcctggacgtctcgtgagtttcctgcgccctttcgcacagggactcgcttattctactgggtttctgggttatgtgccactttgaagagccagaacccagtcagcggtatacgatactaccgctgactggagacaccggccacttcatgatgtggcgcgtgtcactcgccgcgctgggccttgatgatctcctcggagacgctcttcggcacctcgtcgtaggagtccatctccatggtgaacatggcgcggccctgggtcttggaacgcaggtcgccgatgtagccgaacatctcggacagcgggaccttggcgtcgatgaccttgacgccgacgccgtcggtcatggactggatgttgccacggcgctggttcagatcgccgatgacttcgcccatgtactcttccggcgtacggacttcgaccttcatgatcggttcgagaatgaccggcttggccttcggggcggcttccttgaagcacatggaacctgcgagcttgaaggccatttcggaggaatcgaccgggtgcatctggccgtcggtgacggtggccttgacgcccacgaccgggaagccggcgagaacaccggactccatggcctccttgacaccggcctcgatggggccgatgaattcggcggagatgtggccgccggtgaccttgttctcgaactcgaaggtcttgccctcggtggtgtcgagcggctcgaagttcatcaggacctttgcgaactggccggaaccaccggtctgcttcttgtgggtgtagccctggtccatgacggccttgcggatggtctcgcggtaggcgacctgcggcttgccctggttgcactcgaccttgaactcgcggcgcatacggtcgacgatgatgtcgagctggagctcgcccatgccggcgatcagggtctggccggactcttcgtcggtcgtgacctggaaggtcggatcctcttcggccagcttggacagggcgatgcccatcttctcctgatcggccttggtcttcggctcgacggccacctggatcaccggatccgggaaggtcatggagtcgagggtgatcgggtcgttgatggagcacagggtgtcgccggtggtgacgttcttcaggcccacgaaggtgtagatgttaccggcgtcggcgcggtccatcgggttttccttatcggcgtgcatctggaagatcttgccgatgcgttccttcttctcgcgggtggagtcgagcacggagtcgcccggcacgacggagccggagtagacgcgcacgaacacgagcttgccgtagaacgggtgggtggagatcttgaagaccagagccgcgaacggatcggtcttgaccgggtggcggtcgatctcgacggactcgtcgccgggcttgtagcccttgatggccggcacgtcctcgggggacggcaggtagtcgacgacgccgtccagcatcggctgaacgcccttgtccttgaaggcggagccgcagaagacagggaaggcttccttggcgatggtgagcttgcgcacgccggcgcggatgtcttccttggacaggtcgccgtcctcgaagaacttgttcatgaggtcgtcgtcggcttcggcggcggcttccacgagcttctcgtggtactcctgagccttgtccttgaggtcgtccgggatctcagtggtgtcgtacttggcgccgagctcctcggtgccgttccacacgtaggcctgcatctcgaccaggtcgacgacgccggtgaagtcgttctcggaaccgatcggcagctgcatcacgatcggagtagcgcccagcttctccttgatggtgtcgacggagtagtagaagttcgcgccgagcttgtccatcttgttgatgaagcagatacgcggaacgccgtacttatcggcctgacgccacacggtctcggactgcggctccacgccttccttgccgtcgaacacggcaacggcaccatcgagcacacgcagggagcgctccacctcggccgtgaagtccacgtggccaggggtatcgatgatgttgatctggaacttgtccttggtgtcgtgggactgacggctccagaagcaggtggtagcagcggactggatggtgataccacgttcctgctcctgcgccatgaagtccatggtggaggcgccgtcgtgggtctcgccgatcttgtagttcttaccggtgtagaacagaatacgctcggtagtggtggtcttgccggcatcgatgtgggccatgatgccgatattgcggacgtcgtggaggtccgaaatctcttcagccatctttttccttagttttactcagggcgagtgattaccagcggtaatgagcgaaggccttgttagcctctgccatcttatgagtatcctcgcggcgcttgacagaagcaccgaggccgttggaggcatccaggatctcgttggcgagacgctcggccatggtcttctcacgacgggcgcgggagaagtcggtcagccagcgcagcgacagggtgttggcgcggttcggcttgacctcgaccggcacctggtaggtggcgccaccgacacggcgggagcgaacctcgagggacggacggatgttgtccagggcgcgcttgagcacagccaccggttcctggtcggacttctccttgaccatatcgagcgcggagtagacgatgtcctcggcgatcgacttcttgccgtcaagcagaatcttgttgatgagctgcgccaccacggtggaaccgtagatcggatcgggcagcacgacgtgcttcttggaaggtcccttacgtgacatatctcttacttcgccttctttgctccatacagggaacgaccctgcttacggtccttgacaccctgggtatcgagcgcgccacgcacgatgtggtaacgcacacccgggagatccttcacacggccgccgcgcacgagcacgatggagtgctcctgcaggttgtggccctcgcccggaatgtaggcggtgacttcgatgcccgaggacaggcgcacacgagcgaccttacgcagagccgagttcggcttcttcggggtggtggtgtagacacgggtgcacacgccgcgacgcagcgggctgcccttcagggccaaagtcttggacttcttcggctttgcctgacgtcccttacggacgagctgttcaatagtaggcaacttgaattctccgattcagtggtttctcttgcttttgtgtgaccgccgcactgcgcccacacttttcagcacactcgcttggcatccgcctgttggcgacacccgacgaatcggaaaagatagcccagtccaccggcccgatggccttcgcccctcccgtcggcgcattactacgtgcgatcagcggtttgaaggatatcccagcatgctcgcctgttacataaggcgtgctgctggcacacacgaatatctatattacgattccgccggacaacgacgcgccgggcctcgactcactagcttgggacaatccgcgccctgtacttttcctctccttctggcgcaacaatcccgggaatgcgtcgcacaacacacgcacacacgccctcccaacgcaatattcccgggaatgcgtcgcaaaaaagcgaacgccacacagcaggtgcccccgcggagactatgtcacacgggggcaccgccaaggaggttacattatgtttcttttcaccacatgccgcttctgtgttatctgtttccagcacatcctcgtgctcttccatatccgatgggaacctctagcgacccggcctctttgccgtatcaccttgccgctttctgcattactaattatagcaaaaccgccctcgcgaaacgcccgatacattaatcgggagtaagcgggagcggctatgttatgcgaggtaggaaaggtgagtgaccgactgactggagtcgtaccttacccgacctttctcaccatctcaggatttcaggcagcgaccttggcggccttgtcggcgtcgaacgggtgggccacggaaacggtgctcttggcggagcccttctcgccgttgtcagaatcccaatgaatctcgtgccggtcgtcatggttgcgccaccagctggacaggatggagccggagatgttgtgccacacggagaagaacgtggacggcacggcggcgagcgggttggacgcgaaggaggtcagggccagcgtggcgcccagggcggagtcctgcatgccgacctcgaacgtgatggccttctgctgcgcgtagcggaagcccttcgggtagatcctgtacatcagcttcgagaagccgaagcccagcgagtagccgcacagattatgcaggatgaccaccgggacggccatcagggagctggccacgaacagcttcggaccgttggcggcgacgaccacaccgatgatcagcaggatggccacctgggagacgatcggcagggccacggtgaccttctcgatcttcttgccgaagaccatgtggcagatcacgccgagggcgatcgggaaaagcaccaccttgacggcattgaggaacagggattcgaccggcacgctcacatactgggaggccagcagctgcatcagcagcggaatcatgaacggggcgcacagggtggagaggatgccgatggagacatcgagggccacgtcaccacgggacaggtagctcatcacgttggaggaggtgccggacgggcagcagccgacgagaatcacgcccacggccagcgggccggacaggtggaagatcgcgcacagggccacggcgacgagcggcatgatgacgaagtgggccaccgtgccgacgatgaccatcatcggctgggtgaggatgcgcttgaaatcgtccagtgtcagggtcagccccatgccgaacagcacgatgcccagcatgtagccggtgtacgccttgccccacaggctggcggccggcacgaagtagttgaagacggcccagacgatgacgatgaccgtaaaccacttggtcagccaatctgcaaaggctttaaccttttccatggtgtttctcttcccttgttcggtgtaggtaacatcgcatgaaactaggcgggtcgcggttgatatgaaacataatgctcacattgtgaacgctcacgtaatcatctctgcaatccccagtcgcaccatcacgccgttgtgtgcccctgacttttcatcaatcgccacacaagacccactcgtccacatcccaccatttgagacagcccacagcctggccccaagaatgaaaccaaccacttgattccatcgcgacacaccgatgagcacacatccgcaaagttgtgtatagtattcacctgttgtgcgaattcagcttgctgaatacgacactatggtggccatagctcagttggtagagcatctgattgtggttcagaaggtcgcgcgttcgagccgcgttggccaccccagtaaaacccttccgttcgcggaagggttttgtttttctccatgaattccccgctcctgccgggaaccgccgcgttgtacactcgggcatatccaattcatctaacacaaggacaaaaggtccgtcatgctgtcttttgagaacgattactcccgcgccgcccatcccgcagtgcttgaagccgtggctgaagccaacaaccatctgtattcgggctacgggtccgacgaactgagcgatcaggccaaggccaagatccgcgaggcctgcggccagccggacgcggatgtgtggttcctcgtcggcggcacgcagaccaaccaggtcgtcatcgacaccatcaccccggcgtatgcaggcgtggtcgcggtcgcctccggccatccgaacgtgcacgaggccggcgccatcgagttctccggccacaaggtgcttacgattccccaacacaacggcaaaatggatccaaccgaactggacgagttctgcaagaccttctatgcggacggcaactacgagcacatggtgttccctggatccgtgtacgtctcgcaaagcaccgaatatggcaccatctactccaaagccgaactgcaggccatcgccgatgtggcgcataagtacgatatgccgctgttcgtggatggcgcgcgactcggctacgcgctgaccgccaccggttccgacatgacgctcacggatctggcgaccatcgccgacgtgttctacatcggcggtaccaaggtgggtgcgctgttcggcgaggccgtggtgtttaccaagcacaacacgccgaagcacttcctgacccgcatcaagcagcacggcgccttgctggccaagggcttcgtgctgggcgcgcagtttgacgccttattcaccgacaacctgtatttcaagatcgcccgcaacgccaatgaggcggccgatcgtattcgcgaggccctgcgcgccaagggctacatgctcactttcgaagcgcccaccaaccagattttcgtgacgatggatcagccgaccatcgaccgtctggagcgcgaggtcaagctcggctttaccgagaaggccgacgacacgcataccgtgatgcgcatctgcaccagctgggccaccacgcatgaagaagtcgatcagcttattgagttgttgtaaaacccttcgctaatccctccctccgtcatcgcttcgcgatgccacctccctcatcagagggaggttttttcgtagctcccgccgatgagggagctggccgccgcaggcggactgagggaaaacctctccgcaaacgagaaggctcctactcccctatcgccttgcgttccatatccacgaacttgtggaccgaggcttccacggaataatgcgccttggtgtattcggcgtatttctcgccccattcggcgcgctcggcctgatgtgcgatccaccaatcgatgcgtcgggccagcagggccgcgtcccgcacggggaacaacgactcgtcgatcagcgcgaactggccggccgccgacagttcggacgcggcgatcaccggtaccaatccgcacgccatcgcctcgatcacgctcaccgattcgatgtcggcaatcgaacaatgcacgaacaaatcgcccgaacgcaacaaatcgggcatatcggcgtgcttgtggaatccgatatcggccttgcgcgccagcaaacgcccggcgcggaacttgagatactgcttgagcggccccgtaccggcgatcaccagctgaatatcgccggcgtgccgggacatcgacaccgccttgatcagcgtaatctgatctttctcgctggccagtcggccggaagcgatgacgcggaacggcacgggagccgaggcatccggatcggccggcttcttcggcgaatacaccggtgaataaccattggaaatcacgtgcaacttggctttatacccgtgcgcgcgcaacaggctcgcggtcatttcggtgggcacatggatgtggtcaatgtgcttgtacagccagtgcttgaacagccagtacaggaagctggaaataccgggaatgcgacgtagcgggccggccgaatacagcacgttctccggctgcaggtggaatccggcagtcacgggaatgcccatttggtgggcgactttagcggcacgacggccgaatttgaacggcatatagatatgcaccacatccacaccttggaaagcggtgcggaacaacgtgtcgctgggttcggcgaattgcatgagctgcttggcggccacccacgagacgagcggcaccttattcacgcgcgccggatattcgggcgcccctataccgacaagcctcacatgatggccttgccgctccaattccgcagcccattgcaaggccgaattggaggtgccgttgccctgattgcccaccgtatcgaccacgagggcgatagtcaacggacgatcaatgctctcttcaatcccgttttcgcgcattgcctcatcctaaaccaccgcgcggcaatagcgtcggccgcgctgcctgaacgcgtgtgaaatggtatgggctgccgcattttgcccaatattgaatcacgcgcttcgcagcgcacgatcggcgcgggccacggcctggaacaactcggcggtgtgcttgagcagactgatgcgcacccagccttcgcccacctgaccgaagcagaccccggcatcagcgccacgccggccgtgttgagcagccaatccacgaatgcggcggaatcgccatgccaccgcgccagccggccaccatatacattttggacagcgagccaagttccagcgccacgtccagcgcgcccggagtctccagcaggctcagcgagcg

SEQ ID NO: 2122 - DNA, 23130 bp, Unknown
  R51_24m  MAG No. k141_4284
ccgacgccatccgtgcgcaaggcgccatcgacatccagcaccgcgggacggcctgcttcgccgatctcgcgcacttcgggttccagcggcagctgggccatcagcggcacgtcatagccaagcgccgcgcttaactgttcagacacgcgctgaccgccgccggcaccgaaaatctccagcttctcgcccttgtgctcgtagtagctcatgttctccaccacgccacgcaccttcatcggcacctgcagggccacgagtccggagcgcacggcgatgtcggaggcagagggctgcggggtggtgaccaccacgagttcggcgttgggcagcgcctgggccacggaaatcgccatgtcgccggtgccgggagccaagtcgagcaagaggacgtccggctcgccccaccatacgtcagacaggaactgttccaaggagcgctgcagtcgcggcccgcgccacagaatcgcccggtcggcaccggcgaacatgccgatggagatcagtttcacaccccacgcggtgaccggcataagcataccgttcagattggtgggctgcgtgtgcacgccgaacaggcgcggcagtgagaagccatagatgtccgcgtcgatggcggccgtgtcgaagccgagggccgcaaacgtggcggccaggttcgcggtaaccgaagacttgccgacgccgcccttgcccgaggcgatggcgaagatgcgggtcttgacgcccggcttgctgaaggggttccgcttgcgttcggccttgaggtcggcaaccagatcggccagcttgtcacgactcattgaaccgacttcgatatgaggcagcagctgtacgcccggataggagctgaccgcgccgttgatctggttggtgatggtctcgctcagtgggcatccgggaaccgtcagctcaacgtgcacggtgacgtcgtaagtgccggcgtccgacgatgcgggcgcggcttcgatagcggcaatcatgccgaggtcggtgaccgaacgaccgagctcggggtcgatgaccttgctcaggcgttcgtagatgtcggcttcgatctgacgtgcgtcgctcataaatccgtatcctcctttagggcctgttctaccctagcgtgtgatgcggcggcatgccagagggagtggagtaagtcacactggggcgggattcgctttttctctcccccagtcagcctaaaggctgacagccccctcatcagagggggttaatgaagcgtctgagggggctattttagatggtgccggtggctaggagctgggcgaattgggcttcgcccagcatggggatgccgagttcctcggccttggtggccttggagccggcgtttgcgccgatcaccacgtaatcggtcttcttgctcaccgaaccggccgccttgccgccgcgctcgataatcgcctctttggcggagtcgcgcgaatagccttccagagaaccggtgaccaccacggttttgccggccagcgtctgcggcaacgaactggtctcggcctcgtcgacgcccacgccggcggcctgccaagcacgcaaagtcgcgccgcgccagtcgccgggctcgcgggcggcggcgaaccagttcaccaccgattcggcgatttccgggcccaccccgtcgatggccgtcagatcttcaatcgtggcgttttcgatggctgccagcgagcccatcgccgaggcgatcaggcgtgcggtaggcggaccgagccggcgaatcgacaacgcgaccagcacacgccacaggtcggcgtgacgggccttgtccatttcgtcgaacatcttgcgcgtgttttcgccgggccgaatgatcaccggcacatccgtgacgccggtgcgcgtggtcttgtggtccacgcgcacgatgaccgcgtcggccggcacgtcatactcgggataggaggctgcggcaaagcccggcatagtaccaagtggagcctcagccccggtaggtgcgccggtcgtctcgctggcggcacctccctgtgttccggcggattcgactgcggcctcttcttgcgcgcgttcggccaactgcttggccgtgagcttcttggccggcgtgggcgcggtccagaaggcaggcacctgatgccacaggccagagccgccgacacgcttacgcacctttttcttcttaccgttcgcaccgaccgtctcatgcacttcgacgattgcggcctcacgccacacacgcacgtcgcgcagatcggcggaggtcaggtcgaacaacccggattcgttggacaacaccggcttctgcgcggccggcaattccagcccttccaccggctcatacgggtcaggctcttcgccgggggcgaccagcacctcggtgatgttcggcgcgtaggtcgccaccgaatcaggccggttctcctccgggttggtcagagcgatggccgactgttcacccagatgctcgatgtcgaacgccttgcgtgaggccagcgaaatcacgcgctcggtcaactgggccgggcagctttccacattcgggcagcggatgtccttgtcaccctccttggcgggtgccagtttcgcgccgcatgaagggcagaactcgggcatgacgaattcgcgcagctggccctcacgccctttgcgccgttcaagcaccgggccgaccagttcgggaatcacatcgccggccttgcgcaccaccacggtgtcgccgatcaggatgcccttgcgtttgacttcaaatccgttgtgcagcgtggtacgagccacggtggagccggccacgtagacaggtttgagcacggcgaccggcgtcacacggccggtacgccccacctgcacggtgatgttgagcagttcggtgttgacctcttcgggcgggtatttgtaggcgatggcccagcgcggcgcgcgcgaggtggcaccgagggcgcgctgcaggcccaggtcatcgaccttgacgacaatgccgtcgagcgcgtgctcgatgtcgccgcgatgctcgccgtagtactcgatcatgtccaggatctcctggaatgaggtcaccgcacgattatgcggggagaccggcacgccccacctggtgtatagatcgtaggcctgcgactggtcggcgaccacgtcatgggtgccgcgcggatggtccggcccccaggtgagctgccccagaccatgcgcatagaaactcaggcgacgggtggcggtgatgcgagggtctttttgacgcagcgagccggcggcggcgttgcgcgggttggcgaagggcgctcgtccggcgtcctcctgctcgttgttcagggtgtggaagtcatcccagcgcatgaacacttcgcctcggatttccacgaagtccggaacgtcttccttggggccgccgaggttggcgggaatggagccgatggttcgcacattcagggtgatgtcttcgccggtaacgccgtcgccgcgcgtcaggccctgttcaagcacgccgttgcgatagatgaggttcagggcgaggccgtcgattttgacctcgcagctcatgggcaggggcttggattcgggccaatcgaggtcgcgaatcaccgagtcgtaccaatccttgagttcttcgatggagaagacgtcgtcaaggctcatcatgcggctggggtggcgcacggaggtgaagtcgttggagaaggagccgccgacgcgatgggtgggcgactgcggattgtccaatgaggggaacgccgcttcgagtcgttcgaggcaacgcatgcgcgcgtcgtaggcggcgtcggagctgacgggtgagtcgtcgatgtagtaggcgatctgatcggattccacccatgcggccacgcgagcccacaggcgggcggcggcctcagcggtcatcgtgttcacgtcgaaacggtcgaggcgtatcgcgtcgtcgtcagtgggctgcagtgcggctatccattgttcggagccaggggcaaaacgtgcaataccggtatcaggccggacctcggccacatccccatcgtcgaaatcccatgccagttgttcgttcgtgctcatggttgtctatcctagcgggctcggctcccctcggccggctataccgtcaactcccctcaggcggctacgcggatagcgagcgcaggaactgggcttggatgatgtcgatgttgtcgccttcaccgtcattcatgcgggccacggccaccgagagcgtgcgggccggcacgaacatgccttcatccacgcacacgcgggcggcgtcacgcacgatgtcagccacttcgttatgcggccagaccggcagatcatgcgtggcaagcacatgggcggccgtctccaccgattcaggcaccggcatgcactgcgagtccgcacgggaaaccagttcctgcagttcgctttccaacgaaccaatggccccgggagcgatgtgatcgctcataatgtaggctgcggcggctgtgtcgaaccggtcaagcatccattcggcgtacgcgaaccggtagtaggcgaacgcggcatcgtcgcggtccaaggccacgcgcagagcattcaggcaggcggcgcgtgccgaatcccaatcctcattgcgggccagttggatggcaagcttcagatgtgagagtgggtaggcgggcgcgtacgccaccatacggttgaggtgcgggatggccgcctcggcacccttgatctggctcaacacgtcagccagctccatgtgtgcgtagaacagattgtccgggatgagcaccgtacgctcgtccaatgtggcgaacagtcggttgtagaccacgcgctcggcataggagttgaagtatcgaggtacgccatggcctgccgcatacacctgatccaaatgggccacagccgcttcggccgcttcgatggcctgatcggcttggcccgagaacagcatgtctcgggcgcgcagacgctccttgtcaagatcgtcggcaagcgtgaacgtgaagtccggggtgtccttgccatcgatcaacgcactggtgacctgagaggccaaaccggtcagttcgggatcgcatatcgattcgatgatctgcatggctcgctgggccttttccacggagccgagcgacgtgttcctggcgatatcgtggaattcgttgacgccatgctgtagtaagtccactcgctggatagccagtccggcactattctgtgcgcccagcacgtgagcggtcgccgggctgaattgacggtcggccagttcgggctcctcctgggatccggtgggagagaaccggctgtccgccaagtcgaagtcggcgctgatgggtttcaggccgccttcgccgtccacgtccatcacggcaccgaacatgcggtaggtttcctcgggattgtcaagcccatcggtgtccagtcgcttgaggaaggcatcacgggtgaaggtgacggtgaccatattgcgcacggtgggattgcggcgcagcacgctcatcggatcatcgtccatgccggcggccccatcagcatcgtcagtgccgacgccctcgccgccgataccgcccaggtcgtcgcctgcgccggtatcgtccggcatgccgaacgccatttcgtcgatatcgacgcccttcatcaggtcttcgaactgcgaatcgatggacgcggcgccatcggcgtcagcggattcggccgcggcctgatccgtagcatccgcagacggtccggtaccgttgcctattcccccggccgtgccgcgttcgtcaccggacgccgcctgcccgaacgtctcctcatgggtgatggggcgggtcgggtcgccatggaaatcaccatctttggggtcggctttggaacccacacgccccaaatcgccactgcgcagatgttcgaaggcgcttagggcctcgctcatcatcgcctcgatggcggaatcctgttcggcaatcgcctcttcaagaccaatggaatcgatgtgcaacgacacctggcgcacggattcgctggtgccgaaactcagcgctgccatcatcaggccgacacgcaggttgtaggcggcgctcatcgacgcgcgttcggcgctgctcagcgcacgccacgtacggcgagtggtgtcataccggctatcgggcatcatcgaggtgccggcagtggtgaagccaatggccacttcacccgaatccaagcgcgaccggaactccacatcaaaccgatacggcaaccgtaaccggcgcaacagtgaggagagggtctgacgatacacccattcgtcgctcctcgccggcgaatacgaaggccgagcggcttgagtgttggtgtcgctcttattggtccgctctacagcgccctcaacactctcagtactttcagcgcccgcagcattcgtcacacccgaatccggcacgttctgctgggtcagcacatctcgaggatcagggaattcactgcgaatctgcccagccgtgcgtgcggcgatatcgaccaggctcagcacggcccgacgctcctgctcgccatcatacgggtcaagcgccataatcgcagggttctcaatgagtttcatgtcgatttgcgcggcctcggcacgggtcaccgtatcttccgtagggttgcgccccaaggaagcgttgcgctccagccaagcgctcaccgcagcgaatcggttgaggttgccttcgatcttcaaggatttcagcgcctgcccgaatgccaaggacttatcccacgtaaagaaatagccgctcgaatacgtcgaggtgtacaggtgcaacggttcggcgccatgcaccgcttccagtcccggcgtggtgtcgagggcgccggcttcgcgcatcagatcggcgaagtgatcctccagaccggaggcccgcatgccgtgggctcgtgccgccaaagtgtcacgcaccgaacggcgaatcgcaccgattggcgcctcacggttgagacggcggaagatattgccggaaccgaatccgatgagcagaccattgatctgcggcaacatatacgtggcgaagaacgcgatggtaatggcatcgcggtattccaaatcatgacgcatcacaggcggcagattggcacgcatctgctcaagcgtgtaccggttgccggccttgagccatgaggcgagccacgtcatgcgtccggtgtcgtcacgccccaccacgccaccggtaatggccttcacgccgtcagcaccatgaccaaggccacgccccaaaccacgcccatgatgcagcgcacttcccaggccatggcctgcacgggagaaaccggaacgtgaacgcggctcgtcgctttcgcccagccgctcaccgtccggcagagtcacttccttttccttgccgaacatgaatcgcgcctgcatatcctgcacgtccatgttggggttggtgcccacgaatacgcggccatgcgtatcggcgaacgccacctgcgcaaaatgatcgcggtcggggaaaatgccaagcgaaaagccacggcctctggtggagggcagctgcgcccatccaagcaccagcccttccggcacgttctccaattcggggaaggtgcgtcgcttgattacaggactcagcgccactgcatggcgagtcagttcgtcgataatgccgcctttacgctcactggtctcctgcaaggcatcgccgaacggattcgtatcgtgcttcttcggcttggacagtcccagatcggccgcgagcgcgttcatcgaatccttcagcccgcccagcagtggcgtgcggttgtgcttcccatggtccgatgtacgttttggcatgattcacattgtctcttgtttgcccgacatcaagcccgaataaagcctatagaataaatgcgtgcattccatagaccacactcgcgcagaccgtccgatgccgtcgaatcatgaacggcacctgcccagccgcccggatacccggcaccggctgcgtttggtgcgcctgctgatcgccttgctggccgccgtcgccgccatcgccgccatggagtgcatcgtgttcaacctgccgttctggcgtacgctcggagcgagcacggatacgaacgccgtgcataacacgctgggttcgggtctcacgcgccggaatgatggcatgttgaccgtcaccgatccgaccaaggcctatcttgaactgaccgcggacggcacgtcggattacctacgcatcgataccgagagcagcaaggtcatcgataaggcccgcgagcaggccgaggccgaatccgaagcgaacgacgataaggaagtcttcaaaccgctggcgaccattcatgtgcgcgcggatgtcgatggcatcaccggcaaggcccagtcgatgaatcccgacgctattcgcagccattatgtcaaggcaccgggtgccggcatcgtgcgtatttggattcaggaagagcgcggcgcgatcgtaccggtcaccgacgcccgcgccaacgtgcgcgtaccgttcgtcatcaattggatgcgcgtgctcgccatggccttggtgttgctgatgattgccgtctggaggccgggatcgcgcctgtggcgtatcacgcttgacccgtccagcactcggcaacgacttgctttcgcggggcttctggcgattcctaccctgcttatcggcgtatccatcatccacgaactgtggtacgcgtcttcgctcgtcttccacgtttccggcgattacacctatgatttcgaccagtatgggcatgtggccgatgcgctggtcgccggccggccctggctcgacttgccggttcccgaacaactggccgccaccgagcacccctatgacgtagccacacgtgcccagctactcgccaatggagccagtccgctctactgggattacgcgtattatgacggtcactggtattcctattttggcgtgttgcccgcagtgctgctgttcgtcccctatcgtctgctggccggtcataatctgccgacatccgccgccgagtatattctcgtgctgctgttcatcatcttcttctccttgctggtgctgcgcgtcatccatcgtgtgatgccgaagacttcggtggcggccgcgtcgttagtagtggtctcatcgttggtgagcgcgcaagtggggtatttgctgtatcgcacgaacttctatcagataccgttcgccgcatcgctgacgttgacgtcgctgggactatggctatggctcggcgcggacacgtcccgccgtccgctgagaccatcggaccgatggcaggcgggcgatgccaagcctctctccctgccacgactggccttgggcgccttgtgcattgcggcgaatttcggatgccgaccgacgttcaccttggccgcattgcttgcgttccccctgttctggccgcagattcgcgcgctgggcaccggtctgcgcacacgccgcatcaagccgttgcaggcgttgcgcgcgccgctggcggtaatcattcccgccattctcgtcgtgacgcctctgatggcgtggaacatggttcggttcgattccccgttcaatttcggcaatgcgtatcagttctccgtatccgatatgacccggtataccaccccgtccgcggatatgcccgccaacatctggtattacctgttcctgccgctgcgcttcatggatcgtttcccgtggctggcgggctctcccgccccgatgccgcaatggggttattacgaggtgatggtcggcgcgattttcacggccacgccactgaccttgatggctttggcgctgcccctgctgcgcagattggaaacacacggcatgcggccatggctgatgtcttgcttggccgtggcggcggtgctggtcgtattcgacagccgtgtcggcggtttgggatggcggtattccgccgatttcggctggctgatctcgctggcgtccataccggggctactgtggctggtcaatgggcgcgaaccgagccggtcattggcgggggccaacgacgccgcttcagacgatggcatcgcccgcgtcactccgtggcgttggctgatgcgctgggtcgtggtgctggccgtattgtgggcgctgggcatagccatactgagctgcttcgtgcagtcgcgcagcgattcgatgatcgacaacaatccgacgctctggcatcaggttcaggcatggttcacgatgctctagtctcgtatcggcgtcggatcagatcctcataaaacgccacagcctcagccggcgctccgtcaaacacgaccgcgtgctcgtccagcaccagtatgcggtcgatggcgtattcgggccggcggatcatatccgtgtcatgcgtggcgaaaatcacctgcttgttgtagctgaacaacgccttggccacatgcgcggtgccaatctcatccaatcccttgctcggctcatccgccacaatcgcactcggctcaaagctcagcgcggccgcaatagccagcaggtgccgtttctcggagtccaattcgccggccttggccttggagacctgcgccaaatcaaaatgcgcgaacagattaccgatgcgcgcatgacgttctgactcgggcaccttgtgctttttcaacgcttcggaaacagcctcggaaatattcgccgcttggtagaaactgttcggaatctcctcgcggcgaactttgccgaccagattatcgatgcgcttcgcgtccttcttcacagccgggtcaagacgttcctcaccgcccgcaatggtcaccgtgccggcgttggccttcaacgaaccgtccagcagacccagcaatgtggatttgcctgcgccgttcagtccgatcacggccacccgccgctcgctgatggtgatgtccgtgggagcaagtcccacgtgcccatcatcatacgtatgcccggcctgttccaaagtgaacgtcagcgatgccgggtgtggcagttctttcggtctaaacaagaatcccatgccgccattgtacgtggagtacaggtgtggtgccggcaaacaccggcctatcgcagcaaagcggcgacggtattgagcacggcgcggatgccacgctcgaattcgtccggttcgggcagcagggaaacggccaggtatccattggaggtcatgtcgaagaagtagccgggctgtccggtgagttggtgctcgtcaatcagccgcaacaccagttcgttctcatcgatgacggaaggcactcgtaacagcacgttccagccgccttcggcccgtagcacgctgaccagcccgttgggatcggcgtcaagcaactcgtgcaacttggccaggttattgcgcacgcgctcccccacccgtctggtctgtgcgggcgcggcgttcaataatgcgggaatccgttcggcgatgatgtcgcccatcggcagataatcgtcggcgatgacgtccagtcgacgctgggcctcggcaacgtcctcggcaggtccggacacctgaatccacccgactttggcgtgcggcgcggccagcattttggagaatccgtctagggcgaaggtgagcacgccgcgctcccccgcgagccgtgcgtcgccggggaaaggttcgagagagtaatcgaagaacacttcatcggcgataagggcgatgccgtgctcacggcacaatgtcacgatacgtgcacgctcggttggttttacgtacgaaccggtcggattgttcgggttgatgagtaccaatgctctgacgcgttcgccaccgggctcgctgagtagccgctcgagttcggcgatgtcgatgaaccaggagccgtcgaattgcaactggtattcgaccgtatcgacgcattcaagccgtgcaatcgactcaatcagcggatagccgggtttgggtgccagcaccgcgtcgccggcatcgcaaagtaacttaatcagccacgaatacgcctcggacgtggagctcagcaggtacagggcgtccgggtcggcgccctcgatggcggtattcacattggtgaaagcggcatggcgctcgttcctgccctcgccggcggcgggcgaagccaactgagggctgcttgcgtctaccacgtttgccgtattgaggaatgcggccaatgattctcgtgccgcacgcggtccacgcgggtcggccgtatacacgctcggcaccaattcgggtgccaacccgtggcgggtcggattggaatcgttgagtttgctgagtgcgatgccgtttgccttggctgccgcctcggccgccgcaatgggattcggcgcagaaatatccacacgagaagagaaatgcacgctcataccctccacgataaaaccacccctgccgagccaggtatatcgaggcctcatatccaccagcatccagcactacgacaatcgtgcggcacggcagcggagtcgtcagacatactatgacttcaatccacatcgaataacggcctagctacattcattaggtcattttcgcgctcattaggtcactgctagtcgagcctcacaattgttgatgcttgaaacgccgccattccgagcccattgcaattcaggtttggaatgggagtgacctaatgaacacataatcgacctaatgaacgaattactcattaaaaaaggccgcccgaaatacttggacggccttacatatggtcaatacggctcctgcgccagcagaaataactcagctcactgctgcttggtactggcgtagtaggcggcaccgacgatgccagcctggttacgcagcttggcgggcacaatcggggtcttgatatccacgtacggcaggaacttttcgctctgacggctcacgccgccgccgacggtgaacaggtccgggttgaagtacttttccataaggccgtagtacttggtcagacgcttggcccacttcttgtagcccagttcctcgttctcgcgaatcgcggaggaggcatacttctcggcgtccagatgcttggcgctcaggatgatgtgtccgagttcggtgttcgggatgagcacgccgttgtagatcaaggcggtgccgatgccggtgcccagtgtggtggcgatgaccagaccatcctggcccttggcggcaccgaactggacttcggccaggccggcggcgtcggcgtcgttcaccacgacgaccgggcggccgcaggcttcggagaacacttcagtaacgtccacgccaatccaagactggtcgaggttggccatgaagtcgagcttctggccgggcttgatcggcgcggggaaggcgatgccaacgggtgcggattcaggcacttcgaagtggtcgagctgctgcttgacgattttggccacggcctgaggcgtggagacctcgggagtgagaatcttcaatcgcggctcggcgaaatcgcccttggtcagatcgacaggtgcggccttgatgccggaaccgccaatgtcaacaccgaaagcctgtgcagtttcaatcatcgttgaccttcctttccatacgttttcatcagttcgtagggttgcgcccagtctaacgcgaccatcacgcggacgcgccggacgggccggggcatggccgtcactcaagcgacggcatgggcttccaggtggggtcgtgcatcagcttgcgcgagtcccaccagcccttggcaatctgcaccaaaccggtcttgaggtgttcgcgatccaccatcaccaggcgaatgacttccttggccgcggtgagcacggtgcccagtccaaacaccagcggacggaagtcgccgtaggtcatgaagtaccgggccatatagccgcggttgcgcatgatgtggtaccggttcatgtcggacgtggagttgagctggcgcacgccggcgatatcccagttgccgatttcgcgcgtacggcgcaaaatcacgtcgggcaccacaatcgggttggtgaccttgctggcgcggtagccatacatcgtgtcatcccagtagatgaagaagcgcgggtccggcagaccgatttccgtgaccacacggcggttgaacaggccgccttcgaagcacagcgtgtccatcactcggtatccggccgggccgaatgcggcgggcgcgatcgggttcgggatgcccagcggcacaatgaagtcgtactgccagtagaacgggccgccatcgtaatcgaatcgggatccctgaatcacctcgtgcttgtcggtccacttggacagcttggcaatggcgtccggcagcacggccacatcgtcgtccatcacccagaaccatgcggcgcccagatcatacgccttggccacgccggcggagaaaccgcccgcgccacccaggttctcggtctgcggcgcatagaccacccgctcttcgttgccggactggtcggccacggtggtgccccactggccggtcaccttgccggcaaacgcagcgaccatgtccgccgtctgatcggactgctcattgtccacgatgacaatgcgccacggtgcctgctcaagcgccagaatcgaatcgaacagtacctcgagcagctgctgacgtttgtaggtggtgacgatcagggcaagcttgtcaatggtgttgttgggtttcttcacttcagccatggctcccattgttgcacttgaccggcacaagacgaatttctgcacagtgaaacgcgggttgcatacgtccggcgcatggcgtatgaataagcctgtcagtttcagggaaggtgcaattccttactggcggtaacctgtaccccgggtttcataacggggatggcgggaagcccgcgacccgcgcaagcggctgatccggtgagattccggagccaacggtatagtccggatggaagaaacgagggctcattatgagcgtatcttcgcgtatccgcatgcaagttgttcgttctgtggcgcccgaggccgagggttcggccagcgcgtccaccgccagcaccaacgccaaacttggctcacacaccactggcgtggccgattccggccgctggtccacgcgccgtatcgccatgtatgcgctgttcgtggcgctggcgatggtcaccagcttcattgaattcccgattacgccggtcacttggctgaagtacgacccgtccggcatcgtctgcctgatcgccggctttgcgtacggtccggccgccgccgcaatcgtgtctgtgctcggctttgtgccgcacatgttcgccgacccgtggggttcgctgatggctgtgctggtggcgctgttcctgtctgtgccggccgcgttcatctaccgtaagatccgtacgcgcaagggtgccgccatcggcattctggtgggtgcggtgctggccatcgtggtggcgctggtgggcaacctcatcatcacgccgatttacgcgcacatgccctaccaggctgtggccgcgatgattctgccgattctgctgccgttcaacgtggctaagatggcgattcacgccgtgatcaccttcctgatctacaagccggtctccaacctgctgtccaagcagcagtgaccggcctgagacgggcctatgcccgccacgactaacgaccactcaacgaccactcaaagaacaagaacgcagaactccggcccttgccgggattctgcgttttcgcctatcagttacggattgctgtttcatgaccgttgcaccccattccttcgacgccgacgagttccacgattccgccgagcccgctccccccgccgccgtactcaaggacattcgtttcagctatgaccgcggcacttcatgggctttggatggcgtttcgctcacggtccatgccggcgagcgcctatgcttggtcggtccgaatggatcgggcaagtccacgttggcccgtctaattgcgggattgaccgcgccggacggtggcgaagtgacgctactggaacagcgcgtgtacgcagccggcccgaatgccgacgcctatcgcgctgcccgccgcggcatcggtatggtgtttcagaatcccgaggatcagctggtcaccaccgtgttggaggatgacgtggcttttggcccggagaatctcgggctggagcgcgggctcatcggcgagcgcatcgttgattcattgcaggccgtggggttggcgaacttgcgtcagtccgacccgacccgtatgagcggcggacagcagcagcgcgccgccatcgccggcatgctggccatgaacccggcgatgctggtattggacgaaccgaccgccatgctggacgaatccgcacgcgccgaagttatgcgcattttggatgatttgcaggcgcgcggcaccactattgtgcatgtcacgcatcatccggatgagaccgttcatgccgatcgcatcgtgcacatggaggccgggcgaatcgttggtgtcactgcagccgccgataatcgacccccgctagcggaggctgtctcgcaaagcgagaccgagggtggtatcggcacagaagccgcccccagtcgtcctacgaacgacagcccccgccagcggaagcgcgaagacggctccgaactgccgctgctctccgacggcatcggtgatatgacgaaccccattattcgcgtctcgcatctgacctatcgctatccttcggccaaacgggcggttatcgatgacctgtcgttcaccatcgcgcgcggtgaaaccgtggcactgatgggcgtgaacggttcgggcaagtcgacgctggtgcgcatgctgtgcgcgctggccgcgccgaccgccggcagcatcgaggtggccggcgttccggtggcctcgaccggcaaacgcggtagcaacgcacggccggagccggcgaatcgcaggcaattggcgcaattgcgccggcatgtgggttacgtgatgcagcatccggagcaccagttgttcgcggacacggtggccgaggacgtggcgtacggcccgcgcaaccaggggctcgccgaggccgaggtggccgaccgtgtgcgcgaatcactggacctgctgcatatcgggcatcttgccgaccgctcccctttcgacctgtccggcggacagcagcgattggtggccatcgccggcgtgctggcctgcaatcctgacgtgctcatcatggacgagccgaccgcgagcctggacgtccaggccaaggagcgcatccatgagctgttgcgcacgctcaaatcgcgcggcgtgaccgtgctcatcatcacccatgaccgagcggaggccaagcatatcgccgatcgcgtggtacgtatgccgattgccggcgcggctggtgctgagagcatctcggcaaccgagactgccttccccgccgagtccgtctcccctgacaaacccgcgcactcggtgatccaccgacttgacccgcgcgtgaagatggtgggtttcctggccgccatgttcacgatgttcgcggtgaacacgcccctccagcttgcgctgggcatcgccatcaccctggccgttatcgcggcggcacgcctgaacccgttacgggtgctcgaatccattcatccgattctgatcctgctggggctgatgggcgtggtcaatctgtttgtggtacgcaccggcacgccggtggtggcgctgggcccgctgagcatcaccgatcagggcgtggccatagccgtgctgtacgcctgccgtttcgcattggtgatcattctgggcgcggtgttcctcaccaccaccacgcctaccgccatgaccgacgccttcgacaccctgatcagcccgctcaaccggctcggcatccacgcccaggagatcgcgttggtcatgagtctggcattgcgattcattccaacgctgaccgacgagacccgtgccatcgtcgacgcccaatccgcgcgtggcggttccatcgaaaccggttcgctggcccagcgcatcaaggcgatgagcgcgattatcgtgccgattttcgccggcacgttgcgtcacgcggacaacctgagcctcgcacttgacgcccgctgctacgaggagagcatccgccgcacccactggcgtgccctgaccatcgccgcgcaagatctcgtgttcgccgtcgccgtcatcgcctacatcgccgccatcatcgcgctgtagggcggcaaacagcacagacagcaccggttgctatgctggtgtggttatacgaaagatgtaaggaaattcccatggcattgaccaagaagcaaatcaagcagctgcgcgcgatggcaaactcgctgaagcccctgttctatgtgggcaagaacgatttgaccgagtcggccgtcaatcaggccgatgaaaccattgagaagcacgagctcatcaagtgcgccgtgcaggacggttctggcctgaccgccaaggaagccgccgccgagcttgccgagcagctgaacgccgaagtggtgcagtccatcggcaatcgtttcgtgctgttccgtcgctcccggcgcgacgatgtggagcatatccgcttggtgcgcgagtagcgttcgctctgctcgatcccgtagcttgatatgagtaatggcggttggaatcagtccgattccaaccgccattattcatattcgcccagcgagcaccgtcactgatccaagatggacccgacgattcccgcaacaatggtcagaaccaaggaccccagtaccgaccaccagaaaccgtgtacgaagacgcccacgccgaacagactgaccgccagccagctggcgagtcgcatgaacagccaattgataatcaaggtgaccagcccgagagacagaatcgcaaacggcagtgcgatcagatgcacaatcggcttgattgacgcattaatcagcgccatgaacaaagcgaacgcggcgatgccgagaatcggaggctcccccaccggggtcatgccgggagtcaccgcgaccatgacggcggcggcgatagtcataatcaaccagctggtcaggaaacttttcatggcccaatcgtagcgcggcaggttttactattaggcaaaacgtgagatgatgttgtgcagaaacggtaagaaggtactgccgttcccgattgagaagggatagacccacatgactgataatcaacaacaaccgtacggttcggacagtgttccgcagccggcacaacctgcacagccggcacagccgtcgtacggccaagatgccgcacggcagccgcagggctatggcgccccacagcccgccgcatacgctcaacccgccgccggaagctacggccagcagcagccgcaatacggccagcccgccggcgcatacgctcagtctcagtacgctcagccgcagtatggccagcccgcacagcccgcagcgggctacggccagcagcccggctatggacaggcctaccagcagccgaatgcctacgcacagccgcaatacaccgccgctccgtatgccgccgccccggtgtggcaatcatccaagtccaagttggctgccggcctgttgggcatcttcctcggcggacttggtgtgcacaacttctatctcggcaacaccggcaaggccgtggcccagctgctgctgacgcttgtcggctggattctgctcggacttggcccaatcgcagccgccatctggggctttgttgaaggcatcatcattctgtgcagcaagcccggctcgccgtggcataaagacgccaacggctacgaactatcagactgagactgacctcgggccacgttcattgggcctctgatcaaccacgcctctgcaggtatcatctcgatgccgcagcctccgtgggatgcgacacgccggccgtgtacatgagttcatgtacacccgatacaggcgaatcagtatcgcacgagattcaacagttcctgctgtttggcatagcgggaaacgttggtcagggcgatgcggatgatgtgttcggaagtcttttccaaatgattgccgccggccacatgcggggtgatcaggcaatgcggctcatcccacaacggactttccgccggcaacggctcaggctcagtgacgtccaatccggcaccgtggagccgtccattgtgcaaggcgtcggccaaggcctcgggatcgatggcgtcgccacgcccggcattgatcacgatggctgtggatttcagacgacccagacgatccgcattcagcagatgatgggtctgcggcgagcgcggcaccgccatcgccaccacgtccgccaatggcagcagtgcttccagccgctcgaagccatacatcttttcaatgcccttggccggcacgtccgcatgacggcgcacgccgaaggtacgcatacctacggattgggcaagctgagcgaaatgcgacccgatgtcgccgacgccgataatcagcgcgatgccaccttccgggctcaataccgggccttcatcctgccactgatgatcacgctgattggaggcataccggttgaggttcttcatcaatgcccacatggtggcgaacatgtgttccgacacgctttggccatacgcgccgctcgcattggtgaccatggtgccgcgaggcagcacacccgagcggatgtacgcatccacaccggcgctgaaggtctgcaaccattcaagacgggtgtattgagcggcctgcgagaccgggaagttgccgatgactgcggtagcttgggaacgaagctcctcgggaacggcggccgaccataccatgtcgccgcggtgcgcttcatcgcctacgaattcctgcggcacatcgcgggccgccttggcgaaagcgcgccgttctccttcgttgagtggcaggcagttgacaatcagcttatgcgtgttctcaatacccatggttcaccaaactaggcggcagggcggatattatcgcgtgtttcctcatgctgaaccaatgccgaacccgccccgccggaccaatgccgaacccgccccatcaaaccccaccaaaccaagggacagcccattgcgcatcgaccgtagcgtccgccccgaaccgtacactcacaggtggttttgtgattccatagcgtgcagccaaggcagtacgattgccggtttatccgcacgcacaggtacctacgccggttggtaaaccttacattccatacattgcaaccgaacgtttaggagcatgtatgcctgagcagcatattgataacgagaagattcccacacgtcttatcggcgcgattgtggctgtcggctcacttgccttcattggcattctgaccgaaaccgtgatgaccgtgcttttccccgcactgatgcgcgaattccatgtcgacacggccactgtgcaatggattaccacgatttatctgttggcggtggccgctaccatgcccatcagctcgtttttgaagcgccgattcgcactgaaaaccatttttcttgcggctgtgattctggccatcgttggctcgctgatcatgatcgtcgcccaagccttcccgctgctgattgtcgcccgcattattcagggcattggctcaggcgtggccacgccgttgatgatcaacatcattctggagcagtctcctcgttcgaagatcggccgattgatgggcgtaggatcgctggtcattaccgtggctccggccatcggcccgaccgtcggcggcgcggtgaccacagtgctgccgtggcgcgcgattttcgtcatcgccattccgctggtgctaatcgcagcatgcatcggcatgaagtgcattgagcagaagacaccgaccgaggctgcctatcttgacccgattcagcttgggtccattgttgtcgcgttggtcggtctggtgctggcgctcaaccaaggtggcgtggccatcagtgcggcggtgtccggcaagtcagccacacgctccggcattatcgccattgtcagtctgattgtgggcctcgccttgttgatcgtgttcgccatgagttccaagcgtgccttctccccgctgctgcgccttggcattctcaaggatcccgccgtactgttacacgcctgcgcatatctgctgctgccattggtcgccatcggctacggctatgtcatcaccaatgtggcacagctctcgctcggcaccacggcatttgtggccggctctctggtgctgcccggagcactggtcggcgctgtctgtgccccgcttggcggctggttctacgataagttcggcgcggtcaagccgattctgattccgatcggcatcgctattttgggcccagtgcttatgctggtgttctcgatgcagcttacgcccgtgctgctcgccggattctatttcattttcggtctgttctattccatcggcaatgcgaatgtgatgaccagtggcctgtcggaggtctctcccgagttcaagccggacggcaacgccattttcaacacgtgtcttcagtttggcggcgctgccggtaccgcactgttctccacgattctttccgtggctcaggccggcgcaggagaagaaggcaccgctgagtttgctcacgccactgccgtcggcggcacatggacgtttgccacgatgacggttatctgcctgattggctggtgctgtctggccaccgcgttccgcattcgcgcctcacgccggcgcgcctaagaccgtcagtccgcggcccgcgacgcctcccgcccggattcgtcaccgtgcagtatcgggcgaatcttggcaagacgctggctgacttcgtgttcatagccgcgatcgttgggatggtagtactcggtgccacgcagctcttcgggcatatattcctgtggcgccacggcaccgggccaatcgtgcgcatacttgtagccctcgtggttgccccactctttcataagcttggtgggggcgttcctcaaatacagcggaacagcgccgatcttgccggtatccacgtccgcgagcgcctggttaatggcgttatagctggcatttgatttgggcgcggtggccacggcaatcgtggcttcggccaaaacaatacgtgcctcgggcatgccgaccagcgccacggcctgcgccgcggccacggtgacctgcaaaatctgcggggcggccatgccgacttcctcgctggcggcaatcatgatgcgacgggcgatgaagcgcggatcttcacccgctttcagcatgcgcgccagataatggatggcggcatccggatcggagccccgcatggatttgatgaatgcggaaatcacgtcgtaatggtcatcgccgtctttgtcgtagcgcacggtggcggtgtccattaccgtagccacgatttcggaggtgatgatgggtcggcgtgcgccctttttgcgggcttcgtcgccggtgaccgcgccagccgcggcctccagaatcgtgagactcttgcgtgcgtcgccaccggccatgcgcacgatatcggcgatggcttcgtccgtggctttgacctcg

SEQ ID NO: 2123 - DNA, 26819 bp, Unknown
  R51_24m  MAG No. k141_4963
ctgaaagccatcattaattgcgttcgagctggccgcgaagcggactgagggagagaccccggcgaagccgccaaccatccatcgggcatagcccgatcccgtttcacccacgccgcttggccaaggcccatccggccaacgccaatggcacggacgccagcgtgaagatgaatggcagcatcatgcccacatgagggttggaggcgtcaagcacaatgccggccacggacgagccgatcgatgtgccgaccgtgcctgcggtggttacccagctcagtccttcagtcagggattccgccggcaccagatccttgacgatgaggttgccggtggcgaacgtcggcgagacggtcaggccggcgaggatttcgaagacgcccagcaggatgagattgtccattgacagccggaagaacacgtagccgacggtcagcagcgacaggaacatcaccatatgcgcccaatgggagcctttgagtcggcaagagccgaacaccagcgcgccgatgcacgagccgaccgcgaacatcgccaattgcagaccgaggaagggctcaagtcccatggatttcatggtggcggtaatggacacgtcgaaggacgtgaagctcatattgaacacgatgaacacggcgagcaacggcagtacgccggcatagagcaatacgctcttgggcttggcgccgctgcgtttgagctggcgcagggtcagctggtcggcatcttcgcttgcagcagggctgccgtcatcgtgcgcggccacggtgacctgttccacgataaccggtggctgggtggatttcagcgagaagaatatggtgccgccgataccgcatgccacggtgggcacgaacagttgggataccgggtgcacggaggtggccagccaagccgccagaatcggccccagaataaagacgatctcgtcaatggcggcttccatggcgtaggccgtgttgagcagctgttcaccatcttccacaccgcgcaacgcataggaccagcgtgttcggaccaatgcgccgaatgagaactgcgtcagacccatgatgatggccaggacgaacagcagcggaatcggcacgcgcaccaacgccgcgaaggcgaaggcgagcatggccacgatctgcacggcgagcgcaagccggcccacgcgggcttggccgaaacggtcgaaggcgcgggcgtagaacggggtgacgcagctcatggccagcacataggcggcgctcatggtgccggcgatggtccaattgtcgtagagatggttgagcgccagaacgatgccgagactcatcatggagatcggcaatcgtgccaccgcgccggacaggcagaacgccttggctccgggcagcatgaacaggcgctggtagggcgagtgggcagcggacgacttcgaaaccgcgcgagtcgtggacacaataactccttactggtgcgttgtccggcacgtgcgcccgcccacacgtgccatccgagggtagcggttcccgagcaacgtcacgcggtgcgtttcaaccgcggaccggtacgtggccagtcgtcttcatcgtcggagatgccttgcgatgcataaggtctctccaccggtgaaggccgtccgatgctgtacaggtcatgagcctttgggctcagtcgttgtcagattgttcgggaatgccggagctcaactcggtaaggatttcctgtttggttttcgcgcgggcgtgaagctcgcgcaagccctcgtcgggctcactgacatagtagagagtggcgtcgatactgtccaattccacaccttcgaccgctgccagcagcagtcggtacatgtcgagctgggcgagtttgcgggtgatgtcgtctggcttggtgggccgacgaccggttttccagtcgaccacggtaaagcgtgcggtggtgctggacgggtcaagtccaccgatgaataccgcatcgagtttgccattgaccaggcccacgcccggcacgtccacgacgatggcacgctccgtccacgccgggatgcgcttggcccacgatgattcggccagtctgcgctgccacgccaccagcttggactcggtggcattgtcgctgcttatggaagtggcggatacggcggatacggcggatacggattgttgagccgtggtctgtgggacagcgggctgccgtgtggatggcttgcggcattgccgctcccgttcggccaaatcggccaacatggcttcccgggaaacgaatcccgcatcctgacctgtatgcggcatgcttggttcggcttcatatgccagtaccgcttcatccggcttaccggcattgatgaattgctcggcccacgcatggaactgcgtgccggcctcggccgccggagacgatatgcgcggaatcgggcggataatgctacgccagtagaggcgctcctcccgttcgttcatgccacctacgcgggcttgcaggcttgtcacgttctggcgtcctgcggccagaacgcgttgcgccttggctttgactgcctcatcaagcgactggccgctggcggcatcggccatcaaatcggcgtcgtccaccagcaattgtgcccgttgcaggagtgggccggcgtcttggtgctgctcaagtgacgaggaatctgcggcgatgacatcgatgccgcgtgacagctgttcatgcaccgcgtcgctgagggtagccggccacggcaattcggcggcggcattcgtctgcgtaatcggcgtttgccacgcctcccccaccacggcgtcactgtatgccgcggcatgctctccgataaagaacccttcgggaggggcaatcgcttcgccttgcgccgagatcagcatgggcttcccggcattggcggcttgcagccgttccacacagtcctgagccgatatcgcatgttcacgggcttggagcgcgtcatgcacttcaagccagaaattggatggctgagcggcgcgagagcctttgggcaccactgacgggtcccgcccggattcgcccgtataggcgcaataggtcatcagggcatcttcccgcgcacgggtaagcgccacatacatcaatcgacgttcgtcggcatgcagccgacgcccatattcctccgcctgcgtcaaataccagccggatgcatccacttcttccacgccatcgccgaattcgcgcatggagccgaacacttcatcatcgataagctccacatcatccaaagccgccaacgatgcgatggggtcggcttccacatcggcatcatgggggaatcgcggcaaaatgccggcatcggcgcgcataggcacgggcacggcggtggggttggtgagccaggagtcggcggtctcatgatattcgggtgcggtccagtgaccttgctcggcgcctcccgtatggtgttcgtccagcacgatcttgagatggtcgccctgattgctggggaatccgccggcggtaagccccactaccgcaacggcatcccattccaaccctttggactggtgtacggtcatcagttccacatccaccggagcgtcggggagactggcggcttcatcctccaccgaagccagatgatccacccatgtgatgaacccatgcaacgagggagtttgctcagcggcaatctcttgcgtgtacgtatccaccaaatccacaatcgcatccataggcatatgcgccaaagcgggattggcgcggtgctgcggattatgcagcacaccggccaatacggtgtcgatgtcaagatccaacgcttctatgccggcgcgaatcacgtcgcccagtggccgcccgacggcatcatgcacctgacggagcatcaccgcggcccgggttatggcgttgcgcccgtgtgcgctcaaccgttcaagcagttttaccaggtcgccgcgtagcaatacgtctggcaggaataccgcattggccacctgatcgcggtactcacgcaccacagccgcccattcattcgctggtgtatccggttgggcaaggccggcctgcaccaatgcttggaagcgttgttccatgttctgttcttcagcaaaacgggccaacatggtcaaatccgctgcggacatggtgaatcgtggcgtggccagcaagcgcatcagcgatcccgtatcggtgtggtcggcggccacgtgcagcaacgccatcagatcgcggatttccggacgttccagcagcgcggaatagccgaccacgaatgtggtcaatccggcctgttccaatgccgcctgatattcgggcatatgtgatttggaccgaaacagcacggcgaccggcgctttctgttcgcccggcatctgttcctgttgttcggctgcggaacggtgccgtgcgatggccgtcttgcagaaacgcactacggcgtcgatctcctgcccggccgtggcgaagcccagcactcccaatgttccttcgggggcatcaggcatggggtcgagcgatgagacatcgacctcacgcatcaatgagctggagggacgcgacggattggagcgcaacggcagcgtgagattattggcggcttcgagcactatacggctgttgcgcctggtgacggacaacgggaatggcttgtatccggcaggcaggtggaaatcttgctggaacatacggaatgcaccagggctggcaccacgccatgcgtaaatcgactggaacggatcacccaccgcgttgacggcggacctccgtgacgcatccacatggaacagtgctgccagcagagcggcctgcgtggtggaggtgtcctgatattcgtcgagcagcacatggctgtacctgcggcgcgtgcgctctccgatggaggggaagcgctcgataagctgatacgcggcaatggtgaagtcggagaattcggccatattgcgttcccgcttggcttgggcataggcctccaccagctggagcagaatatcgcgtttgcgtgtggtctccagcagcgcaccgcaatgataggcgcagcgggcgtgcaaatgttcggcacggtcatcgagcttggcttgccagctggcgtcggtatctttcttcagtcgtttgatcttggggattttcggctcgtcctcgggcatgggttcgtctacgacggcttgctgcaatcgattgatgaatgccgaatcccattgccgtacttgattgatcgcatcatcgaagctggtgcagccggcaccgatcatggcactgccaatggcatccgacaacgccagaacacggttcgccaaactggagaaggcgccaaaatcctcactgaacgccagatccatgtgactgtcgatgacttcggtggccagttgaagcgctccggctgcgctcaatggttgcgtgttctgatcgaatccgacaagcagtccatattggcgcacgatggtctggaagaaggcgtcatacgtgaaaatggccggcttgaggaatgcccgatcagacaccgtggcggtcgtagagcccgccatatcaccggccactgcggcggagacgcgttccagcagttcgcctgcggccttgcgtgtgaaggtcaggccaaggatgcgttcaggtgccacacctcgattgataagcgcgatgatgcgttgggtcatcgtaaaggttttgccggaaccggcaccggcaaccaccagtacgtcagcatcgactggcgcatcgatgatggcggcctgttccgcactgggagtgaacgtgctcatgcttgcctcgtttcgaaaatagtgtcgatctggcccgcacaggcagggcagacgttcttcatacggcagaatccgatatgggtgtcttgcggatgggcctcgatgatggccgacctgctggccgccgcggcatagaatacgcgggcgatcatggtcagcgaccataacgtctgcgtaccggcgagcgcggcgaattgcgcccacgcttcggcactcacaccttcgggaggagtagccggatctatggcgggtatgtcgaagaaacggttggggtctttataccagtatcgtggcgtgaacggttcggcattcaacgaaccatcagtgaacagcggcggctggaaggcaccttccggggcgtagcttctggctggtgccgcattctgcccgacatggaacagcgcgctttggctgatatgcggcattgcggcaagtgccttggcaccgcgcggcccgtcttcggggaacacgaggccaagctgatagcacacgagctgcagatcattgaaaatctgtttgaccgtgggcgttctgcctgttttgtagtcaatgaggcgaatgcattcgccgccgtctgcgagtacgcgggtttccatacggtcgatgcgcccggacagtctcacggtcagatgctcgtccatgccttccggccaccctccgaccagtgctcccatcagacggaccagcatgttccgatcgatcgggtgcatgccgggcacggcattgtatgcgtcgagtatgtcacgcacatcgaatcgtgcggcaaactcccgttcgcattcggcaccggccaatgcgccaatgctgaagttgctggagttcttgccaagatacgtttccggatcggcgtcgctgcgcacaaagtaatcggcgatgttgcgcagggcatctgccgcggactcgtccttacgggtggcctcatagcggttccgggtgtcggctatggcattcggatcggggcgtttgctctgatagatggcattaagccgtgccgtgacagcctcgatgcggcgttccgtgccggccgtggagtccaagcccagtatggccaacgtctgggcattgtgggaaagatggtccagcccttcctcgctgccttgctgtgcaaccgcatggatgagggttccgaagctggtggccacggagctggggcgaggaccggcgaaccggttctccagcatccagcacaccggacatgcccataggctgtcgaccgccgatggagacagggtgaccatgggtgcggcctgcgcatccgtcttgcctttccccgtttggataccgtcagactgtacaccgccagatgacgcgctgtcggatgaggcactgtcggatgaggcatcgccagatgacgcaccgccagatgacgcgctatccgattgggccggcgattccacgaacgcccagctctgcggatttgcggcgcgcacaccatgctccgacaggagtgtcaacgcaaccgcggcgtcctttgcggcagcctgctgcggttgagcagtggccagaaccgcgcgggcggcgctgaccaacccacgtgggtcggcgtccaatccggccagatcatattcggcggatcctgtatgcgcccccactgtggtgaaaggcgcctgttgccggttgcgcggatagtattccggcagatacccgaaaagaaagtccgaggggctcatgctgtcgtcccataccgcgctgatcatgattcgccgtgcacgggtcagcgcgaccaggaaacccttcttctcgcccgacagcacagccgcgaaccgcggatcatgcccggttttgtcactttcttcaagcgctcccctcagcacgagctcggcaaggtcttcaccaccgaacatggtgttgcgcccggcgaggttcggccacacgtcttgctggaccaccggtatccacgcatatccccagtggcgtccggccgcgcctgccggcgtggtcaatgtcacagcgtcttccaccggccctatgtgggccaaggaatcggcctgcacttccatgccccgaacctgtgccatgaatgacgtgatgtctcggctggcggtggaatcatcggcgaactggaacaggcgcattgccgcgtccagccggtcattggccgtgcgcccctctgccgtgttgaataatgccgcacgctgccagaccggtgccagaccggtggcgttccaggcaacagacagtgcataacgcggctgtacgcgctggcttgccggcagccgctccaagccggaagcaacgctgcccaccagatgccacaggttcgcaaaagcgcgggcctgagggtcgttgccaagcaccgcatggatggatgcgagcgcagcctgcgccggcgcggcggcatcatcaacggcaagcatcacgtacagcgcgtcaacgccaaaggccaagtcatcgtcggacggttcaccgagtatttcgacagacactggcgacggaaccactgatgaggatgtttcacgacctgtttcacgccgtgtttcatggtatgtttcacgcaatgtctcccatgccgtcgtcagagaggtcagcatggcatcatccgtggcgagatgcgccagcgactccagcgcgctcatggccaattcaatcggagtgagccttgcaggacgcccttgaccgggtctgcccccggcactcaccaacgggccgttcatcaacgtggccactctagtccttatatatgccgcgcaggaagccaacgtcatctggcattccgccattccctcggcacgcaatcgggcaagctccacaagcgcgaacaatccctgcacgaaagtctcgtccttcaaaggacgggtgaccgacgaataccgcaccggcacgccatctcggcgcagtcgttcgccgaacagccgcacggcggcattgtcgtgggtgatgaccgccatgtcgttccaccgaatatgccggtcaagatgcgtccgcttgatgcgccagaccacatcatccagctcctcacgtgaggatcggtacaggccggcggtcaccgtgccgtccgactgataattcgctgcatcgactccgcccagcatggcggtcagcttgccgggacgctcggccggaggcagcggctcgtcttccggcgagggaatcgacagcgaaatacgagacgcgatcacatcagccatcgtcatgtgcgactgatcagcgccggtactgccgccaaccagctgttcttccttggctttcagccacccttccacggcacggcgcatcagatattccggatacgatccacggaaggtctgcaccgattcatccgggttgccgaccagcaccaacttgacgccggcattccccaactcctccaagaagcgcatgccggccagcgtggtgtcttgaacatcatccacaaccagcagccggggcaagcccaacgcctccatacgcataggccggtcggaatcatccgcgtgatcggcggcgaatgcctcatgcaccacacgagctcctgccaccagcaaatacgaggcatccaaacggtattgccccggatatgccgcgctttgggctgcaatatattcacggcgcaacgcgaaagccaaacgccattgcaccgacaatcgcgcgtcctccgtcacggcgtccaagagacgtggctcttcgtgaacgcctacaccgagctcgtccaatcgggccagcatatcgcgcaactggctgataaacgcatctgaaataccgcgagtgaacctatccgcgctggtcgagccgcctgccgacgtcggagacagcgaatccgacccttgttgcgagaggcttgattgtgcggaagcggccgagccgggcatctcgccggcaccggcatcgcgtatgagtttcgcccagtcatcctgggcaaagtagacgcgtagcaaatcacaggtgccgcaatcatctcccgctacggcatggcgcagatgcacggccatgacttgacgcagcaaagcatcctgttccgcaccgttcaacaatcgaggcgacggcaatccagttccctcgcgcgaagctgatatggcccggaatgccacggcacccagcgtggtgaccggcctggcctgcacggaaaacccgagctcacgaatcacccgattgcccaatgcgtcggcggccacacggccggatacggccatcaccgcctgcgtgccaccgtagcggcgcagccccgccatcaacaccgataaggcgaattcggttttgccgcttccaggcgtgccgacaatcagcctcgccgctccatcacggtcgatgccgtccagcactgttccaggttcaagtctcgtcatcatggctccagcctaaacccgaccgtcacagagggaaaaattttaccgaacccgacgaagaatcgtacccttgacggtatcctgtagaacgaatgcagggagagcgcattttccaaggagggagggacagatggccaatattccgatgaggccgccgaagctgcccggatatgatttcgtccagatgttgggaagcggtgccaccgccacggtgtacctatataaccagcgtatgcccgcacgcccggtggcggtaaaggtcagcgccaaaacccttgacccacgggccgctgccctgttcaaccgcgaggccaacttcatggccaagctgtcatcccacccgtacattctgccggtatatggtgccggcgtcacctccgatggccatggctacattgtcatcgaatatgcgccgggcggcacctacaacagcatcatgaaggcccggtccatgacctgcgagcaggtactcgacctcggcatcaagctgtcaagcgcgctgttcaccgcgcatcgcagcaatatcatccatcacgacatcaagcccagcaacattctcatcacctcgcagggtttgcctgttctgggtgatttcggtatctccaccgatgtgtatgaccgtaccgaaaccggattctcgccgccgtgggcaccgcctgaagtgcttcagcatctgaccaatggttcggaagccgccgacatctattcactggcggccaccctgtacgccatgttcgtcggctgctcgccattccagcacgaatatcatccacgttcgcaatcggaactgatttcgctgatcgtcaatcagccattgcctcgcctcaaccgccccgacgtaccggccgatgtggaagcggtgctgcgccgggccctgaacaaggaccccgaccagcggtactactccgcgttggagttcgcacgcgccatgcagcgtgtgcaattcgcatatttcgggcatgccactcccgttaccgtggaagggatgccggcctaccccaaagacatcgagcgtcggcgccgggccacggaccagcgagatcagaccacccgttcgtcacggcgatgggtcaaaccggtgggtattaccgtcggtatacttgcggcgatcaccgcagcggcactgatattcgccttcgtggtcgttccccgcatggacagcgccaccggatcagataccaaacaggtggcgacgcccggcaccaaggatgatgacaacaaccgcaataatcaggatgacgtgatcaccgataccgcgaacgcccagattccttccccggagaatctgaacggcacctatgcggcggatgggtcatccgtgacgttcacctggacgaatccagacccgcaaagcggtgatacctatacgtgggccatagtgcagggcagcaataccgaccagagcgcgcaaaccgtcacaacgtcagatcccacggtgaccgtcaacgcgcaggaaggctcgcagacctgcattcaggtgtccattgtgcgcaagaaccgccagatgtccgtcagccccgccatcgcctgtgcggccaagccgcaagagtgatccgctcgccactgccgggcataccaccttggcattgcgtatcgcatcaggcatgcgcccggcagtggcgaattcaccaaatggacaacaggaacggcaggtattggaaccgtaaagcgttgtcattacactagcaaccagagaaaccagggttcagggagttcagatggccacatcgtcccagtcatacgatcgtcgccgacgcatcagcgcggctttgcgccgccttatgccctccggagggcatacgtggacggttcccgtaatcacgctcctgctgcttctgggacttgttgccggcgcggtgatcatgagcaccgtcacgcgccgccatgtgcaactggacgatggtaccgtatgggtcacttcgctgaagaaccagaaggccgcacgattcaacgtaaagaacaaggaggccgacgccggcgtctcctcctccgccccacgattcgacatcgcgcagcataatggcgacaccatcctgaccgaaacgaccaaagcctccaccatcaaggcatccacggtcagcaccggtgtcaagaccgacatcaaagccaacaccaccactgtggtcggcggggataccgtagccctgatcaacgagaagaccggcaatgtgtggaccggcttgtcggaaaaccttgattccgtggcccccaccacttccgatccgaaaatgaagctgggcgagggcgggcgcatcgcagtaacccacgatggcaaggtctacggataccgtccatccgacggtatggtgctgcgtcttgacaatcccagcagcgccaaggccaaaaccctcgaatcgctgaccgacggcaagcagcagaccgttgaaagctttaccgtcatcgggagcacgccggtaatcgcaaccggcaaaaccgtcatattcaagggcggccgcgtcgatgtcgacacgaccggcaccctcacccttcaggagcctcccaccgatgacgtacagtccgattgggtggccgcggcatcaccgagaggccttacgcttatcccgttgaagtccaatgccaaggcgaatttcatagccaacgggggcaaggcgaatccggcacgaccggtatcgtccaagggctgcgtgtactcggcttggagccagaaggccagcaactacattcgcgcctgctcccccgcggataccagcgtcaagccgcaaaccctcgaatccgtcaatactacttccgaattggtgttccgcaccaaccatcgccttgtggtgctcaacgacacggttaacggcaatgtgtggaaccctgaggattccaccaaagtcatcaaaatacagtggaacaaaatacaggccgagcagaccgagaaagaacagcagaacaacgactcggccaacaaccaccacgacttctccaagacctgttccgcacaatccggccaaatcaaagccgaggatgatgaaatcggcgcacgagccggttcggaacagattctcgacgtgctgcgcaatgacgagcagaccgattgttccgtgctgaaaatcaccaaggttggcgcaccaaacaacaaagacgtcaccatttcgccgatttacgacggccggtatctgcaactcgatgcctccgccacatccgcaggcaccgttacctttacttacgatatttccgatggccgcggccagacctcttccgccacggtgaccgtaaccctgaatgatggaggcaaccacgctcccgtacagttcgacactcctcccgagatcgatgtggagcagggagccagttataccgccaatgcgctgagcagcttcaacgatccggatggagacccgctcactctggtctccgctgtggcccagaacaccgaccaggtgcaggtgtccacccgagccgacggccagcttacgttcaacaccggtgcgctggcgtcgggacgcgtgggcgtcgaggtcaccgtctccgacggcacggcgaccggcaccggcatggtgtatttctcggtcaagcccgcgaacaccttggccgcggtcatcgacccggtagcgaaaaccaccgttcccaacacggataccgtcgtcaagctgtcctcttacgtgcatggcacttccttgcagccggcacagctgactcaggtggatacgcccaacggcgcttcgacgaccaccaatgcggcggatatgtcgttgacgttcaaggccaccaatcccggcacctattatgtgccctacaccattactcaaggctcgattccggccaccggattggctcgcgtcgaggtacagcccgccaccggcgaggccgccaaaccggttgccgccaacgatgtcgccctgcttggcgcggataataccgccattgtggagccgctcaccaatgacgtcgatccgatgggcggcgtgctgtccgtcaccacggtgagcgcaccggccgactccggcatcaaggttggtctcgtcagccataagcgcgtgtatatcactgcgcgtcaggtgcccacgaaacccgtcgcccttacctacaccgtggccaacgcctccggaaccgccaagggcaccatcgtgttgcagccaccggctctgaccacctcgaattcagtgcccaaggccagcaatatcaatgcccaggtgcgcaccggcggcatcgtgtccgtggatgtgcttgaccatgtggcctactcggatggcaccacggtcaagctcaagaacaacctgcaatacgacaaggagacgttcaagggtctggccttcgtctctggagacacggtccgctaccaagcatccagcgagaccggcaacttccccatcacctatacggttgaagacaatctgggtaatgtggcttccgccaatatcaccattaccgtgcataagagcgacgcagcgagcaaggccgcgccaaccccgcatgacgccgaagcgcaggttgccgccggacagaaggtccgcatccccatcacactgaccggcatagacacggatggcgacgacgatcagctgttgggtctgggcaacaaggcacccacgctgggccgcatatccgaagtcggttccgactacttggtctatgaagcgtatccggattcgtccggcaccgacaccttctcctatgccgtggaggattggaccggtcagcgcgcacaggcgcagatccgcgtgggcgtattccaaggatcgtccgactccggcgtatacgccagggatgacgaaatcacgttgaggcccaatacggccgcaaccgtgccggtcgcgcagaacgacatctccggcgacaacaccaatctgaccgtcgacaagcatgtcgaggtccaaggtctcgacggggtgagcgtgaaagacaacatgatctccttcaccacgcccggcagcgccaccaccgcctatatcgcctacacggtcaaagacaaggccggcttgtccgatacggccaccctcacggtaaacgtggatccgaatgccgccatcgagccgcctaccgcctacgactatcgtgtgccgtccgccgccaccatcgataagaagtccgtggatgtggatgtttcccagtggatcgccaatccttccggcacagccaatgagctcaaggtcggcgtgcatccctccgccagcgctcacgctcacgtcaagggcggtgagcattcgaccaccatcaccgtcgacctgacgtcacaggcgcgagccgtgccttacacggtgaccaatacgaaatacaacatcacctccaccgcgttcatccaggtaccggcctatggtgtctttccgcccacgttgcgtcccaaggcaccggaattgaaggtcaattcgcgtgagaccattgaaatcaacatcaatgactatgttcgcgtcggcgccggcaaggaaccgtatatcgaaagcgctgattccgtcagcgccaccaaggcttccaactccgatttctacgtgaacgacaagaccctgaagttcactgcggcaaaagactacgcaggccccgcctccattacctttaccgctgtggatggcaagcagggatcggataagaccaagatcatcaattccgcagtgatcactctccagatcacggtgataggccgcgatgtgccgccgcccacgttctcgtcctccactattgatgtcgaggcgggcgcggcccccaagaccgttgatctgacggcgctcacccatgcaccgtccggcgtgtatgacgacgagaagcaatacacgtattccggcggaagctcatcgtccgggcgaatcaccgctaacctgtcccgttccggcagcttgcaggtttccgccaccaaggatgccgctcctggcaccaccgcgtccattcccgtgcaaatcgcatacggcgcgggcaccgtgaatgccggtgtgaccgtgcgcgtagtgtcttccacccgtccgctggcacgcgtcggcgacaagacgctgaagatcaaggccggtgccagcgatgccgtgaacgtgcttaccggcgcgtacaatccgttccccgattcctcgctgaccgtcatcagctgcaaggcggatgacgccgccaaactcactatcgccggatgcgatgcctccggaaacgtcaccatcgccgtcgcatccgatccgggtgcttccacgaacaccgtgctcgtcaccgtgcaagacggcagcaagtccaaggatcgtgaagtcaccgcatcgattaccgtgtccgtgatcgacaagcccgagccgccactgctctcccccgtagccggggaaccgcaggacagcgcggtcagcctcacatggacgcccggtgccgccaatggcagcccgatcaccaactacaaggtcagttggaccggcgccgccactggagagaaggattgcggtgccgtcacctcatgccaggtcacgggtctgaagaacggcaaaacctattccttcaccgtcgccgcgcgaaatgacgtcggttggtccaaaccgtccaccaccgtcgaagccacaccggacaaggtgccgtccgctcccaccgatgtcacggtcacaggtggcaataaaaccgccaaagtgacgtggaaagcgccgagcggtgatttcagcgccgtcgacaactattcggtgaccgtcaccggtgcaggtgctccgcagaccaaggaaaccggcaacacggccaccgagctgtcgtttacgttcaacaacaacgacatttccgatggcaccgccattacggcgaccgtcaaagcccataacaaaatcaattggagtgccgagtccgcctcatcacagccaaaggacatctggggagacccggatgcgccgaccattgcgctgtcgaacgacgacaccacaggaacggcgaaagtcactctcggcaacaaccgcaatgccggctgccggcgaatttccttgggaggagacatcaaggacaccatcgattgcagtgacggtggcgctacgttcgatatcaatgagaacgatttgaacacccgggaaatcaccgtaacggccaccgtggtgccgcagcgcgatgcttccgccggcacaggcaagagcaggtttgtcccgcagtacaaggtccagccgcccactgacgtctacaccaccggatccggcagtacatgcaccgtgcattggaccaagcaggggcatgcgcagtcctacaacgtgactgccgatggcatcgattccggtacagctactaaccggaactcactcgacttccgaatgagtccttgggccaaatgcaataccgcatcggtgcaacaggtgttcaacggcgctaccagcgatgccgccaccggaggcccgtacaatggcgctccttacacctatgagaagaaggctgtaatcaacaaaccgcaggagctgcgctggtcagacaacgctcacgtcattaacgtcaccggcggttcggttgaggtctatggcaagcaggccaccgtacaaatcatcatcaatggccaaccgttcacgtggaaccccggccagccattggacgtcaccgacttggccgtggccgccgatggcaactacacgtggagcgtcaaagtcaccggcgggccgggatactccggtctcgacaatacggcggacggcagcagcgtcgcgggcacacgcccctctgattcctcggaggggaccgagtcgctcaaatccggtaccgatgtcaccactttggccaagaacccttggattcttggtttcggtaataccccaatatcgtcaaccaccattcacaagcagtaggagaacatccatgagcgagaacatcgacgacgcgacgcagctgtctgacacgacccgtctgtctgacagcacgcagctatccgacgccacgcacttgtccgatgccacacatctggcatcggaaccgcacactggcaccaccccgaacaccgagacggcacagcaacccgttgcgttgcctaacctgccgcagcggccgtcacaagcgtcgtcagaaaagccgtctcctactactgatgccgcctccattcctgcgggcgatgacagcaccgtgctcaagccacgcaaggacgcgacgccagccatcccgcagcaggtcggcatgccggcaaagaccagcacgcccaaagtcgcgcttccgcacttcggacgtaaatccggcaagcaggccgctactgcgaatgctgcccccgccacccagacctcccgtcaatggacgaccacaaccgccggcaagaccgcagcatccaacgccgaaaccgtggctggtcgcgggccggtagccaatcagcaggccgccgcgcaatcccagccgcaatcccagccgcagcgtcagtcgagcaaagccgcgcaagcagccgcatcggcactgcccgccagcatcaattccggactactgccccagcccacggctcaggtccgggatttccagcagtccttcaatgcgctggtcgagaatgtctccaaggtggttatcggcaagaccattcccatcaagcaatgcgtcaccgcactgatggtcggtggccatattctgcttgaagacaaccccggcaccggtaagacccagttggcccgaggcttggccaactccatttccaccggtttcaagcgtattcagttcacgcctgatctgctgccttcggatgtggtgggtgtgactttctacgatcagaagcgcggagaattcgagttccgcgagggcccgattttcgcctccatcgtgctggccgatgaaatcaaccgtgcatcgccgaagacgcagtccgcacttctggaggttatggaagagcagaaagtcaccgttgacggcgtcacccatgatgtaccgcagccgttcatcgtgatcgcaacccagaaccccatcgagcagctcggtacctataagctgcctgaggcgcagatggaccgcttccttatcaagacgtcgattggctacccgggccatgatgtgtccgtcgatatcctcaagcaggtcgatatcaccgaccgtgcgcagaccatttccccggtgctgagcggtgacgatgtcatgcggctgcgtcaggtggccaccgaaatctatgtggatgatgcgattcgtgaatacatcgtcaggctcgtcgaggcgacccgccacaacgagaagatcacagtcggctcctccatgcgtggcgctttggcgctgacccgatgcgcccgtatctgggccgcggccgatggccgtgcctacgtggtgccggatgacgtcaaggaccttgcagtggccgtgctcgcacaccgtatcacgctgactccggaagccaccttcgatggcgcgactccggaaagcctgatcgcacaggtgctcgaagacgttccctcccccaccatcggttcctgatagggcctggaaaggtatccgaccatggcatctacatccgccgcattacgccgtcgccggcgcgctgaacgcatgttcaagcgcgcggtaagacgcatcagacggttcttcgcatcctacgtctcgcccttgggctgggcggtaacgggcgcaggcatcgcatgtcttattgcgttcctgcctttgggctggtatgagctgctcgtattcggcatcgtggcgatggtgatgatgctcgcggcaatcgcgctttccctcggcaacacacgcttccacgcgtccatcgccgtatccgatcatcgcgtgaccgtgggagacaccatatccgttatcgtcggcatcgacaacaccggcagaacgccgacaaccacggcacgcggatatctgccaatcggcgatgcgcatgaacgattcaacatccccacgctggctcccgggcaatccaagcaaaccgatgtggagttccgtacggtatcgcgcgcaatactgcccatcggaccgttgcgcatccgcaagggagacccgttcggcctggtacgtcacgaaaaggagctggccgaccgcatcaccgtattcatccaccctcgtaccgtgcgtctcgataccctgaatgccggcgtgccccgcgatctggaaggccaaccatccggccagatcgtggatgatgatctcgacttctacggattgcgcgaatacgagccgggcgacgacgtgcgtaacgtccactggctgagctccgcgaaaaccggcacgttgatgattcgccaatatgaagccacgcgccgcaccgacacctcggtgaccatcagcgtgaacccggatgagtacgtcaacggcgaggaattcgagatggcggtgtccatccactcctccatcggcgtcaaatgcctgctgcaggatcgcccgctgttctgtcacgcgggcaacgcgcacggccagccgcgcaacgccatggagttcctcgacaacgccagtgccatagagcctgatcgtgaggacaatccgaatctcgccgagggcacgctgaagcacagtcctgatgcttcgttctattttttcactgttggatcgctgaaagacatcgagcaaatcaagcgcatgaccttggccttgccccgatcggccagctgcgtggtattgcaggccagcgccggcgccaatcgcggcatcagaagattcgccaacttcacattggccaccatcggcgaactcgatgatctcccactgatcatgggggtgctcgcatgaccttcgaccagtccagtatcaccaataccaataccgctgcgtacgccggatcgagcggcacatacaccggcacttcctccggcacgtacaccggaacctccaccaccaccggctcctgggccgactccacacattcggttatctggatgaccagaggcaatgtgcttcgcggcatgggcctcagtcgccagccgtggggcaaacgaatcaccagcctcgtactcatagcggcgatgatgttgctggcgcaagccaatctcatcgacgtgtacggcggcgtggccacttgggcgatcgccgccgtaccggccaccttgctgggcgcgatcatcgctctggcaggcatgttgccggcgttgcgactgtggtggcaaatcgtgtttctggcgtttgcccaattcatcatcggtccggtggtaacgctgagttccaccacgtcccattacgtgattcccaccttgaagaccttgagttcaggttgggaaatgacgtttggctcgttcaagtacattatttccgtcgatccgcctctgggcacgcaagacggcgtgctgctggcggtatggaccatcggcctgtggcttacgttcctcaccggcgtgtttgccattaatgccaacgcatggttgtctctggtgggagtgctgcctcttgcggcggccgtggccgtatgtgctctgctgggtacggacagcggctggcaacgtgccatctgcggcattgcctttgccttgctgctgattatctggctgtcttggcgtcttgaactgctggaatgggggcgctggatatccgcgctgatcatcgtcgtgctcgctgccggccttgctttcggaggcacgttgctggtgccgcaggaccgtttcgtgctgcgtgaccgctacgatccgccgttaagcccctacgattacaccagcccgctcagcggcatgcgatcctatatcaaggaccacaaaaaagacgtgttgctgaccgtccataatctgccggccggaacaccagtcaaacttgcggtgatggatcgattcgacggcacagtatggaacctgtccgattcttccgaagccacggactcctcgaattatcatcgcgtgggcaccacgatcaaggcggatgagcagggcgaatccttcactgcgaccttcaccgtcgatcagggattgaccgacacctggctgccgctggcgggagcggccactggcgtgagcttcgccaacgatgccgacaacggcaatgacacgttctactacaacacggataccgattccgccattattcccgccggcacgcgtaaaagcctcacctataccgaatccggcattatcgcccgcaagcccaccgataagcagatcagcagtgcggccgcggcccgcatcacccaaccggaagcccaggatgttcccgattcggccagcaaactggccacgtccattgccggcggacagtcctcgggcggtgccgcagccacggcgttggccgacacattgaaagactccggatggttctctcatggactcgaaggcgattatccctccgatgccggccatggcaactaccgtatcaacaagctgctggcaggcacggccatggtgggcgactccgagcaatatgcctccgccatggcactgatggctcgtgagctgggactgccctcccgtgtggtcctgggcttcctgccgaaaaacgaggatggcgaaatcaccgatgcccgcacggagaagacctcgggcaatggcaccaaaatcgaattcaccggcaacgatgtcaccgcttgggtggaaatcaaattgcagggcctgggatgggtggcgttctatccgacgcccaaggagaccaaggtgcctgatgaaaaccagaacctgacgccgccgaatccgcagacgctggtccggcaaccaccggtgccgttgaccgatccgctgcgcgatcagacgcaagccaggggccaaagctcattggccggcgccgacgccgatgattcgccgaccaacctgttctgggtgcggttctggcgagtgacccgcaaggtggccctgtacggcagcccattgtggaccctactcatcgtctgcggtctgattctgatgttcaaggccatgctgctggcgcgagcgcggcggcatggcagtccgaaagcccgtgtggcagcaggttggaatgccatacgcatgcttgccgagcaaagcggcatcacagccaagggcactcgtcgagatcaggccggtgccatcgcccgtcaactcggcacagatgaccaggctttgatccagcttggccgggaagccgactacgccacgttctcggggcaagacattgaatcgggccaagccaccacatattggacaggagtcgaccaattacgcaaggcaatgctcgcttctttgccgcgtttcaggaggatacgtacacgactttccctgaaaagcgtggctatactgtcaaatagacacgcagccaagtcgcacacgacgcatgtcaagcgcgcgcgtaagaaggggaagacgtcatgaccacaggctccatccgtatcgcgatgaccagtgacgtgggtcttaggcgcaagaacaaccaagacaccggattcgcccaacagggcgtgttcatggtctgcgacggcatgggtggcggcaaaggcggcgagcaagcaagccagttggctgcccagcatttcgcgcagctggcttccatgccctcgcgcacccgccatgacatcgacgacaccctggcacaggctcagcacgacattctcgatttgggtgaccgtctcggcggcgtggccggtacgacctgctccggcctggttttgccccagccttacgcagatgccatcaatgcccacagcgcagctccgtttgacgacgccgactccccggatttctcggaccagacctatgtggtcaatgtcggcgattcccgaacctaccatctcagcccgctgccggatgccgatgcccccgccacggatatcatccccgtgtgggacgcctcctcgctgacccgcatcacgcgggatcattcccaacgccaggaggctatcgattccggtcagatgctgccggaagaggcggaggcgaccattccacgcaacatcatcacccaatgcctgggcgatccggacggcatagtgcccgacgtatatgttgccgatctgaccggccgtttcatcatctgttcggatggattgcacggtgaagtgtcagacgaacagattgcggccatcgccgcagcgcattccagtccgcaggaagccgtggacgccttggtggcggccgcgctcgatgcgggcggaaccgacaatatcactgtgattgtggccgatatgccactgaccgaacccgaacatcacgcgttcagcgcttttaaactggacgagggcgaggacattggcgccattgaagacgcaacactacaaacactacggaccatacgttcggcataaccgagcgaacataaggaggtaatcccatggttgattatgatgctgcggtcgctgccgtacaggatccgaacgcggacccgattctgttggcaaaaatcgcctacgagaatccggaattcggcgcaaacgtcgccgtaaatccgcgttgctaccccggcttgaagcgttggatcgccgagttcggcgatgatcgcgcccgcgagaccctggcgcaatacgggttcaccgccgaggcattcggcggcccggtccaggatcaggaagccccgtcacaggcggccctgcaggctgccgatcagcagcctgcagacgcttacgccgccgaccagtacgccgcagctcagcccgctgccgaccagtacgcagcccagcagcccgcaactgaccagtatgctgccgctgctcagcccgctgccgaccagtacgcagcccagcagcccgcggctcaggcggcattcgaggagcctgtggccaccaatccttatggcttcaccgccgaacaggccctgaccaccaccgaccagatgcaaatcgcccagattgcccaatacgcgcctgaactacgcgcctgcatcgcccgtaatcccaacacctatccggcactgatcgaatggctgggccagctcggcgacccggcgatcaacgccgctttggcttcccgtcagtgaaaggacggcatcatcatggccaaacttccctaccctccagcacctgaactgggttggtattctgacgatccggtggaaggcaccccggattccgcagttggcacagccgaaccgcagaacgactacgggcagcccagcaccgcggaagcggcaaccaatgccgcttttaccgcagagcccgccgccactgccgccgctgagcccactgccgctccggtagacaccacaccgcacgccgccgaaaacgacatcgaggattgggacagcaccgtgctctcctcctcgttcacttccaaggcaccgaagaagacgtacctgctgcataacgatgtcaccggccagaccattgtgatcgacaagagcacgttgctgggccgcaagccttccatggatgtgccgcagggtgccaaggcggagcgtatcgaagacccgacccgcaccacgtcccgcaaccatgccgccatcagcatcgacaccgatggcgcgctgtggatcgaggactacggctcgttgaacggtacctacatcatcaccaatggccaggagacacaagtcaccaagggcacaccgctcaagctcagcgcgcctgccacggtgcgtatcggagaccagttcttccggttctccgaacagcagtgaccgctggactgtacaggccagcgatacccccccagatatcaataaaccgcaggtaacgtaccaagcaagctgtgagaacaacttgtacccgtacggtacctgcggtttattgttgccgttggcgggcggtcagtgacggttgctcggctatgcctataccgggctgggcggtcactgaccgctgaacgcagtagttacttcttcgagtctgacttgttatcgctggatgagctcgacgaacttgacgagtccgatgagtccgtagagtccgacgaatccgaatcactctcgctttgcgacgaactgttgctcagatccggcgcgggatcgcccggggcctgaccgatggtcacaatcacgtctccgctggattccggactccacgccatccattccataacggaatggtcgcataccatggaatcatcatccaatggcaattgcgtgtacttgcccacggacttgccttgcgcatcaacgatgatctgctcatccgtggtcttcacgtatatggtcttggtcagatagttgatgcccttgaaactgccgtcggtcagcaacagacgaccccactgcggcccatccaacacttccgtgggcttcagatcggacgacagcaggaacacgcgtttgctttcgttgccgttaccatccgtctgcacgtagagggtgccgtcggagaattggtcaatggccttgacgtcctcatccttgctcagtcccagcacgtcttccaacgattgccgtttgccggtcgtgctatcgatgacaaacttgccgctatacgaatcatcggtcacatacatgttcttgccgagataccgcattcggctcaaatcacaacttgagtagtccgtatcgcagtaattcaacgggaaactcatgatttccttgttgtcttcgaccgaatacaggtggtacgaattgtctcgcaccatatatgcgtcgtacaagctcacgccgctcgcggaggcattgacctgtttcgcatactggtacccgccagaatcagtggtaagcacgattttgtcttggaaggtctgcaataccttggcggtatcactgtcatgagttacgcccatcacctgcgtgtggttgatggtcgctgagcgctcgtccttgttagcggtgtatttttcatcgctatgccacgttttcttgatggccaccatgttgcgggactcggcgagcaacgagtattcgtaaccctgctcatagtcgataaggttgtcttcctcggttcgcaggtcgatgcggtcagacagttcgccggtatcgagatcgacctcgtgagcgaacagatgcacgctttccggcgtggtgcccactgccttggttttcaccgcatagaacacgaatacggctggattatcgccgtatgtggcggcgacttgcggctcggagtactccttctcccccgattcgagcatggatacgtggatttccttcgattcatccagcgccggcgtccagacgccgaaggcatactcgccgctgccgtccagggaatcacttgaggatttggacgacgaatccgaatcgaccgaggaatccccatcccagcagtggatgacgttcgagaccatcgcgccgccagtccacttccagtcac

SEQ ID NO: 2124 - DNA, 10538 bp, Unknown
  R51_24m  MAG No. k141_5093
ccttgatatacgaattcggcagttcggccaacgctgcgagtgcggcgcacgattcctcatcaagcccgggcacgttgccgagatgatcgatgatgaccgtcacttcaggaacctgcgagaacgccttggccatgtcgcccagttccgggccacggttgcacagctcgaatggcaatcccttggcggccatcgcgcgtagaccggcgatgaattcgggttcgagcgcacggccccgcggctcggaatccacatgcagcggttccctgatgccatcggcgttgatcgggacacgcatccaagggcttacccgtccttgcaacatgcgcttcaggatcagagggctggcattctcgtacaacaaccggtcctcgagctcgtgatcggccgcgtcgacctccacatatacgccgccgaggaagttcacgccaaacttggcgtactgtgcggctaggtcttcaatcgtgtacttgtgttgcagcgagggcaatcctgccagccatggcagatcctgcgcatccggatcccagatatggaagtgggaatcgattacgttgagtgtcatatcaggcctccttcagaccgatcttggaaccccagaatgcgtaccatgccacgaacaggaagcccgggaccatcaccaggatggcgatctcgatgcctgccgcatcctgaatcacaccgagcagcagcggaatcaacgcggcgcccacaatgctcatcaccaaagccgaggaaccggtcttcgccgcggaacccttgatacctttcagcgtcagggagaatatggtcgggtatccgatggaaatgaacagatacgccaccatgaacgcgatgacggagaccttgcccaggccaaggaataccacgaacatcagcacggctgaaatggtcatgtatacgccaagaatcttcgcgggatcgaatttggccatcaatggggtggtggcgaagcgtccgatggtgaacagcagggaaagcacggaaagcatcatcgccgcggtgccggctgtgatgcccgcgccccagtgcttgagcgcgtaggcggagaagaccgccatgccggccacttgcaggccgatgaaaatgaactcggcaagcacgcccaatgcgaagtgcgggcgcttgagcaggccgaagaaggagctgttctcggaggaggcgccgcccgcggcctcctcttcgtctcccggaggcgtgggcagcttgaacagcgcgaacacggcgagcaccacgaccagcacaacgccgatcacaatgtatatcgtgcgggtatcattcaggaactgcgtcttagcggcgtcgaagccggactcgcctgatgcgacggtggtgccgagaatctggccaagaatcagcgggccaacgatgttgccgacgccgttgaaactctgcgccatgttgatacggaacgattcgcccttttcatcacccagcttggtgatatacggattgcagttggtctccagcgatgccgcgccgagcgcgataacgaacatggcgaacaggaacaggccgtagctggccatgctggtggcagggatcaccatgaacgcgcccagagcgaacaggaacagaccggagatgacgccgcccttataaccgaaacgcttggcgatcaagccggctggaatggccatgacgaagtatgcgccgtaataggccacctgcagtaatgacgcttcggcgctgctgagttctatgtagtttgcgaacggcgagttcaacgcgttcacgaggttcatggtcaaaccccagataaagaacagtgaggtcaccagcacaatggcgatggtcgccttggaaccggttgtgtttttggatgtcatcattgactccttagtgatacgagtttccccgatattgcctagcgagaagtggaccaccctgggccatgttggtaaacggatgacccagggcgcgggtgatacgggcggcatacgcggatacggcgtacggatggagcaatgatcaaagctccggaattgccgcgcgaatattcgggaaagggctgcttgtcagctcagcgcacggtcaaggtggacatagccgccatcgacgtacacccactgaccggtggtgtggctggagcggtcggagagcaggaatgccgcttcattaccgatctcttcggtggtggtcatacgatgttccagcggaatcttgtcggtgatcaccgacaggcgcgcctgctgggccgcttcatcgccaaaggtcttgatccaatcggcatagagcggggtccagcactcggagacgactatggcgttgacacgcacgctatcgtgcaccaatgcggcggcccattcacgggtcaggcccaggatcgcgcccttggcggccgcataggcgctggtcttgccttggccggtaagcgcggtcttggacgagatgttcacgatggatccgcggctttccttgagatacggcacggccgcgtggaccagctcgtaatagtgagtcaggttgccgtgaagcgattcctcgaactcacgccaagtagtggtctcgagatccttgttgtcgttctttccggcgttattcacaatgccatcgatatggccgtacttcttgtatgttgcttcgacgacgccggcgatcttgtcggtgtcgttgaggtcaagcaagtgcacatcataggtggtggtgtactgctcgatatccttcttgaactcgtcgagagcgctgtcgggtcgattaatcaccaccgggatggccccctcctgggccagttgcagcgtgatgcctttgccgatgcctttgaaaccgccggtgatgatgatgactttgccttcgagatgcagatccatgggaactccttcgtccatccttattctgcgtttcatgggtgttccatgtcacgcccggccggggcttcggcaccccagccggagtggttgtgtgttgttgtgttgagttgtgttgttcagttatgaatttccagttgcggtcagccgcgatacaggtacttctcggccgtctccagcgtcatttcggtaccgttgcccggagcggtcggagcgacgtagttgccgtccttgatctcggtcgggtggacgaaatgttcatgctggttatcgacgtattcgatcatgcggccgtccatcgtgccggacacggccacataatcgaacatcgcgaagtggcatacggcctcgcacaggcccacgccgccggcgtgcgggcagacgggcttgttgaacttcttcgcgagcaggtattcgagcacgatctcctgcggaccggccacgcgggtggcgtcgatctgcatgatgccgaaggcgttggcctgcaggtactgcttgtacaggatgcggctctgcatctgctcgccggtggccaccttgatggggttgatggcgcgcgcaatcgtggcgtggccgatcacgtcgtcggggctggtcggctcctccacccaagccagatcgaagtcgtggaacttgttgatccagtcgatggcggtgggaacatcccacacctggttggcgtccacggcaagacgcacgtcggggccgatggcttcgcgggccttggccaggcgacgcagatcgtcgtcgatgttctggccgaccttaagcttgatctgcttgaagcccttgacctgggtctcctccttggcgagggccaccatcttctcatccgagtagccgagccaaccgggagcggttgaatagccggggtaaccgacctccagcagatgcttgatacgctcggccttgcccttctgaccctctttgagaatcgcaacggcttcctcagggcgcagggcgtcggtcatgtagcggaaatcgagcgtggagaccagctcctccggctccatctcgcccagcagcagccacaacggcttgcccgcacgcttggccttgatatcccacaacgcggagagcaccgcgccgatggccatatgctccacgcccttttcagggccaagccaacgcagctgggaatcatgcacgaacaggtcccatgcaatgcgcatgttgtcgagcagttcctcggtgttgcgcccaatcagcacctgcgacatcgattcgatggccttgcaaaccacgtcgttgccacggccgatggtgaacacgaatcccacacccgtgatgccgtcgtcggcgctggtggaaatctccacgtacgcagaggaataatccggatcggggttcattgcatccgagccggaaagcgtcgttgaagtggggaatcggaagtcatacgtcttgactttggtgatggtactcatgtgttcgggctccttcgcctggtgtgaaccattgccttcagcataccccttgatttagaaatttacaaacccgattacgaaaatttttctcccagaacacgcgaagtaaggaaaactacgaaaaaatgcggcgttatgggccataatggtgaacagaggcaatggcagagaggagcggtgatggccaacgacaatcccacgcataagctcaaggtcggtgatctggcgaagatcgccagtgtctccccctcgaccgtctccaaggtgatcaacggccggcccggcatctccgacgagacgcgacgtcagatcgaacaggtgctgcgcgagcatggttactcgcgcccgctggtgagtaccaagctctcccccaccatcgaactcgtcgtcgagtacatcgcgcacaacggcacgatggaactcatcaaatacgcctcatactgggcgcagcaggcgggcctcgccatcacggtcacccagaccaaccatggcgatgccacggaagactgtttccgcggcatcatcgatagaaatccccaaggtgtgattatgcagcagatgggcggtctgaccactcaagcgaagtctttgttgaaatcgcgcagtattcccgtggtcatcatcgacccaatcgataccgtcgattcggatgtgatgagcgtgtccatcgataactggaccgcaggataccaggccggcaaacacctgctgtcgctcggccatcgacgcatcgccgttatccgggggccggcgaacctacagaccagcatcgcgcgctatagcggattcaccgccgctctgcaacaggccggggtggatctgccggagtcctatatcgaacagggcgactacttccccgccgaaacaagctatgaagcagcctgccggctgctggaactcaccgaccgacccaccgcgattttttgctgcaacgacttatctgcagtaagcacgtatcgtgccgcacgagagcataagatcgcgttgccaaagcaattgtccgtcatggggttcgacgacattttccccgccggccaactcatgccctccctgaccagcgtgcatcagccgttcagcgaaatagcccaacgcgccgtgcagatgatcatcgacagccgcaagggcaatcagggtgatatgcacgtcatcctccccaccagtgtcgtcacccgggaaagtaccgtaccgcctcagtcatcggcccgataatcggccagattcaagctggcggccacccgattggacgcgaacgcacccaccgaaaccagcgcatagcacagcgcaagcccgccgaagaagctggccagcgtggccggttcggtcatcgaagcggcgaacagaggggccataagcagcatggaacagccgccggccacgatcaccacgatgttgagcggggtgagtacctcgatgaatcgcgcacggttcaaggtcttgacatcagtgccctccaacaccagcatgcgatattcgccggcctgatcgtacacgctgccggcctgcatcacaccggagctgaccgcggcaagcacagcggcgaacactagcgtcaggatgccgccggtgccgatgtcgcgaatgaacacggtggacgggtcgttggcgtcaccgaccacggcggccgagccaaagaatccgcagatcgaggtgatgccggcgatgaacacggccagtgcaatgccggacacattgcgccacgcgcgcttcggattgtcgagaatacggcgcatggcaatcatcgtggccgcgtccttgggccgtttggccttggctttggcgcgggcggtgaccacccaggagcccacgaggttcaccagcgcgaagcacagcagcatgaaaccgatgatcacgccgtacatcactacttcaccggcctgagccagcaccatcggattcttgaacagaagaacggcaatcaccatgatgacggcgaacaccaccacacgccagccggacggcagcgtagtcgcaacgcgtgaagtgacgccgagtggcgtgatggccacgcgccgaagcgtgaccagcgaagagatcagcgccaacacggtcacgccaacaagcgtaatgatcaaggcaatcggccccacccacagttgctcgaacgtaaacgtctgattctggaaatgcagcaacatgattagggggatcaacacgcagtaccccgcgatgccaatcagcgcccccaccaaggcctgcccagccgcatcaagcgccgtaaggcgaataacttgccccgtggtcgcgcctgccaagcgcagggatgcgagccgagcgtcacgacgggacgcagccaatcgcgcggcggaaccggcaagcgccacgaacggcacaatcagcagcaggcaggcaaagaacgccagcacgacgtatgccgtggcgtattgatccaggctgtggggattggcgatacgctgcttccagatttccgctgttccgggtttgcaagcgtcgagattgattgcgcatccaatggtgtggtcggcggaggcgcgccacatgaacccatgcacgccgcccaaaacggtgagaaagatagtggtggctgcggcaaaagcaatgatggccaacaccgaagtatgacccgcactgccacgcgagccggggcgatggaacaatcgccacaatgcgaaagcgctcatcgtacgcctcccagctggccgtcctgcatggtcacggtgcgcgagcagaacgaagcaacgttgggatcatgagtaacgacgaccacagcggaaccgttgtcccgcgcggcggccatgagaatgcccatgacctcgcggccggtggcttggtcaagtgcgccggtcggctcgtcggcgaagaccacggcaggtttgacggcaagggcgcgggcgatggcgatgcgctgcatctggccgccgctcatctcccccggtcggtgcatggcgagtgcgcgcaaacccatacgttccagccacagaatcgccgtgtccgtggcggtgcggtagggcacgccgtcgagcatcattggcagggcgatgttttcgacggccggaagttcgggcagcagttggccggattggaagacgaatccgaagacattacgacgcagtttggtgcggtcggcgtcgctcatatggctcaggtcagtgccacggaagacgaccgtgccggcagtcggcttgataatgccggccaacgcgtgaagcaaagtggatttgccggagccggacgggcccatcacggctactgtctcaccctcccggagcgtgaagttcacgtggttcagggcgagcgtgtgcatggtcggcatggcgaagccgggctgggctggctggccggcctgaatggcacccggtccggccgcagcgggattcgccgacgcataaccggctcccgtgccggctggcatcacgccggtgacgccgtgccctgcctgtgcgcgggccatgctggcggtgtagtccatgaccaggtcgtgcgcctcgatgaccggggcccactgctgggtgtgcgatgccggctgctggaactgttggggttgctgagactgctgaggctgagccgccggtcccgacgccggctgaggctgctgcaattgcgatgctgctgtgttcatactcccgagcgtacggagcgaacgcccagccgaccatcgggctgcggtatgaacctttctggatcaccggcccgctcctcatccgcaaggattagagatacgcagtcgacgcgacaatccatatatcagatgttcattgctcgagaagacgaggaacagtggaagaccggttcggaagctggaaccacaacagaccaagcaaaggagcccacatggccatcgcaatcgacatcccgcacacaccaatcgtgtccgtacaaaagtcgtacaacaggagtacgactacagagaataacaagaacagtcgttttgaaatgagactcacctaagagcaacgttccagaatcgaccaagcggccgagtccaaaggcatgacttcgttgcaatgggcattatcgaatctgctcgccgccgcagatcgggacatccatgaagctcatatcattcggctcaacagtaaagcgtggaatgatttcaccgcagcattaaacgaacctatgggcctacgcctgaatgaattgttggagcgtgatcccatatggacgtgaccaacttcactgagcctcggcacctgactgcgagcgaggatatttctggtttcgactgcggcctgccattggtcaatgattggctggtttccacacactaagtgcatacagcattgagcattcggaagcccagttggctgaggcgaaatagttcgaaccccattcccgtaattttgctaggcatgatgggcgtggatatcagatttcaaaccatgcacgtcgacagtcagttactccgagatgcggtacttcattctctgaacgatatgattttcggcatatccctgaatcatctagaatgtttactccgctcaatgtccacaatcaccaatgattaatggctggagaccgctatttgacgccggccattgtctgaatcgcattcagacacaacactcctcattgcgcgcagaccagcgagttccgccgagtcggcgatgtgtctcttcggcggttgatttaggattttccgcatgcgacagctgaccacaccgctaaaaatgccattttcgcactgacttggggcggaggtcgtggcgaaacgcacgagggaacgtgtgtcatccgatatggtcatgcccgccaggcattgaagcgtcctgtctatgcgcggttgatgtcccggtggcggggtcaatcgatcgacatacgaaccgggacagattcggctgtcccggttcgggatttcggcctcttttggcgaaccgggacaggcccttccatgaacacccgatatatgcaaatccaaaaccccggaattccgccattccccgacggcgaccatcgcacgatagggcgtcaggtgaatgagattctgtcccggttgtccaaaaagaggcaaaatgacgaaccgggacagcgaaatctgtcccggttgtcccaaaagagacgaaatgacgaaccgggacagcagaatccgtcccggtccacacgcggtccacacggcattacccaagtgaactcatcggcaaaacattggcccagccaacaccactaccgatgtccagcacaggccagctcgtccaggcgggcggcgaagcggggccagtcggtcttcatagcggtgaggagcttgcggttgggcacgtcgtcaatcgggacccagcagatttccatgctttcgtcgtcgtttgccttgggctcgacggtgtggccgggcttttcaaaggcaaacacggtggtgtaggaccacgggccatggtcctcgcggtaggagccgaccacctcgatgtcttcgggggtgatgttggcttcctcgtagctttcgcgcagcgcgccttcgatggacgattcgccgtccgcagtggcaccgccggggataccccacgtgccaccttcggcgctccacgcggcacggtgctgcatgaccacgtgagtcaccttgccgctcgccgggtcgcggcgagccagcagaatgccggacgcaccgttggtgccccaatgcttgcggccgcaggcgcagtccacccagccatcgccgggctgatgcacgttttcgaccggcggcagaatgccagcgtgctggttgcccgaggccttgctttccggctccagttcgccacggccgacattccacaggtcggtccacgtgatgcccagttcgccggccagatgccgggccaacggcaggctgaggccgatgatgccgtgcggatcgccctcaatgctgtcgatgaacgcgccgccgaagccttccagcgtgaacgatccggcgacttccagcggctcgccggtggcaatgtaccgttcgatgtcgtcatcggtgaattcgccgaaatggactttggcatggcttgcgccgcgcacggtacgtccggtcgcgaaatcgatcaggcagtggccggtccacagttcgccggtcgcgccgctcatgcgcttcagtcgttcgcgggccacggcttcgctgtgcggcttgccgtagcattcgccgtccaggaggaacatcgaatcacagccgagaatcagcgggccgaccatcgcctcggtcagtcccggctgtccggcaatagcggtggcgatgggttcggtgatggtcggcatgtcgatgccggagaagtcgcgcgtggtggcgacttccgccttggaatagtcgatgggccggccagcggcggctttgcgcaggtcttcgacgacggcttcgcgttccgaatccttgatttccttggccttgagcgggtaggca

SEQ ID NO: 2125 - DNA, 35803 bp, Unknown
  R51_24m  MAG No. k141_5105
caggttggccagcaggtcctcaggccaggtggccaagggcttgtgccagggcagcgtgaacatctttgggttcgagctggcggcggtgattttcagtgcttgcggttccgctgaatcggcgtgttcgtcttcggctttgacagacgtggccttcagcgcacgcggatccatctggggcaattcgttcaactccatgtgttcgattttacgtggtgcttgggaagtgcgctccttggccacgacttcggcgcgttatgtttacgggaaaacaccgtttggtctctccctcagaccgtctagaaggcaaaagaaaagccccgcagctatgcagggcttttccaacgaggtcataagagaggaagagaataacctcgtttaatggttgacgaagcgattagacctcgccaagtatctattagttcagacgcagctcagtcgacggagcgaacaggtgcatcttggccgggtcgatcttgatcttgacggtcgcgccgaccttcggcagcgcacgcggattcacacgaatcgtggtgagcttgttctggtcggacatgacctgggaagcctcagcggcggagccatcggtgacgatgttgccgtagatgtagccatcggagcccagatcctcgacgttcacaaccttcagggagaaggcgttcgggtcgtcagccggggccaggccagcgtcctcaggacggaagccgaccacgatctggccgttgtcttcggcggtgagcttgttgacggcctcagccggcaggtccacggtgtcctcaccgatcttcgccttgccgttgaccaccgggtgggtgttcaggttcatcgacggggagccgatgaagccggcgacgaagacgttggccggacgatcatacagctcggtcggagcaccgacctgctgcaggataccgagcttgatgacggcgatgcgatcgcccatcgtcagggcctcggtctgatcgtgggtcacgtacagggtggtgacacccagctggcgctgcagggcagcgatctgggtacgggtctggacacggagcttggcgtcgaggttggacagcggctcatccatgaggaagaccttcggctcacggacgattgcacgacccatggccacacgctgacgctgaccaccggacagagccttcggcttgcggtcgaggtactcggtcaggtcgaggatctcagcggccttctcgacgcgcttgcggatctcttccttcggagtgccggcgatcttcagagcgaagcccatattgtcggccacggtcatgtgcgggtacagggcgtagttctggaacaccattgcgatgtcgcggtccttcggctgcatcgtggtgacatccttgccaccaatgaggatgcggcccttgttgacctcctccaggccggcgagcatacgaagggtcgtagacttaccacagccagaagggccaacgaggacgaggaactcgccatccttgatatcaagattcagatcatccacggagggcttatcgttgcccgggtagatacgagtgacgtggtcgaaaacgacttctgccataattactaatcctttcagaggcaggtacgtgcctcacgatccgttgtaaagggatttgttctttactgcgcttccgccctcgccaccgacgtacaactttgctttcggaaactgcaagcttcagcgtttacttttttccggttcagtgaaggttctcttcgttgagccgagaactactatacacggaccgtggaccaaggcaagtggcgtgtctgaaaatgtagttaactttatgggcgtttctgggggtgttgtgtggttcggcccatgacacgcctgtttctcgaacgtgcgaaccggcacgcccggcgtagagcaggcctgctcttcccgaactgacggattccatcagtcgccgactaatgcaacacagactcgaaggtgacgccgttgcgggcggctttgcgctcggccttgcgctcctcggcgttttcgatgcgctggatgcgcagctggcgccagtcctcgcgcatgtcgcggaaacggtcggccagcgttacgtcatcgttctcggcatcgccatcagtaccgctgccatcggccttaccgaacgtgccatcggccaccttggtgatgcccagcttgagcagtccgagcaactcacgcaacgtttccggtacgggctcatcgccctcatcggcggactgggtcaggccctcgatgcgacgacgaagcgcgtcggcgtcctcgggatcgatcttgagcccggcgatcagcgactggcgcatggtctcgtaatcgaggttggcaaagaaattcagctgttgcagcgtcatgaagcccttgagctcggggaatcggtggacgatgtattcctcgcggtcgtcggcggcgcgggtccagtcgcgggtgagctgcggatcccagttggcggtaatcgatccctcgcgcatgcggtagtggtacagcgccttgggcagacggaccacgcgcgtggcctcgccgatcacgttgcagatacgggagagatcctcgattttgcgccccaccgggaaggagaatccggtgccctgataggtggaggcgggtgccaggaaggcccagaaatagccgtcgatctcagccttgacctgctttttgatggcctcgaccggggtcaggatctgcacctcggtgaagtcgttgtggcgatagttggacagcagcggcttgttgttctcggagatggtgtcgaactggaacatcacgaggtcggcgtcatactcgcgcatggcgttcaggcagtcctccaccaacgtgggggccacggtgtcgtcggaatcggcgaagtatatgtacgcaccggtggccccggcgatgccggtgttgcgggcgtcggacaggccgccgttgggcttgtgaatcacgcgtatgcgcgggtcgcgggcggcccaggcgtcgcacatggccgggcaattgtcgggcgagccatcatccaccagcagaatctcgaggttgcgataggtctgcacaaccacagacttcacgcattcatcaaggaatttctcgaccttatataccgggatgatgatgctgaccaacggctcctgttccatgcctccagcgtagcgccgtcgtgcgaacgcggcggcgctgcgggttcgcggaccgcgaaacccttagaagtcccagtcgtcgtcatcggtttcttcggctttgcccatcacgtaggaggagccggagccggagaagaagtcgtggttttcgtcggcgttcgggctcagggcggccaggatcgcggggttcacatcgcaaatctcagccgggaacaaagccgggtagccgaggttcatcagcgccttgttaccgttgtaccgcaggaacttctcgacgtcatcggtcaggcccacgcggtcgtacagcgactgggtgtactccacttcgttgtcgtacagctcgttgagcaggtcgtacgtgtagtcctgcagatccaggcgctcggcatcgctcagctgggcgatgcccttctggtacttgtagccgatgtagtagccatgcacagcctcgtcacggatgatgagacgaatcacgtcggcggtgttcgtcagcttggcgtgcgcggagaagtacatcggcagatagaagccggagtagaagaggaaggattcgagcagggtggaggccaccttgcgcttgtacgggttgtcgccctcgtagtagtcgagcacgatttccgccttcttctgcagaaactcgttgttctcgctccagtcgaatgcggcatcgatctgttcggtggagcacagggtggagaagatggacgagtagcttttggcgtgcacggattccatgaaggcgatgttggtgtacacggcctcctcgtgcggggtgagcgcgtccggaatcaggctcacggcaccgaccgtgccctggatggtgtcaagcagggtcaggccggtgaagacgcgcatggtgagcgtgtgctcgtcctcggtcatcttctgccagctggggatgtcgttggagacgggaactttttcgggcagccagaagttgccggtcaagcggtcccagacctcaaggtctttctcgtcttcgaggcggttccagttgattgcggagacgcggtcgatgagtttcagcggtttgcgcggaatggagataggtgccatgagtgttccttattactcgttgtcgttgtcgtcgttggacttgttttcgaactcctccggcgcggtcagccggagcagtgctctatagatggttcgtgacattgttggttccttagatggtggagcccccctcagtccgcttcgcggccagctcccctctctgaggggagctgtcggcgttagccgagtgaggggagtaacaacggctctctggttgttcaatgcgtgcggagaccgccgtctgaggccgaaggcgtacgaaggtacgtcgagtgccgaagaaaggcggtatacgctccctcgaacgatcagagcatgcaggagacgcagccttggacttcagtgccttccagggcttgctggcggatgcggatgtagtagagggttttgatgcccttgcgccaggcgtagatctgggccttattgaggtcgcgggtggtggcggtgtccgggaagaacagcgtcagcgacagtccctgatccacgtgctgggtggcctcggcgtacgtgtcgacgatggccttccagccgatctcgtaggcgtccttgtagtacccgaggttgtcgttggtcatgtaggcggccgggtagtacacgcgcccgatcttgccttccttgcgaatctcgatcttggaggcgatcgggtgaatcgagctcgtggaatggttgatgtacgagatcgagccggtgggcggcacggcctgcaggttctggttgtagatgccgtccttcagaatcgcgtcgcgcagggcctcccagtcggccgcagtcgggatcgcgatgccgtactgttcgaacagcgcacggacccgttcggtgcgcggagtgagcgaacgacgaccatcggtgtacttgtcgaagtagttgccctggccggccggcttggcgtagtcgctcgtagcgaagctggcgaacgtgcggccatgctccacggcgagcgcgtgcgaggcacggtaggcgtggtaggccacggtcatgaagtacatgtcggtgaagtcgaggccctcttcagaaccgtactggatgccttcgcgggccaggaagccgtgcaggttcatctggccgagaccgatggcgtggccctcctcattggcgcggcgaatcgaaggcaccgcgttgatgctggtgtgctcggccaccgaggtgagtgcgcggatcgccgtctccaccgtgtggcccaagccgccatccatcgccttggcgatgttgagcgaacccagattgcaggagatgtcgcggccgacatgcgcatacgtgaggtcctcgttgtatgcgctcggctcctgaacctgcaggatttccgagcacaggttggacatggtcacgcgaccttcgatcgggttcgcgcggttgaccgtgtcctcgaacacgatgtacgggtagccggattcgaactgcagttcggcgatggtggtgaagaacttacgggcgtcgatgtaggtcttcttgatgcggtcgtcggccaccatctcgtcataatgctcggtaacggagatgtcggcgaacggcttgccgtacacgcgctccacgtcgtacgggctgaacagggccatctgggccttctgtttggccagttcgaacgtgatgtccggaatcaccacgccaagagccagcgacttgatgcggatcttctcgtccgcgttctctcgcttggtatccaggaagcgcaggatatcagggtggtgggcgttgaggtacaccgcgcccgcgccctgacgtgcgccgagctggttggcataggagaaggagtcctccagcagcttcatgaccggaatcacgccgctggactggttctcgatgtgcttgatcggggcgccgagctcgcgcaggttgctcagcagcagggccacgccaccgccgcgcttggagagctggagggccgcgttgatgccgcgcgaaatcgactccatgttgtcttcgatgcgcaccaggaagcagctgaccggttcgccacgctgggccttgccgaggttcaggaaggtcggggtggcgggctggaagcggccggcaagcatttcgtcggcgtattcgatggcctgctgctcattgccggcggcgagctccagggccacagcggcgcaacgctgcgggaagtcctcaagatagaggcgaccatcgaacgtcttgagcgcgtaggacgtgtagaacttgaacgcaccaaggaaagtgccgaactcaaagccggcggattccacgtgctcgtagatgcggtcgaggaattcagcggagtactggttgaagaccgcagggttgtagtactggttgctgatcaggtattcgagacgctcggcggtggaggcgaaccgcttgctgttggtggccacgtgccctgtcacgtattcgcgttcggcggccttgtctttgtcgaactggatcttgccgtcggcgtcatagaggttgagcatcgcgttgagcgcgtggtaatcgtgcgccgggtcgtactgttccgctgcggtgtcggcagtattgtcgagcggcaggccggtggcggtgaggtcagtcattggaaatccttggaatatggcagaagtgtgtttactcagacagttgctcccctcagtcaacttcgttgacagctcccctcggagaggggagccaatacctcgagggggtcaagatttactgttcggtgaagaagcggacgaggccgtttcgcacggcggcagtgtcttccggggtgcccatgagttcgtaacggtagaggtagggcaccttgcatttggcggcgatgatgtctccggcggcacagtaggcctcaccgaaattggtgttgcctgaggcgatgacgccgcgaatccactcgcggttggctggatcgttgaggaagcgtttgacctgaatcggcactgctttcttgaccacgccgccgccataggtgggcaccatgatgacgtacggttcgcggatgtttagcgccgggtcggcggcccgcaacgggatgcggtagacgttgatgccttcgtcctgcaaacggcatccggccacgaaccgtgcggtgttttcggaggccgacgagaagtagaccaatgcgccgatcgtcttgccttcggccgcgaattcgggctggctcagactcacgcggacaccgtggcggcggcgcggttgtcggcggccacctgctgggcgacttcgcgaatcaggtcggggcggtagccggtccaggagttgtccggcgtgatgaccaccggagcctgctggaaaccggcggcctgcagctgctcaagggtggaggggttctgcgtcagatccacggtttcaaacggcacacccagcttggtgagctggcgcttggtggcatcgcactgcgggcaatgcggcttggtgaacacggtgacggtcatggcgactccccttgatgtggttctgatgaacagtgaagcgaaggccatattacagcggtgtgatttgaaatcaaggcactatatgtagtggcgcgtgtcacataacaaacctagatatagggtttttcgttgatattccgccattcccatgcacccccgaaaatcggcgtacagcgacccgcccaatcacatgtggcattgttcacatttgcgtttgaaccgctcttcgactgatcctcaaccgccctgcaaccgccatcttgagtttcgaggggctgttttgaccctttccggagatctatctccgtttcgaggggctggtactcaagtaagcgcatccccaaaatggcggaatgacggtggggcgaagccgtttatacccgtgttctagcgggccaccagcccctcgaaacgggagtaaacctctacggaaggccaaatcagcccctcgaagcggagaacggatacctcggcaccccgtgtggagccagaaggcccggccggatgtccaaacgagcatccggccaggccttaaaagtagttgttcagttatcagaatcgatgcggcgcgatactactccgcgtctttacggctccaacagatcttcgatgcggcagccaagcgtgcgggccaaagcgagcacggtggagacggcagctttgccaaggtctttgcggcgctgctcgtacatttggatggagcgcagggtaacgccggagcggcgggccagcccggattggctgagtccggcgcgcacgcggatcgtgtgcagccgggagtcgccctcggtgcgattatgggcggcccgctcgtcgtacacgtcgacgaatcggctttcgtcggcttcgtgcagagtcgggtacagtcgcacgatatcgtcgagcgacagcacatcgagaatgtccgagaaccgcactcccctggtccattggcagtatgcgagtacccatccggcccagtattcgggtgttgagccggcgcgcagtgcggctggcggcatatcgagaatgcgcgcccaaccggtttgccgcatgatttcggccaccagctcctcgccggacatgccacacacgtatttgggcgtgcctcgcccgaaaagcgcggccgcctcggaggtggcgaagaagtccatgaataggccgaccggcaacccgcaatcgttcagcgcataatcgaaggcgccggccaagttggccatggcgtccggcaagtatgtctcatcataggcggggatcatcgttggtcactttctcgcggatgatgtcgcgcatgaacaggccgtcgagatcggcttctgcacttttgcggcggtaggcttcgcgagctgtgcggtcgcgctcgttacgcaatccgtggtaggtcgaagcgcgggcgatttcgcagccttggaaccgcagtgccgcgaatgcctgaggactggcgagtacgatctgcttgccgagctcgcccaaccgcatcgcctcagcgagtcggtcgatggaaatcgcgttattgacaaaagcgcgggcgaacgagaaatacgaatcgtcggcacgatatccgacgatgacgtcagcctgactggcatccggcagaaacacttgtttcagatattcgatgccttgcgcggcgacggcggtggtcggctggaaacgacggttttcgaccagcatggccagccagttcaggatggtgtagggcggctgggacaggtccaggaagaggagcccgtccgtggtcaacgtgtaccgattcgcgaaaccgtcatccattcccgcgcacgcccattccttggccagctcgacgctgcgcgtgcaatagaatccgcggccataatcgttgttcggcttgaccagcccgtattcaggatgcttgaggacatgcgaagagccatgccacagttcgatcgatgcggtctccattggccggctccttctctctccttacatattcttgattatatcactgtggtgatagtcataagggaaatacgagatgaaaaataccgctgtatacgttcgtacacaacgtgaaatgtatacgaacgtatacaacactgatgtccggagtcatgctccgcagtggcgcagcggacgcgccactacaatcggaatatgggactgaagacgtggaagaagtggacggactggccgctgatggtgctgtccgtggtgtttctggtggtgtattcgtgggaaattctctcccgcacgcatatcgcgctgtgtgaaaccgtcatcaacgtgatctgggtggtgttcgtcgtcgattatgtggtctcgctgtggttggccgacgatcgctggcggtggttcaagcacaacctgttcacgctgctgaccatcgcgctgccgatgctccggcccttgcgactgttgcgtttgctgaccgtgctgcacgtgctgaaccgcacctccggcatggcggtgcgcgggcgcatcaccgtatacgcggtcggcgcggtgggaatgctcatgtacgtgggcgcgctggccgtgtattccgtggagcgcggggcgtccggatccacgatcaccgacttcggcacggcgttgtggtgggcgttcgtgaccgtgaccaccgtgggatatggcgacttctcgccggtcaccttccaaggcaagatcattgcggtggtgctgatgttcaccggcatcgcgttgatcggtattgtgacggccacgctggcttcgtggatcgtggatcaggtcaatctggagacggatcggcgcgaggacgctcgggagaaggaagtggccaaggaagccgcgcaagaggctattgcaacatcagccaatcccgaaatcgacctattgcgcgaggaagtgcgtgagctgaccgctacggtagccggtctgcgcaccgaacttgagcgacgttgattggcgaagcgggacaaacaacgattctgccaagaaggtccgcgtcagttgttgtcaccgcggattgcggcagaatcattgtcgccacggctgttttcttcagtcggctcaacccaacttttgataatttttatttttttgatatttttgataatttttattttaggttgattcagcgaggaggcggtccacatgaaggcaaaggaaaacccattcaagccaacggcaggaggggaaccgcccctgctcatcggccgaggcaaagttatccgcgatttcgagaaaggtctcgataacggagtcggtgccccagggcgcattatgcttgtcaccggcgctcgtggaaccggaaaaaccgtgatgctcactgtgttcggagaccgggccaaagcgcgcagatgggatgtcatcgaagaaacggcctctgccggactatgcgaacgccttgttgatgccttacgaaccgggcgaggggcccttgaccacctcactatccgaccatcgttgacttttgctggagcgggcatcggcctcggagaagccgaactatccccgaagcgtatgcccgaaacgttgagaagtgccattgccggacggttggatgcgcttgagaagcgccatgctgggttgcttatcaccattgatgagactcaagcggctgagcgatccgacatgattgccatcgccactgccatacagcatcaaatcagggaacgacgcaatatcgccatcgtgttcgccggtctcccacagatgatttctgatttgttcaatgacgaagtcatcacgttcctacgtcgcgcgaaaacgaacatgctcacagatattcctcttgatgaagtgcgcgatgctttcgccacaacattccgcgccttcggcatgtccatcaccgacgctcaattaagcactgcagccaatgtgacagccggatacccctatatgattcaactggttggctaccatatctgggatgccgcagacatgcgggactcggataccatcatcgacgctgatgttacggcaggtatcgaggaagcacgtattgaccttgataacgccgtgtgcatcccggagttgcaaggcttatccaaaaacgaccgtgagtatctcgaagccatggcagcgtcagatggtccctctcccaccgtgaatgttgcacagcgcatgggcaaaacgcctaactatgccgccacctaccgcaaacgcctccttgacgccttcgttatccgcgaaacagaacgaggcgaagtcgattttgccgtgcccttcctgcgcgaatacttgcgtcggaatcagtaatcggcacaatgcacagtatcgatatattccgttccatataatgacttttcgcattcagatacacaatggacggcctgttgagtagcactcagcaggccgtccattctatttagctattcagttatcggagacacacctcaggccttgaccggagcgtcagcgacctgctgggaggccatcacgccgaacaggtagccgtctttggagaagtattcgaaggtacgaccggcgaagtcgcggcattcgaatctgatatcgttgtcgattcgatcagcggctcacgatactgcccttgcatcgctgtgccactgttgaatgtgcccggctggctcacctttgggtcaccgccgacacatccttgatgccgatggttatagagtcgcaaattcacgactggcgcacctgcccacgcacctatcctgtcatttcgagcgcataatttgctaccacatccggtcagggcaatcgaccttaatggcgtaaacggcacttctcaatacgtaaacggcacttattcttggctcccctctcagagaggggagccaagaaatatcaagctcggcctcccaggagagagccagaataatgcaccggcaaggcattaggatggagggcatgagcgatttgaacgcgttgaatcttgagcccggcgaagtggttggtgggtatacgctgatctcccggctcggctcaggagctatggggtcggtgtggcgggtgcgcgacgacggcggcaccacctatgccatgaagattctgcgcgactccctgaccgacgagtcagtggcaggctccggctctgcgtccacggccctgcacgaccccgacctcaagcccgatgtcacgccgcgcgagcgcctgcggcgcgaggccatggccttgaagaaggtcaatcatccgggtgtgtgcggcatcgtggatatggaactcgacgatacgttggcgttcatcgtcactgaactcatcgagggcaagaatcttaaggatgatgtggccgccaatggccggtatgtgggcgacgatctggaacgcttggcccgcaagctcatcgaagccaccaaagccgtacatgcggccggcatcgtccatcgcgacatcaaacccaccaatgtgatggtgtcggccgccggaccggtattggtcgatttcggtatcgcgatgggcgagggcgaaagtcacgtgacccgcaccggcctagtgatgggtacacccggattcatcgcacccgagattattgacggtgccgaatccgacgacgccaccgattggtggtcggtggcgtccgtgctcgcttttgccgcaaccggcgcgcctgtgttcggcaccaagccgatgatggcggtacttgagcgcgaggcctcgggcaacgcgaatctttccggactaccggccggcacattggctgccttccattctgcactggacccggatcgcagggatcgttgcacgccggatcaattgctgaatgccatcgccttggatgcgttgaatcccaacgcttggcagggcgagcaggcgggaccgttcgccgcgggagccgtggctggacaaccggctgcgatcgttgccgaagccgcggaggcgatgcccccttttggcgcggccggcggcgttgaccgcaataatccccgaaccatctggcgcgcggccgaggaagccgctgaggctcccaccatggccgtgttctccggcaataagggcgataacggcgatggcgaaaccgccgtattctcgccggctggcgccgctaccgccacgctgcccttagccgatatgccgccacgtccgccggccggtgcggagcaggccacgcaactgttgcccgacgctgctgccgatttcaccgacgacgccggcacacaggtactcaccggcgcgaccacaccgatgccggaccaaaccacaccaatggccggcgccaccacaccaatgaccaacaccgattcgactccggccccgaccacgccgctggccgagcgcaccaccgtactccccacgccgcagccgtcatcattccccccgtccggcaccgcccagagcagctgggatcccgcaagcaaccagcccacagcggtggaccccgccattcgcccggcattgcagcgcatcatcgaccaaaccgcccaagcggcccccaccgaaaccatggtccaaaatcctcccatgcccaatccggtggacgtgaagcgaggggaatatctgcagcgcggcaccctgccattgatcctgctggcggcgccgctggcggcactggcggcaaatgctccgctcgtggccatcatcgcggccactgcgttgttgtggctactgctcaccctggcctataacaccgaaccccagcttgagcgcgagggcaaacgcggcggcgagcgcaaaaactccgattcgtggattcgcgtggcgacttttccctggcatctggtcaaagccctgctgctggccattccccgcatactgctgctagtcatcatctatatggcgggaaccgccgtggccaccgcggctctggcactgcccgttcacaccatctcctggtatttcaccgcggattggggtattccggtgccgttgctcaatgatgtgccgttctccgcttccgggctggcgctgggcggtttcatggccatcggctggctggtcactgtgttcgccccacagtcgatgatgattcggctggggggcggcgtactgcgcgggctcaaacacagtcgcccggcgggcgcgccatccaccgaagtgggtggggctccacctgctccagtggcgccggcgcccaagggcggcgggcgcggcaccgtgctgttcaccatatgggccatcatcaccgtggccttgtgcgcgatgccgattctgggcatgccgatcaactggatgccgttcgcctagagcggggcggaatctcacacatcagccatccgcacacatggccgttgtgtatccgatacgttcgttccgtcacacttttacagggaattcacctcagatcagctctgggcgcagtcctcctcaggcccggtcattatgatggggcccaaacattgaagcgattgcaaggggatagctatgtcagatccgaagcgtcaggccaagcgtgccacacgcgctgagcgccgagcggccgaggaggccgcccagcaggcatgggccgagcaggcggctaaggaacgtaagcagcagaccatcatcggctgcattgtggtggccattattgtggtgctggtggccatcgctggattcgccgtatacaaggctatgcggccgtccaacaccagcagcagtagccagcaaagcaacatgaccgtggacgaggcctatagcaagctcaagaaagtcagtacccagccggccaacgccgatgacaaggccggcttcgtgatctcgagcaaggggtacggtcagaaggccgaaggggcgcccaccgtttccatctacatggagccgctgtgccccggctgcgcctcggtgaaccgccagcttgacccgacgctcgtcaagctgatgaacgccggccagctcaacatcgatttgcacttcctcaatttccaggacaacaagagctccgacaactactccaaccgcgcgttcaacggtgccatctacattgccgagcatgatgacaatcccgatcacctcatgagctacctctccaacatctacgctgaggatttccagccgggcgaattgtccaattacgagccggtaagcaacgccaagctggagaagcaggccgtcaatgccggcgtgagcgaagatgtggccaccgcggcattcagtggtaagaacgaatacgtcaagtggctcaccgcctccaacaactacacgatcctacgccccgaactgttcaacagctccggcgcgttctcctcccccacgctcaccatcaatggcgaatactgggatctgaagcagctcacgctggcggacaccagcatggtggacggattcctcaagtccatcggcttggactccgatcaggtgggcgtggaaggccagatgccatcgatcggcgccaacaagaagccgatttcgctggccgattaattaccggcgcggctcggcctgaattgaccactcgagaactaccggtatactagagatttgttcaaaacgatttacgcgttaagaacaatcgcctctttagctcagatggccagagcggccgccttgtaagcggcaggtcgtcggttcgatcccgacaagaggctcgacgcgtagaaaagtggcgtattatatgatacgtagatttttctacgcatataattcttaccttgggtaagtactccaggagccttcccccaactatgggcttcctggaatgagggcggagcgtcccccaaccagctccgcgccttcaggggggcgggaacatccccttctctcccgccccctttttcttttccttttttgagctcagaacaatctgacgagcaggaatggtgacggtggccggtgaaaccgcagtatgggccggaacaaccgttacgatgggtggcgtaatcgttcatccagcaggaagagtatggcaatggcacggcgttggaccccgcagcggtttgttacactgcgtcgcatccgcgtaatcgcctgtatcgcggcgaccagtatcgcgctggctggatcattcgcgttcaccgcgcgtaaatccgtagccctgaacatcaacgggcaaaccacccaagtcaccacatatgcgatgacggccacccgtcttctggaggaacaaggggtggatatcaagacccacgatatcgtcactacctcgtccggcgaccaactcgccaatcatgccgtggtcaccgtacagtccgcctaccagaccactatcaacatcgacggcacgtccgttcccttctggaccgtggccaccagtgccgaccagttgctgggatttttcgaggaaaaccagaacaacgccacaaaaatcaccgtcgacatcgacaatgtgtacaaccagctcaccggcggactggtcatcaatcaggatggcccggtcaccgtcattgcggacggcaagacttccgtggcccccaacggcaaactgcccgcggcctccattcttgactccaaaggcatcgtgctgaacaaagaggaccgtgtgagcgtcgaaaaggacggcgataccactatcctgcgcgtacggcgcgtgacgcatggcgaggaaacacgcacagccatagtgccatactccacacaaaccatcatcgactccaatctgcctgaaggccagtcggagatccgccagcaaggcgtcaatggcgagaaaacccaggtgtataacgtcatgtatgtcgatggcgtggccgaatcggagacgctgaaatccgaaaccgtcaccacgatggccatcgaccagatcatcgccgtaggcgccgccaagtctgataccgataaaggttccgacaaaaaatccgactccgccgataacggcaaggccgattccggttccaacaatcagcacgagtcgtccggtaacaatgccaacaacacaggcgacaagaacaacagcagctctggcaacaacacgaacaccgataccaacaacaatgccggcaacaccggcggcaacaactccggtaacaccggtaacaccggtaacaccggtaacactggtaattccggtaacaccggcggcggtacgaacaacaattccggctcttccggctccgattcaggaacaaccaccacgccctccggccgactctggcacgccaccgtagcccaggctcaggcctatgccgccggtgccgccgcgcagcgcgggtggacaggcaacgactgggattgcctggtcaaactatggaaccgcgagtccagatggctgtggtatgccgaaaacgcgagctccggtgcctacggcattcctcagtcgcgaccagcagacaaaatggctgcgttcggcgccaattaccgtgacgatgccgccgtacagatcgattggggtctgtggtacatcgcacaaacctacggcagcccgtccaaggcatggcaacattccgaacaaatcggttggtactgatcggttacgaagcccacaaggaacacacgcttatgaacgacaccattcccgccaccggtcacctgttaggtgccgccgatatccgtcgtatcgcggccgatgccggcatcagccccaccaagaaattcgggcagaacttcgtcatcgaccccggcacggtccgtcgtatcgtacgagaggcgggagtgaccgctgccgatcatgtcatggaagtcggccccggcctgggatcgttgacattggcgattctggaaaccggcgccaccatgaccgcagttgaaatcgatccgccgttggccgaacgactgccgggcacagtcgccgaattcatgcccgaagccacgtcacgactcaccgtcgtcaatcgggatgccttaaccgtcaccccggagaacgtgcctgatttcagcgatgacgcatcgtttacgctggtcgccaatctgccgtacaacgtggccacgccgattctgctcacgctgttggagcgtttcgacaacctcggctcgttcttggtgatggtgcaaaaagaggtggccgacagactcgccgccaagcccggttccaagatctacggcacgccgagcgtgaagctcgcctggtatggcaccgccgaacgggtgggcaccatcggccgcaatgtgttctggccggctcccaatgtggattccgcgctcgtcagattcacccggtatcaggccgatgacccggccgccccgggagcctcgaacagcacggccgacggcggcgcacaacgggaactcgtatttcgtctgatcgatgcggcgttcggtcagcgtcgcaagaccctgcacgcggcattgaagaccattgcgccctccgaggcattctccatcgccggcatcgatccgacccgtcgaggagagacgctcaccatcgccgaattcaccgctctggccaaggccatcgaatcgtgtggagatggagatgaggcacaatgagtccggtaatctcacatccacgcccagccgctgcccgacatcagttcgatgagctctcccccatcaccattacggtggattgcccggcgaaaaccaatctcaccttggaagtgggacctgctcacgacgaatggggcggacgccacgaactggacaccacctactgtgcaatcggcgtatacgacaccgtcaccgcaaccgccaagcaacccggagcgggattctctctggagctcgaaggcgcttatttgggcgacttggcctcctcacgcagcgacatgcgccgcaaccatgcggtactggccctcttcgccatggcccaggcggccgagcgcgagccggatgtggcgttgaccatcaccaagcacattcccgtgggtgccggactaggcggcggttcagccgacgccgcggcgaccatgctggcggtcaatcgtctctgggagctgaactggcctatagagcgtctgcgcaccattgccgccacgttgggcgcggatatgccgttctgcctgaccggtggccttgcatacggcaccggtttcggcgaacgcatcacggatatcgcccccggcagccgcgatgagctggcgctgatagaacagggattcagcggcgaagtattggtcggcgcgtaccagtcgcaactcagcactcctgaggtctaccacacctttgacctcgtgggagccgcagaaggcgaccgcaatcatctgcaggctgcggcaatcagcctgcatccccgcagcgggcaggccatcgacgccgccacgcaggcgggtgccagccatgcattcgtctccggatccggcccctcagtggtcgctttcgccgccgacgaggcagcggcacaacgcattatcgatgtgtggcgcgatacggctgtggtcgatcgcattattcgagccaaatctcccgcacaccccaatatcggcgtcagacagtgacgctaaggtagcaaccagccacccgacccatgaaagaagtccaccgatgacgtatcaggttgatgaacgtgaagcccgcaaggcgtacgtgcgccaccgccagaccatcgtcttttccatcagcggcgcggtattggcagtagtgctggtcatagccctactgttcaatttccacgttttcggcctcggcgaagtggagactccggcccgccagccgaattacggcaacgcggcaccgtgcgcggtcaaggacagcagcggcaaagcgcaatacgtgtccaacgcttcggtcggcatccgcgtgatgaacggcacctctcacggccaattcgccaaggccgtgggtgaggctttggccaatcgtggattcagcgtgcagaaaatcgataactattccagcaccggcgttgaacgcaccaccatctacttcggcaagaacgccattaatcaggcgtatacgctgatcggcaatttcaccgacgccaccatgatcatgacggctcgcgaggatcaactcatcgatgtggtcatcggcgccacgttcaacgatctgcaggacaccaaatcctccccacaatccggtaagaccatcaccaatatcgagggttgcaaggccgccgatagcatgaccaagctgcccgccgacaccaaacacgacgcatacacggcggagtaaggcgcatacagcttcatcttcgcgaaaaaccgtacgctgacacgtattcagcgtacggtttttggtatcggactagtatcggactactgaatctcggcgtaccagcgcttgagttcttcgacggccacatcgtggtccaccggaccgttatccaagcggtattccagcatgtgcttgtaggcgcggccgatcatcgggccgggctccaggcccagcaactccataatttcgttgccgtccagatccgggcggatcgcgtcgaagtcctctttcttcttgagttcgcggacgcgctcctccatctcatccatggcctgggagaagatcatcgccttgcgcttgttttgtgtggtggcgtccgcgcgcgtgagcctgttcagccgctcgtacaggtgcccggcatccttgacataccggcgtacggccgagtcggtccacggctcgtccacatagccgtggaagcgcaggtgcatattcaccagttccgagacgtcctcgaccagatggtggtcaaaacgcagcgccttcaaacgcttgcgggtcattttggcacccaccgcgtcatggtggtggaagctcactttgccgcccggctcgaaccggcgggtcttcggcttgccgatatcgtgcatcacggcggccaagcgcagcgtcaggtcgggggcgggcaccgggccgtccgggccggtttccagggcgatcgcgcgttcgagcacaatcatcgtgtgctcgaagacgtccttgtggcggtggtgttcgtcgatctgcaattgcagggccggaatctccgggaagacgatgtccgcaagaccggattcgaccaacgcctcaaggccggcgcgcggacggtcggagagcagcagcttggtcagttcgtcgcgcacgcgctcggcggatacgatgtcgatgcggtcgcgcatcgaggtaatcgcctcggccgcgtccggcgcgatacggaagcccagctgggccacgaatcgcacggcgcgcatcatacgcaacggatcgtcgtcaaaggactgtcgcgggtccaccggcgtgcgcaacacgcccttggacagatcactggcaccaccaaacgggtccacgaattgcaggtcgggcacgcgcagggccatcgcgttgacggtgaagtcgcggcgggacaggtcgccctcaagcgtgtcgccataattgacctcgggcttacgcgagtccggatcgtacatgtcggagcgataggtggtgacctccaccttgacctcggtgccgtccgggcggcggcgcatggcacccagcgtgccgaacttgcgccccatgtcccagaagccgtcatgcccccaccggcgcagtatcggctcgaactgctcaggccgtgcggatgagcagaagtccaaatcgtggctctttctatggagcagcaaatccctgaccgggccgccgaccaatgccagctcgtaaccctgttcggcgaacagtcgaccaagttcgatggcttcgggccatacttcgaaattcaatgggcaccttcccgcgtgcgacgtttttctgccctaccagcataccgttaccccacctgcacacggggttgagtaaggtggagaatatgattacgcccgccgaccttgcccgcatactggggcaaacaccagattcggcggatagccatacccaagaccacctgctgtatacgtccgaaactccgcatcattccgccgattcgggcgattctcccgatgccggcggcaccgtgagccactccaccaatcaggccgttcatcaagacgaagtagacgcagtaccgactgcgcaacattccggtgtacccggcacacccgcaacgcccgccacacccgcaccatccgaatccgaaatatcggacgccgccagcgacatgcccacaccgaagccgatgatgcccacaccggccaccgtcttcggcatgcatgccaccgtcaccatcgccactaccagcggcactatcgaggggcaggccgatggtatcgccggcgaggccggtgccgagacgattgccgaggtcgagccgattatcgccacggcacaaacgtccgtaaccatcgtcacgaacgattccgcggcgaccgcccacgcggccgtagatactgccgttgcggtcgccaaggccgccgccgcgcataccgcagcgataccgactccgagcgacgtgctgatgccgcctgcggcacgtaccgcaccggccgcaacgccggtcaccatgccggtctcagcgccgtctgcagcaccagtgaggcccgcaacgtcagcgcatcccacgccggccacggtcttcggccggcatccgtccgcggatgttgcctcgccggaaccggcagtgccagtagaaccggtgacgccatccagcccgactccggccatgatgccgcaacgccgtacgtcggacggtccgaccacattcgcttcactggatgcccaggaactgccggtcgtacgcgaatattcggcaggcggtctgattttcgatgaccagaatcgcgtggccattatcgcccgtcattcccgctccggccatctcgaatggtgcttgccgaaggggcatatcgaaaaaggtgagaccccgcagcagaccgctgtgcgcgaagtgcatgaagagaccggcatcctgggcgaggtgatcgattccatcgccaccatcgactactggttcaccggcaccacgcagcgcgtgcataagctggtccatcacttcgcgctcaaacagaccggcggcgaactgacggtggaaggagacccggatcatgaggcggaagacgccatctgggtacgttttgaagatttggatgacgtgttgagctatcccaacgaacgcaaaatcgcgtggctctacgccaggaagaagaacaggcaggcaaacgagtgaacctacccggagtcttacgacattgcacacgtctggcacacgcactggcggctggcgtcgccgttgtggcgatgctggccgctccattgaccgtctacgcgaacgatacgacggacacgactgattcatccgatacgacggacgcaacgggcaatcagaccgagaatcagcccaagcagagcattgccatcacgcaaagcacccccatcgtcacctccaaatcgggctatcatgtcaccgcggtcatcagcaatacggacagcacggccacgtcaagcggcacactgcacctgaccaccaatacgctgttcacctttgtctcgcgcaccgatattcagaattgggccgagaacaacgcccccatccccacccccaacgagttgggttccgttgacgtgccatcgattcccgccggcggcactgccaccgtcaccatcgaggtgaacgccaatcagcagacccttgcctccatagggagctgggggccgaagccgctgatgctgtcgtatatcgtcggcaatcggatactcgccgatttgccgagttttctgacccgatcttcggatgggctcaacaccgcgacgacaccggccatgaacctgaccgtggccatgccctacaccgccagcggctggcaggtcgataacaaggccatcagcaatcgcattgccgaaaccaccacttcctcgacatcaacatcgtccaagtccaacagcacggacaaggccgacaagtccgataacgccgacgccggcaacgcggccaaagccactgatacgcaagccatatccttatccgagcaggatgccgataccgcgcgatcccttgggcagacattcgccaagcaccgctcgctgcaagtgatcgcggatcctctgtattggcgtcagtccgcagtgcaaccgtccattgccggcatcatgcagcccgccgactttgacatcaccgcctataccgcgctgggtgataccgcggcctacgaaaaggccggcatcaccactgaacagtggaacgccaagcaggcggccgcatggtatgccgccggaaacgactccgaaacaccctccgcgtacgcatggcagggcaacaactgttggacgttggatgcgctgaccgcggcacgcgagcagggctatgacacggtgattgccgatgcctctttcgatgccgaccagactgaagccgtacacacaggcacctacgtggtggatacgcctgccggcgatgtcaccgtgctgaaggagcaatcgaccttgggcacgctggccaagggccaagccaccagcacggacgcgcaggccgagtccagcgatgccggtcggttggcccgactggtcgctcagagcgcgttctaccagatggaacagccctatacatcccgatacctgcttatgacgttctcccgcaccacggaggccagctggatcgatcaggtgatgagcgccttcgagcaggcgtcctggttgaatctgacggatctgaagaccatggccaaggccgatccgtacgatgtcagcgattcggtcaatcccgacaaggccgatgatgccaacaccgccaatacccggtcggcgttgagacagttggctgacagccggcatgacatcatgcgcatggccacctccatattgaagaacgagattgattccgacgaggtctcgtcgttggccccgcaggccctggcccggcaggacgccaatgacaccgcctcgcatagcaacgatccgacgcaatggattggctctttactggcgctgcatgacgatatggcgctgcggtccatgtctggctccccccagccgacagccacgcgaaaagccatggtcaaagccacgaaaacactggccagcgatcttctgaacggcgtacgcatcaacccatcggaatcaatatccgtgttcagcgaatccgcgaaaatgccaatcaccgtcagcaatgaccttccttatgccgtcagcgtgcaggtcaactcgctgactgactccatgcagatcgtcacctcgcgaaccactgacatcgatattcccgcgcatagcgacgctcaggtgaccttcaccatccgcgtttccacttccggctcatcgacggcccatgtgtcgctgagcgaccgggaaggcaacagcttcggcaacacgcaggataccgcgatcaccagtgtgatgcgcgtcagtgatgccagcggtttcattatcatcggcttcgccgtgctactgtgcattatcggcctgtggcggcagttccatcggaagaaggaccccgacgaatgagttcaaccgtaggtcgtaattccctgatcatggccacgggaaccgctgcttcccgtgtgaccggtcagctccgcacgattcttctcgctgcggccatcggcaccactggattggcggccaacgcctatcaggccggttccatgattccccaatccatgttcacgctggtgtccggcggcatcttcaacgccgtgctggtgccccagatcgtgcgcacgttgaaagaaaaagacgcccaagaacgactgaatcgtctggttacgttggccatcggcatcctgttggccatgaccgtggtgatggcggcggccagccctctgcttgcccgcctgtacgtgggtagcgacgatcaccagatgatagccctgaccacctcgttcaccctgtggtgtatgcctcaggtgttcttctacggcctgtatacggtattgggtcagatcctggccgccaaagaccatttcctcacgtatgcgtggagctcaaccggtgccaacattattagttgcgccggttttactggttttattctgctgttcagcaaggccaatgaacagcccctcgaattctggaccgccgacaaaatcgcgcttaccgcaggcacctggactttgggcgtggccttccaagcgctgatactgttcctgccactggcccgtatcgggttcaagtacaaacccagcttcgggcttggcggctttggactcaggtctatgggtcccgtggcgttaggctctttgggcgtggtggtcaccagcgagatctgcggcattatccttacccgtatcgccacatccgcaccgcagcgcgcccacgaactgacgggtgccagcctgttcagcgtggcaggcaacgcgacctatcagaatgcgtacacactgttcatcctgccctattcgctcatcgccgtatcggtatccacggctatgttccccaagatctcccgttctgtcgcagctgcgaatctggatgaggcacggcacgatctggtgagcgcgctgaacaacgtagggctgctgatcatatttttcgccgccgccatgattgtgttccccgaaccgatcatccgcgcattgcttccgtccgtctcgatggacgagaccatgctgatttcctacgcgcttatcgccctatctgtgggcactcctttgggatcggcgttcctgttgatccagcgcacgttctatgcctttgaggacggcctgcaccccttcctgtccgcggtgatgcagtatgggttcacctcggtattcatgatgatcggcatgatggtacttcctcctgagcattgggtactcggcatcgcctgctcggtgacactcggcggattactggcgttgccgctgacgttgatgatgttgcgccgcaagttcgaaggcaatcttggcggtcgggagatcacgaggacatatgccaaggccattgtggcggcactggcttccggagttgtggtctggctgatcaaacgaccggtagtcgcactgttcggcgcggatattcgatcggtaggcgggcacatgagctggtggtctgcgctggccatctgcgtggtgctcaccatcgtgctggccgtagtatatgtggctgtgttgtgggtggtacgcaccccggaactcatcagcgcctatcactcgatactggcccgtctacacaagactccggccagtgaggacgttgctgtgacagcccagccggaaaaagtcgacgatacgcaaatcaatcctgagacggagcccgtcaaggatagccccacacgtagaatatctaagaccagtctcgaacaccaatcacacggagccgaacgcactatgaaaccgcaactcggagacacgattctcaaccgatacaccttggtatcatcgttgcgtgaggagcctggcattcaggcatggaaagccaacgaccgtgtgttggcaaaggattgccagctgttcatcattaccaatcgcagcgctttcgccgcaatcgatgagctcgctggtcgcatcgccgccactcgccctgatcgcgtgattcccgtactgaaataccgtatggaatccgacgtacttctcattgtcatgccggtggacagcggccaatgcctgactgactacatggtggataccgacaagccgctcagctacagcgccatccggtcgattatcggagaatgcgccaacgtgctgcgcgaggtcattgcggatactcccagcagcatcgtcatcacaaccgacaccgttcgagtgactacctccggtgtgcagattgccgatgcaccatgtgccacgatgctggccgacacgtccgctactgatctgcgtacggacggtcctgaacggtatgcgattcgccagcttgcggcattgctctatgccctgctgacacgcacgccaagccaagcgacacccacattcaatctgcgcgccttgccgcaagacacccctggcgaattccgcgtgatttgcaagcgtggattggccttaagcaagcccgacgagcacacgttgccgatggctgcccttgtagaactcgacgccttgttgggtaattggaagccgctctctgaactgagcgatgctgatatcgccttgccgagcgtggaaagcgattgctcgattaccaaggcgatactgaagcccgccaacgagaccgatatcgtgcctattcccagcacgttgattaacagcagcagtcttccggaattgtctattaccccttccctgccggttcagccggccgccgtccccgctccgcacgcgatgtcaccggctcctctgcctgatgggtccagtactgctgacggcaaccagtctcaatctgacgcccgccgtctgtttgacttcaacctttctgacgcctgggagcacgagaatctttccggtgaagacaccggtgactggtacagcgaaatgaatccggcccccatcggcggtccgggtgataatactcggttgacggtgcctattgttaccggcggtatttccgatgccaccgtgggagagacgaccagtcgtattcccgtgttcgatgtcagcggccgtgctgtggcccccggtgaggaatcgctgcgtgccttggaagaggagcaggcccgcattgccgaagtaagcgccattcctccgagcttcacaccgaaggatgtgccggatgacgaggatgacagcaagctgcccgatgaacatctgttcggcaaactgtcgaccaaggtcgttgccatcattgtggctctgatattggtagtggcagcggctgtttgggcagtgcatgcgttccgatcctccggagacaatcctgccgatgcttccagcaactccagtgaaggtgactggcccgatatcaatgctgacgctgtgccattcggtggcagcaagaacgcgacgaacggtggcgccactgacgattcctcaaagtcgagtgatgccactcagagcgaatccagggactcggcatcagacaagtccaagaagtccgagactgctgattcgtcgtccaagaagaccaaggccaagaagtccggcgataaggattccagcgctgctccgcaaccgcgccatgagaacaacacggcgtttacgatttccagcgccaacttcctgtcgaatcctggcggccaatccgggtacgcatactacatgcaccttgaccagccgcaggatgcgtaccgcatggttatcaccatccgcacatccggtggtaagggctatattcgcgcaaataccactggagaccccactcagggcgagcaggtggccgaattcacctttgctgaaggtggcactactgaggtgaagttcaccaaagccgtcaatacgcaagatctgctgctgtgggtgccatcgggtagcctgccgcagaaccagctgtacatcgagaaggtggaggtcttctaatcggcatctataccgataactgacccaagaagggcggtaccgttcgcatacattcgacggtgccgccctttcttcgcgtctggctgaatgacatggaatatcgtatgggggtgtgacaatgtttcacgtgaaacataacgtcatcattatcggttctggtcccgctggctacacggccgccatctatcttggccgtgcaggtcttaatcctgttatggtcactggtgcgttatcgccaggtggacagttggtcaacaccactgaggtggagaacttccctggattcccggaaggtattcttggcccggatcttatggatcgcatgaaggaacaggccaagcgcttcggtacaacctatatcgcagacgatgtctcttccatcgaggcgtgtgaaagtgattcggtcaagccgacctatcgtataacgctctccgatgactcccagttggaggcatcggcgcttatcatcgccacagggtcgtcattccgtaagcttggggtgcctggcgaacaggagctgtccggacatggcgtctcgtactgcgccacctgcgatggcttcttcttcaggaacaagcctatcgtggtcgtaggcggtggcgattcggcttttgaagaggcattattcctgacccggttcggttcttcggtcaccttgattcaccgacgcgatagcttccgtgcctcgcagatcatggtggaccgagccaaagccaatccgaccatcaccctgctgaccaacacagtggtgacctccattaccggcaccttctcccccacacagaacaccggtgcacctattgccattcctggcttgacaatcaaacgaccggctgtggcaccggccagtgtcagcagcattgccgtacgtaacgtggtgaccggagaagaaagcacgctggacaccaacgccgtattcgtggctatcggccatacgccagccactgattttgcagctggtgttgtggaccgtgacaatgatgggtatgtcgtggtgcagggtgccagcacggtgaccagtgcgccaggcatctttgctgcaggcgattgcgtggatcgtacttatcgtcaggcaatcagcgcagcgggcatgggctgccgtgcagcgctggatgcgcaggcctatcttacggactgattgcggcgacctgatgatggcttgctgttctgactgctgcctgtgacataggagcagcgctaggtcagtgttacagcatgccgcccttggatagtacgcaccggtcaaaggcatagaaaggcccctcaggcgacggagaatcacgatgtgtgatttgtcatcctccagcctgaggggttttctattgcgacaggggctacaacgcaggcatacgcccctgccaggaatcacgcagaggctataacgtcttgcgcgtacaacgcactgcacagcaataatgccggcgacagtgacaagccgatacaatgccaagtgacaacgctaagcatcggtgttgtcactgacgatgccggcgacaacacgaatgttcttatcgtgttacacccatttggaatcggcatcgccttggctcggcaccagcagctgcaggatgcgatccatatcctctggtgacgagaagacgatttcgatgcgaccatgcttggtgctgcccttaatcgacaccttggtgtcgaaatgattttccaaactctgctggatggcggaaccaacccaaggattggtcttggacgtcttgggcttcttcggctgctcccccgacgcaatcttcatggcgacgatttcttcggtgctgcgtacagaaagaccttccgcaataatacgagaagccagcttgtccatttcctccggatcgctcaggcccaatagcgcacgcgcatgaccggacgatagcacaccggcagccactctcttttgcacagaggccggcaggttcagcagtcgcaaggtattggcgatttgcgggcgagacttggacaccgacttggacagttgtacttgtgtcaacccgaactcttcaatcatctgctggtaggcagccgcctcttccagcggattcaaggccacacggtgcaggttttctagcaatgcatcgcggagcatatcatcatccgcagtggttttgacgatggcgggaatcgtctccaacccagccaactgggatgcacgccaacgacgttcacccataatgagctcatacgggctgtccaaatgaccggcaaacggatttgtgctggattccgtctcgtcgtgcttggcggctttggccgcagcaatctggcttgccggacgcttgcgcacgactatcggttgcagcacaccaacttccttaatggaagcagacagctcattcaactcatcctcgtcgaagatggtacgaggctgatgtgcattgggcccgatatcagacagtttgagttcagccagataaccaccggctaccggcttgagctcgtccttcttatctgtgtcagcggtctttgccgccgatgcagtctgagatgtttcacgtgaaacatctttgacggtgacggatgtacgatgtgccgtctgagacgcagacggcttgccgccctgctgaggtgcggcgaccttaccggtttgaggtttctccgtaccgaaaaacaggtcgctaggatgagtaatggtgtccaatgcgggcatggatgcgcgtttaccggcggctttcttggctgctttgctggacgataccatctgaggcgcggcaggctttgattcctgctgggcagtagccttcttggcgggggttatgtcagcagtggccgccggagtagacgaatcctcctcaatcattgcgggctgctccgccactggctcctcccctggcaatgtggggaacaaagcgccaaggcccttaccgagtcgtgattttgatgccattacttgttcctcctcgcatcaatggtgtcaaggacttgttgcgaacgctgtgcgatttccaaagctgcttcaccatacgatatggcacctatgccacgaggatcataggcaatcaccgattgggagaaactcggcgcttcggagatcttgactgaacgcgggatggtggtattcagcacaatgctgggatagtgtcccttgacctcgttatatacttcacggctcaatagcgttcggcgatcgaacattgtgacgagcatggtggacaccagcagtactggattgaaatgctcctgcaccaaaccaatcgtgttgatcagctggccaagaccctccaatgcataatactcagcctggataggaatcagcatctcggtcactgcacacatggcgttgatgaccaagaggcccaagctgggcgggcaatcaatgaacacgtaatcatagtgtttatctgattgacgcaggtagaggtccaaggcctccttcaacaatgtgtttcggttgggcagatcagccacttccaactcggcaccgctgagatcgattgatgcaggcacaacatcaagtgtgggaaaatcaggacagaccgtgataacatcacccagatcggaacgcccctcgataacgtcatagaccgagggctctcccgatgcatgagatacacccaacgccgtagaggcattgccctgcgggtccatatcgatgaccaacacctgcgcgcccttgttcgccagcgccgcagcggtgtttaccgtggatgtggttttacccactccccccttctggttggccacggcaatacgacgggtacgttgaggtttggggaaatcggttttcttgagtacatcgtagcgtgagctttcatcagccatctggctgccaagcactgaaccgtgaccatcgaatattcgctgaagcgtttcggaagccgattctataggttccgactgatgatccttggtggacatcgctcctccttgcacagacgtaagttccagtgttctcattcgtatggacatgatgctcgttatccacaattgcgatatgcaatgtggataagtgtggataagtgtgaatgacgttgagtgttagattatgtattcgcagacgaaaaacattgaaaaatcagtgttttcatcattctgcacatcgtcccgtaaaaatgtggataacttttacgcacatatggaaatgtggataactcaatcagtactccactcatcgcttatccacaatcaccacgtgggtaggctcaagatccggtccgacagccgcctcaacgacgcgtggacgacgaccaccgaattttgcaatctccttgccagccttgtcgatttcagcctgagcagaccgtcccttcagtgcgatcaactgtcccgacggtttcagcaacggcaacgtccagccagagagtttggtcataggagcaaccgcacgacacgtgacaacagcgaacggatgaatttcccgcttccgtacctgctggatgacggcatcggagcgtccacggataatctcaacgttctgcagttgcatcaggtcaacacattcatgcaaccattcgattcgccgctccatcggttcaatcagcgtgaagtcatgatcagacaaacacgcggcagccaccaatccaggaaaaccaccaccactgccgacgtcggcaactgttttgaagcgaataccattcgtcacattccgaacgtacggcacaatcgcagcggaattcagaatatgccgttcccaaatgatatcgacgtcacgggggccgattaatccacgaggttcaccctcttcggcaatcttggcatggaaacgctccaacttcggcaacgcatcacccaagacctcagcaagtacaggtgacccctgcagctgatccgtcatagccatctccctcaccatgtttcacgtgaaacaatcaacatggaaaaggcgtcgctcattacgacgccattctccctacggtcactcttgtttgtttagagacgacatccgttgaacgtccttgtcatctcaaaaactcgtcgacctattactcctgatcaagctcgtcgtcttcggcaacatcctcgattttgttcttgagatacaccgtcacgtaacgatgaggctcctcaccgtgcgagcgagacttcagcccctcttcccgaaccacatcgtgaacgactttacgttcgaaggaattcatcggcttcaaatcatacggctcgccggaatccttcactgcgtcaatggcatccagggcgatatcacggaggtgctgacgcttgcgcttcaggaaaccgtcgacatccacaatcagatgagaacgctcgccggtcttctgctgtacagccagacgagtcaattgctgcagagcatcaacgacttcaccattatggccaataagatgtttgatgtcggtatcgtcatcagcaacgatttgcacggtggggcggtcattacgcacgcccatctcaatgtcgccctcatagtcggcgatatccagtaggccttcaaggtaatccgcggcgatgtcagcctcttcgttgagctgatcgatcgacttcacgtcatcctgtgccatacgctactccttcatgtcgtgtttgaattccaagtctaagccctgctcccccgaacagagaaagtaatgtcggtgcgtgttgaatgtttcacgtgaaacatcgaacgcgcaccgacatggtcgtcacttctttttgcgcttacgcacgggctgttgacgctgatagccctgagtggccttacgctcagcctcttccttggccttggccaatgcttcttcttccagagagggcaggccggcctttgcgcggcgagcattctcattacgatgatcgcgcttctccttgtccgccgcagccggagagccaggggtcgggaatgcgtacacctgccacaatgtgcggcagaggttgcacacgttgttggtcagccagtagaccagcacggcgaacggcatggtggcaccagagaagatgtacatcaccgggaagagccacagcatagccttctgcatggtctcggcctgtttgttcatcgatgcggcgggcatgttgcgcttcatgttgaagtactgcataaaccacaggcagaagcacatcaggaacacgaaggtaccgatgaccaccttgcctgcagtagatgcgcgggtgaagttatcggtcacactgacaatgccgaacacatcggtttgggtgaattgcttggcggttgctacgtcgaacgcgcccaacgcaccgcgtttaccgttggcaatgtagggaatggccgacagcgtatagaacatggacatgaacaccgggccctgaatgagcataggcaagcaggagccagccggattggcgtcattgtcttgatacagtttcatggtttcacggctcatggcctccttggaagcctgatccgtcttgcctttgtacttgttctggatgcgcttcatcttcggcgccaacgcctgcatcttgcgcatcgacttcatctgcttgcagaacagcgggaagatacacgcctgcaccaccagcaccaggataataatggcaagcacccatgagacaccaatcgggctcatgcccagcatcgcgaagaagtcatgcacgatcttcatgatccaggtctgcaaccactcaacgggagtcaggattttatatagaaatccccaaaacccgctatca

SEQ ID NO: 2126 - DNA, 6157 bp, Unknown
  R51_24m  MAG No. k141_5422
cgccgttcgcaccatcggcgccgttcgtatcggccgggcactcatccgtcaccttaccgttggagcccgtctcgacgccatccgcattcaccaccggcgtggttaccacgttcagtggatgtgtggcatcgctgctgacccgaacggtataggcaatcgtcaattcttttccgggctcgatccactgctggttgaacataatgtactgacggtcatacaggctcgcggtgttggtaccccatgaatctatatcagcctgcacagcggtgatttcgccaccgtacggggcggtaagcaccacgcggtacagcatgccaccgagcactggattctccgagccgccattaacgaaatcaggcaacgattcggccttagccttagtcagcgtgttcttcatggtgaaggtgaccgtgtattcgtcaccgagctgatcttccgtaaactgacccagctgcgtgttacgcacggctgtcgtgatgcgcttatccagcacgccagaatacagggcattctgactggccgaggcgtcgccgcaggtttttgtgaccgtggtggaggtcttcagataccaatcctgcttgccttgctgcagctccgaaagatagatgccggtttcaggtacctgactgtcagcagacaactcgccactggccttatcgtcgataagtccggtggcaatcagcgcctcctgctcatccggatcagacatccatagcttgaaatgaccgctagcgctggtatctctgattgccttcaacagcggggatgcggtggaagcattcgcgttgccaagcacatggttcataattgcttgagccgcttcggaaacgaagttgttctgctgctcgaagtccgggtaatccgtgtacaggtctgaagcgaagaacggcaccgtggtggtgccatccagcactcggccgtccgaaagcttgaccttgcctgtggctcccagcaatgcctggaggaatacgggatcgaatgacaatacacccgctacgttctcgtcttcgttgcctttctgatacagccacatgtatttgttcatctgtgccacacgctggaattcggggtcgatggtcgtggtggccgggtactggtcaaaagtgtcgccaaatacctggcgctccttcagcaccgtagcatccattggcttctcaggaatgtcccaaccagaagtggtggcgaaatcaccgatggtaatcgtgcccttatctgccgtgattgcggcgatggtgcccaccatgccgcccgccgaacgcagctcggccgggttctgcaccatcaccagatacgtgcgcttgccgtcctcgccaagcagttgcggtagcaagttaatgaggccatcgtattcgctgagcatcgaatccacggtcttgagcgcagccttttcggcttcgagcacggtggccaccttggcgacgctcggagtcggcaccttgttgagcttggtgagctgctgcgagatatccttatgcgcctgcttgacgatatccggcatatccatcagggcgctgacgtccaccgagccattcttcagggagaagccctgcaatcgtttggacaggttcagcagatcagtgaacggaccgttgaccagcgtatccacggaagccagcatttcgcgggcagcggtgatgtcgctgccaaatcgcgaatggtcgcggaagaagtcccactgcgggccgttcagctcctcgttgagatcactggtggcattgaccaactcttgggagatgtccgacagactcttatcgctgccgcagccaagtgccgaattggccagactttcggcggatgtcagcacacgctgcgcatccgtggccattctcgagacggatgccgcgtagagcgtgcccacacaggtgacgctggccagcaacgtcagcagcagtacaaccaccgctcgcgcccatatcggtgtacggctgaccagcgaacggccgtcgccacccacgtgctggggagtcttcaggtttacgggacccgtctgctgatttgcagcgctattcgtagatgcggagcgattggatttcccgttaccggcatggcggcttctcctacgccccacagccttatggctcgaatgccctgaagtgaatcgcatacttatcctacccgaaaatctgctcagctcatactcttatccaacggcgcaaggccacgcttccggatgccggactccgggcgaatccggaatcgcagacatgccggagcacacgtgacgccacgcatatctcatgccagtgtaccgatgccaccgaaatagaccgagggtttatcccataacgggtgcaaatcccctcatgaccaccacatcgctgtcagaatgttctcagacttcattgaggagtataacagtattgcgcaagaaaacggtcactaaacgcaacaatagttaaagccgtattgatttgttcggcttaggagaacgggagaggcaattagatgttcgtcctcagcaacgcctggcgagccctgacacgttctaaaggacgtacggccctgaccgcgttcatcaccttggcggtcaccttcggcacagtcgccggactggccatcattcaagaagataccaacgcacacaccaccgcgtacgatcagcagaaggccacgttggccattcgcccgactgcggctacgtggaagaaggtctccgctacggactcggcttccaccaagcattacatgacgtggacctcatataccgaatacgccacgctcgtccggtcggccaccaactcgttgaacttcacggttaccgaaaccgtgccggcccgcgtgagcggtgatttgaaggccctggacggcggatcgctgggctcggcctccgatgatgagaccggcggccagctcatttggcgagccttctggaccgaggatgccgccaaggccagcgacctcggtaccttcgaaatcgtggacggcaaggacctgagctacgacaacaagtcctccaacccgaacaccaccggcgcactggtctctgaagcgtttgcctccgccaacaacctgaaggtgggcgatacgctcaaggtggcggccgcctcggacgcccagaccacggccgagctcaaggtgcgcggcatctacaagtacacatccgaatccgccgtcgccaatccggtgacggccgcccgcaaccgcgagaacgcgatcttcaccaactatcagaccttcgccaaggccggactcgacccacagtccaacgacaagaccgcctccggctgggcggtgccggatctggacgtggtgttcgacaccggtgatcccgctacatacaagtccttggtatccaccctcaagaagtccaagctgcccgccaagggatacgaggtgtcttccccttcgctggaatcctacaacgcttctctggagccgctggatacgctatcctcgcgcgcgaagaccggcaccattgcgttggttgccgtgggcggcgtgctgttgctcatcctcgtgctgtcaggcgtgtgggcgcccaagcgtgacgacgagatcggcatggcactggtgtccggcgtcactcgcgggcgtttgggatggcagttcatgctggaagtgttcatcgtcaccctgcccttctacgtaattggtctggtcggaggcgcgttcgccgccaagccgatcggacctgctctggcatccggccatgccatcccggtgacatcggacctgatttggaccatggtctggtatggactgggttcaatcctgatcctggcgattcttgccgccctgcgccttgcgttcttcagcgcgaacaagctgttcgccgccgatggcgactggggcaccgtgagcgagaccgaggagattgaagcggccgaagccactggcgctgctgagaccgatgaagctgctgaggccaccgctcatgatgctggcgaggccaataagacgaccaccacaaccgacgatgcggaggcacaggcatgagcgacaagaacaacgatcaggaactcgagaagaccactgacgcaacggctgacgaagtgacttctgagactgagacgaacgacgccattgaatccgttccagctgactccgtgcagttcagcgtgaccttcgatgacgttgatgacgaaagcactgttgacgatggtatttacagcgcactggcatctgccgaaaccggagaaaccgacgagaccagcgaggccgaagcagacgccatcgcttcggccaacgcatccgccgaagtgaccgagcgcaatgccgcccgcgtcaacgaaacactccgactggccaaaaccgatcgcaaaggcgcattggccgagcatgcggagcctcagggcaaagcgaccgaacccaccatgacgctggcctcgcgtatcgatcgcgtgttggtgggcggcggttccgacgacattctgctcaagacctacccgacctttgccctgaacaaggtgacggtcgccggccccaagggcaaggtcaacatcctcgatggcgcgaatttcttctgctactccggacacgcatacgcgctgctgatcagcgacgaccccgattcgggcatcaccgccgacgccaaacgtcgcgcgctgatgggcgtgatgagcggtttggccacgccggtgtctggcacggtgatgaacaagagcgccaacattgttgagctcgagcccgtggaactgcgcggccaccgtctgggcatcgtaccgcagctgcacgccgtgcagccgaagctcgacgccgaacaaaacgtgctgtacgccatggatgcgtccaaccgcaacttcctgaagcccaagccggtgatcgcccgcgaactgctggccaaggtcggcttctccgaggccaccagcggcgtggccgtcggcacattgcctttggtgcagcagcgtttggtggccatcgcccgtgcaatcagcaccgaggccgaagtgctgatcctcgacgagccgacacgagggctgaacgcggatgacgaggtgaccgtgttcgccgcgctggccaagctggcgcacaccggtgacccgaagcattgcgttatcgtgctcactgcgtcgcgcgagctcgctgaagcagccgacacactcttcaagatctgatctgtccggcagcaatacacaccagacacaccagcacaggctcttgaagctcacgatgttcggatacataccaaacatcgtgagctttttcgatttcgaggggctgatttgcgtgttccgggaggtctacttccgtttcaaggggctggtcatccgccaaaccccgagtataaacggcttcatgccaacgtcattccgccgtttttacgccgcgtatacttgggcaccagccccttgaaacggaagtagacctcaggaggatgccgaatcagccccttgaaacggagataggcatgtcgagatgtccgaatcagctcctgacaatcctgatgcggctcattgccgcgctaatctgaggataaatctgaccgtacgaggcgaaacctgataatcatgaccggatatattcccacactggagcagatcgacgagttgcaccgcaaaatcgcgccgtccaaggcggcgtacgagctggtgcatacgcattgcgtgattgtagcgaccatcggctgccagatcgtgcgccggcagaacgcgctgttcacgcgccgctgcacattaccgaaggacgcggaggtaccgcccaccgcaggcgtcaccggcggccatgtgccgccgcgtctgctcgacgagcatttagtactcatcggcggactgctgcatgacatcggcacctaccgcgtgttcaagcatgacggctctgacgacgaaccgctcaaattcagcaagaaacgctacattctgcacggtcttaagggctacgagtatctgctcgacgagggcgtggacgagtccatcgcccagttctgccgcaaccataccggcgtgggacttacgcgcgaggatgtggtgcgccaggagctgccattgccaccagccgactatgtgccgatgaatctcgagcaggaagtggtgatgtacgccgacaagttccatagcaagtcagtgccgccgaagttcctgcaggtcgaggcgtatacggcccgagccgagcgatttggcggagagaacaaacaacgatggctggatctggtggccaagtatggcgtgccggatattccggcgttggcggagaagtatgggatgcggatgatttgaggctc

SEQ ID NO: 2127 - DNA, 16273 bp, Unknown
  R51_24m  MAG No. k141_5505
ggccaacgggcggcggccggcacgtaggcgacccagctgtggttgcgcatcacgatgcgttcgccggcttcgagctcggcgttcatgatgtccttcaagaggttgccaccggtcttctcgtggtaggcctcggtgtgctggagttccttctccatcttcggggcgatgaacgggtagcagtagacctggccgtgcgggtgggcgagggagacgccgatttcctggccgtggttctcgaacgggaagatctgctcgatgccttccatcttggagatttcggcggtacggaaggcccaggcctcaaccacggtgcgcaggcgggagaccggcagatcggccggcaggccatcctcgttcgggtcgaagcagatgacctcgcagcggccggcggcgagcttcttctcccacagcgggttgccgtcaacgtaggtcacgtcctcggagacgccgggcacgcgcaccatggaggggaagcggttctcgaacacgacgacgttgtagtcggtgtccggcacttcgccgtcctggtacgggtcaccgggcttgcgggcggccagcgggttgcccttggcggtggcgccggggccggcggtgatcgggcggttcatacgggcggtggccatcgggatccagtcgccggtcagcgggtcgcggcgcatctgcggggcggcgtacggcacttcgttgccgtcggcgtccaggtgcggggcgaaacggtagtccagcgggcgcgggtccttgagctcgcgggtcttggcaccggagacgaactcggggtcgtcgtccaggtagaagaagtcacgaccgtcggcaagcgtcgtcggcgtgatgcggatgtgctccttcgcatactccccgggggtgtagttggcgaaatcagccatgggtttactcactttcctcaatgatctcgctctggtgggccagcacgagttcctttaccaaatccttggttttggcggcggagtcgggatcgagcccgtcgtcagtaatgaccgtgtccacctggtcgaagcgcgcaaacagcgacagcgatgtgcagctccacttggtgtgatcggtcaaaactatggtacgatcggcgatgtccatcatcgccatatcggttgcggcttccagcgaattcggcatcaggaagccacggggaatcgacaccgagtgggtgccgaggaatacggtgttgacacgcagcgaggcgacgaccttgtccgcgatcggaccgacaagcgagttcgatcgggtgatcacgccgccggtgacgatcacctccacgtccttggattcgagggcctggaccagttcggccacgggaatcgaattggtgaggatggtgatgccgctggactgctgcgattcgagcagatgctgggcgaagacataggccgtggtgccgccgccgatggcgatcacatcgccgggagccacatatttgatggcttcctgggcgatggcgtccttcaggccgagatccatctgggacttgacagagaacaggggttcgctgagcaaggtactggtagtcaccgcgccgccatggacgcgcttcagcagtcccttgtcggcaagttcggcgatatcgcggcggatggtcatcgctgacacacccagttccttcgatagcgccgtaatgcgcactgccccgcgcgtgcgcaacctgctcaagatgaggtgctgacgttgtgacgaaatcatgtgaacattatcgcacacaaaagctcacaaaccaaaccggcttgagcgttttggggacaatctctcgaaaattccgggcaattcaggtgttcatttccacaaaaccgcgcaaaatcgcacattgtgcgaaccgatattctcgcagcgaccactagcgcgatgactcacgaccgacgactctcccgagcgcgttgctcagcggcgagtcacgcctgatacctggtgcatcccgattcatgtatcttctgccgagccgacgcctgcgtgcgcctcgacacgcggtagccccttccccaattcgcctaggcaggaatcgcctagccgaaccagcccaagcgtgagacaataggcggtatgacttacgtttctgaaagcttctggcacgacgccgtcaacaaagccaccaccgatctgttcaccttcggctacaagcacatcatcaaaccgaacttcgtgttcaaccaccgccccgatgaggcacacgatcagatgatcgagttctgccacgtcgtcaagaacgtcccgccgctgctgctcgccgagcagctgatgctcgactacaccgaccccattctggaaacgaatgtgatgggcgtcgatttcaccaacccgttcggcctgtccgccggcctcgacaagaactgcgacatgcccgtggtgctggaccatgccggcttcggttttgaaaccgtaggctccaccacctcgcgtccctgcccgggcaacgccaagccgtggttccaccgtctgcctgaatacgattcgatgatggtgcacgtcggcctcgccaacatcggttcggacaaggtcatcgagcgcgccgagaaggcttggactcaggcccgccagatgcagctgtctgtgtcgatcgcccgcaccaacgacgaccagtgcggcgatttggacgaaggcattgaggattactgcatttcgatgcgccgcgccgccggccgcaccgcgatggtggaggtcaacgtctcctgcccgaacacgcacgtcggcgaaccgttcaccgcgactccggaagcgctcgaccgtctgtttacggcgctcgacaagatcgaccgcccgcagcccacgctggtcaagatgccgttgaacaagccgtggggcgagtacaaggagctgctcgatgtgctggccgagcacaatgtgcaggggctgtccatcgccaatctgcagaaggaccgcaccggcctcgagattccgcgcgattgggagggcggcctgtccggcggcccgtgcaccaacgccagcaccgagctgattcgcaaggtgtataaggagtatggcgaccggttcgccatcgccggcatcggtggcgtctttacccccgagcaagcctatgcgaagattcgttccggctccagcctggtcatgttcatcagctcgctgatgtaccgaggcccgcagcagatcaccgtgttgaagcgcggtctggcccagctgctgcgccgcgacggattcgagcacgtctccgacgccgtcggcgtggacgtggagtgaactcacatattgccctattacccatggggcggttagccaaatttcacattccgcagaataccgccgttttgggttaccgccccatgagggttttaccgccccatgagggttttaccgccccatgggaaagtcaccgccccatgaggattcagtacgcaccggccacgtattgcggggcgtaggggacctctgtggacggtatgcccagcttgttggccgcacgcaacggccagtacggatcgcgcaatgcggcgcggccaatttccacggcatcggcttcgccacgggccaaaatcttggccgcctgcttcggcttggtgataagacccaccgcggtcaccggaatatcggccttggacttgacctgctcggcgaacggcacctgatagttcggcttgaccggaatcgacactcccgacatgatgccgccagtggacacgtccatcacatcgacgccatgctccttcagcaccttggatagtgcaatggtctggtccagatcccaaccgccagcggcccaatccgtggccgaaatgcgcaccagaaccggcacgccctcggggacggccccgcgcacggcatccacaacctcgaccaggaaacgagagcgaccggtcaaatcgccaccatattcgtcatcacgctcattgctcagcgggtcaaggaactgagaaatcagatagccatgcgcagcatgaatctgaatagcctggaagccggcggccaccgcacggcccgccgccgcggcgaacgcaccgaccagaccatgaatctcatccacggacagcgcgcgcggcgtacgcagcccgccgaacgcgatttcagacggtgccatggtgggccagccgcccgcctcctccggcacactctgaccgtcgtaaccaacggcgaagcaaccggtcgaagccttacgccccgcatggttgagctggatggcaggcaccgcacccgcctcgcgaataccgtccacgatccagcgccaagcatcaatctgcccgtcttcccacaggcccaaatcgcacggcgtgatacgcccttcaggagccacggcggtggattcgacgatcaccatgccgaatccgccgaacgcacgagacacgtaatgctggtagtggaacggcgtgggcctaccatcgcaggcgaacgacgaacacgtgcacatcggcggcaaccaaatacgattacgcacggtcacttcgcgcagcgtcattggcgcaaacagtcccggacggtccttgctggctttcttatctgccttgctcacagcttccctttcctcataatcctcataatcatcgaacgattcgctcgtcttgcccgcgccggcccgcttcttggaccgtgcgtcggattttgacttcttcttaccgtgcctacggttcctcgatgcatcctcgtgcttggtcttcggctgcttggactgttcgccgtccgaagacgaagccagcgtcaccgctttgagatccggcacgtcgaatccacgaaaatcaaaattctcatgcgtcagatcgtcgtcgctcatcgttcccctttccaatgcgcgttcatggcgaatattcgatgaacgcgctggcgttgtcattaagtattgtaaaacgggcgtcacctgaaacaggtaacgcccgcaaactacgtaatttgggtatcgcagtcgactatgttacgtagactcagccggcctgcaatcaccaaatgtcaaacgccaatcaccaatcactggccatcattcgaccgctctgaattggtgccctgggtttgggtgttgttttgcccagtgttctgcgactgagactgcgactgggattgaccattggtggtcgtctgcgattggctgttgccattcgtagtggtctgcggcacgctgaacgttcgtccgccaatgcccaggtacttgccagtcgtggtgtacttcgagacgggctggccgtaatcgttgtcaatcggtattttcttcttggaaatgtagctattgaagaagttggtaacggccggagctgcgattgtcgaaccatcccaatagctgttgtaccggccgttgatggcaatgttggaaatacggttggtgtacgggttctgtgcatcgccgaccacagcgaacgccgcaatctgattaggaatgaacgatccaccggacaccgcaagatcctcactggtaccggtcttaccaaacgacttacgcccgtcagccaatctgaatgaccaaccggcaccatccggccgcaccgtaccttggttcagggtataagcgagtgtttggatgatgtccttatccaccgcctgatggcagttcgcggatggaaccttgagatcgttgccgtccttatcggtcaccttgctgatggcaatcgggttgcattgcacaccattcgaggcgtatacggcgaagatgctcgccatggtcagcggggacacattcaccgagccgatcatcatggatggtgtatacacctgggttttgtcgatggtctcacccgtggcggcgtcatggtatcccagtttggtcgcggtgtccgccaccttgcacagtttgaggatggcgcccatggaggcctgggtggtgttgtgcgatcgcaccagaccgaggaacgggctttccgggttcaccgtgccggcgcccatggcgttcgacacgttccacgaatcggcaccgcccttgtagttgttgcaggcgaagtcggtcgtggggtacgtcgtggtggtctgtaggttgtcgttgatcgaatgacccgcctccatccacgcaatcaggttgatcggcttccaagacgaaccaatggtccaaccggagccgccgccgtccaccagatcgacggcatagttctggcccgacttggtcggatcgttcgcggctgccggagtggcgtcatagtaacgattcaggccaaagctcagcacctcgccggttcccggtttgactgcggccatggctatttccatgccgctgggatcgtccggtggaatggtattacgcgcggtctccatcatcgtggaattcgcttccacatccaacgtggtgacgatcttcaggccaccctcctgcagcagcttgttacgctccgcacgagtcttgccgaattcttcggagttctggatgcgatgcaccacgaaatcacagaagtatgcgtagtcgccggtgtcctggcagccgacgttcacggcctgcaccttcagcgtgtccttcagcggcgtgttcacggcttcggtgtactgcttctgggtgatgtacccctcctgcagcatcagcttgagcacgatattgcgctggttctcgctttccttctggttctcctcgaccagcggatcgtactggctcgggttcttggtgatagccgcgatggtggcggactgcaccacgttcaaatcggcggcggacacgctgaagtagcgctgggctgcggtttccacgccatacaggttgttgccgaactgggcgatgttcagatagccctgcagaatctcggccttggaatacttcttctccatctgcacggagatcagcatctcgcgaatcttacgggcgacggtgtcttcggtggcatggtactgggcgatcgggtcgtcgtcctcgatcgcctgcatgagcagcacgttcttgacgtactgctgggtcagcgacgaaccaccctgctgggagcctttgacgaggtaggtctgcacgaacgcacgcatcacgccttgcacgtcgacgccggcgtgagtccagaatcgacggtcctcgcgcgccaccactgcctgctgcatggttttggaaatcttcttcagcggcacgacgatacggttttggttgtagaacgtcgcgataacggtggaaccgtctcgcgcgtacatcgtcgacttctggggcagaccggtcacgtcaaagtccacgttttctaccttgagcgacggaatcaccgctttggcggctttattggcaccgaccacacccggtacaaacaacacgctggccgccacgccaccgcagacggcaagcatgatataggccaagaggagaacaagcacacgttggagagtgagggacttctttttgggcatgggccccattctaaatggggtgccctaccaaccgggctcgcagtcagctcccgtgaacatatcatcacaagaaccgcactagcgtaacattggctggaagtcagccgaacggtcagcgccgcgagcgtcgaatcagcatgcctggctggaagatgatgatcgatcgaccgtcacgtgcgatccatccgcggttggaaaagtccatcaacgccttgttcacggtctcacgactggagcccaccagttgggccagctcttcctgagtcaggtcatgcggcactttgaggccctgttccaccggctcgccgaaacgtgagcccaagttgagcaatgtcttggccagacgcgccggcacatccatgaataccaagtcggagatgcgttcgttgttgccgcgctggcggttggccatgacctgcaacatgtcgatggccacacgcggatgctcatcaagccatgcgaacagggcatcatgctccagccagaccacgcgcgtgccatggctcatggacaccgcggacgcagtgcgcgggccaccatgagggtcgaataccggaatctcgccaagcacttcgcccggcgcgtggatggacagcagctgcacgcggtcatcggaagaagtgcgaatcagcttgacgcgcccctgctccagtagatacatgcgctgatcggtatcgccttcggagaagatatagtcgcccttatcgaaggtcgcacgcttcaaatgcggcagcagctcctcggcttcggctggcgatacctgcttgaacaatgccgtatgcagcaggatgttctcctcgtcagcaaaagcgtttggcgtttccaagctcatcgcaccatccttatcgtcctacgaccgtcgtcggccatccgtcatattgtaacgcgccccacaggtttcgtcagaagcatgccatcattcgtcacttcatgtgtggcgcgatccgatagccgtacgacatgctgacgaatgtgttaccgcgaaaaacggcactgtcgcggttaccgcgctcgcccatgacaaaaccacgcacggccaccggcaaaatcgtatacggccatcggtgaaatcacgccgcaaaccagtcaataaggtgttcgacgatgtgttcgcggctgagacccgtctggcttttcatcgggtccacgcgtttgactgctgatttcaccgctttgtctgacatcttctcgcgactggtgttgagcacacggctcatcttggccgcatcgatgtcatatgccatggtcacatggtgcagcaccgcgccgcctgagcctacggggaagcgccgttgcgccgctcccccgatcttgccgtactgcgaggcgatatcattgaggcccgcgaaccgcacatccaagccaagttcgcgcagcgcttcgaccagccaccagtcacagagccggtaggattcttcgatgcttacgccctgaacgaaatcgagcggtgcatacagagaataggtaatggtgttgcccggttcgataaacatcgcgccaccacccgtgcaacggcgcaccacgtcgaaaccgagctgctcggcaatgtccagattcacctcgtcctgggccgattggaaacggccgatgaccacagccgggcccgcccactcccagaaccgtatggtcggctgtcgtgttcctgctgcgacttcacgcgcccaggtctcgtcaatggccatttgctcgtccggagtacgcggatggtcgtggatcacggtgagttgaggtctgagggcgttccagcgctcccggtattcagagcttttgtcgggctgcttggtttgtgtattgatggatgccggggtgttcggcgcatcggggctgaccacccccacccgctgcgcgggagcccccaccagcgggggcaagttgctgcttacggctcggctatatgcggttttgatggcaacttcatctgtgccgataatttggcaactagggtgagcgtccaatacggaccgcaatgaatcatcactaattagagcctgttccaagtcacgcaacaaagcatgagattcggcatccgaaactgattcaataaagaaatcaccgctgatatggcatgactgtgcggtgccgtcatcatcgacggatacggtcacggcgactagtttgccgccaacggttttgcattccccatgtcgcatttgcatgcaactcagtataaacttggctcccctctggaggggagccaagtgggacatcacatgcgggccagaatgtccttgccgacctggtcggtggagcgcacggtggagccgagctcctcgatgtccgcttcgacggcggtgtgaatcttcttggccgcatcatcaaagccgagatgctcgagcagcatggcggcggagaggatggcggcggtcgggttggccttgttctgaccggcgatgtccggagcggaaccgtgaatcggctcgaacatggacgggaactcgtcggaggcgttgatgcagccggaggcggagtagcccacgccgcccaccacggagccggcctcatcggtcagaatgtcgccgaagaggttgtcggtgagaatcacatcgaaacggctcgggtcggagaccaggaagatggtggccgcatcgatgtgctggtagtcgtgggtgacctcagggtattcctcgccgaccttgtcgacgatgcgttgccacatatcaccggcgttgacgagcacgttcttcttgtgcaccagggtgacgtgcttcttgcgcttcatagcgagcttgaaggcgtaacgcaccacacgctccacaccgtatgcggtgttgatggacacctcggtggccacctcctgcggggtgttgcggcgcaccgcgccgccggcgccgcagtacagaccttcggtgccttcacgcaccaccacgaagtcgatgtcgccggggttggcgagcggcgaggtgacgcccttgtacagcttggaggggcgcaggttcacgtactggtcgaggtcgaagcgcagcttcagcagcaggccgcgttccagaatgccggccttgatgcgcggatcgcccacggcgccgagcagaatcgcgtcgttggccttgatgcgctcctcttcgtcctcgggcaggatcgcaccatcgcgcagataacgctcggcacccaagtcgaagttctcatactcgaagtcagctacgccttcagcggccttttccaaagccttctgagcccacggagtgacttccttgccaataccgtcgccgggaataacggcgattttatatgtctttgccatagttcaaggagcctactcgcgcgaccacctgccggcccgaacccgctcagctagtggacacaaccaacatgcgtatcgtgtcgagacattcattaggtcattttagtgttcattaggtcggtgtgggttcatttcagggactgaaatggcggcatttcagtctcacatagaagaggacaccgacctaatgaacgacagaatgacctaatgagcgagccccatcacatccatgcaccaagcgttctcataggaaacctcttcccattgcttgtaacgcccggatagaccgccgtgaccggcctcgacctcgatcttggccaccgcgtccacgccggcggactgcagacgggccagccatttgagcggctcgacgtacagcacgcgggtgtcgttcatcgaggtggtgatgaagattctcgggaatcgcgcggcggcgaccgcgccggcggcagccccatcagcactgccgtcaccggcagcctcgtcgtcgccgccctcgagcacggtgaccggcacattctcgtatggcgtgtacgacttcatgtactgatacacctcagggtcatgcaacgggtctccccattcgtcccattcggtgacggtcaacggcaagtccgggtcaagaatggaggtcaacgcgtccacgaacggcacatccgcctcaacaccggcgtagcattcgggcgccatattggcaatcgcgcccatcagcaggccgccagcggatccgccgttggccacggtgcgccaagcatcagccaaatgcgccttctgcagcgcgcgcgtggcgtccacgaagtcctcaaaggaatgcttcttgttcagcctgcgcccctgttcataccaggcgcgtcccatttcgccgccgccacgaatgtgcggcacggcgtacagcacaccgcgatccaacatgctcagacgagagaccgagaaccccggatcggaggaaatctcgtatgcaccatatccggtaatgaacatcggcgaatcctgcgccgggcaatcgcggtgccagacgagggaaacaggaatgcgttcgccgtcgcgcgcggtaatccacacacggcgttccatgtaatcgcgtggattgaagtcgcccagcacggtggctcgcttcagcagcgcatcttcgccggtggcgggatcgatttcgtgcagctcgcccgggcgggtgtagctggcgaacgagtagcgcatgcgcggcgcctcatacgaggggttgccgccgacgccgatggtgtacaagcgccgggtctcaccgggcaggtggtcgtcgctggcaccatcggaagatgacgtgtgatccgtgggggcctcatcttcggtccacaagatttcgccatgatcgccggtgaagttttcgcgatcggcggcgaccatgtcccagtcgtcctccagggcaggcggcagcagttccgtaaaccgccacggccgtccggccaggaagtcggcggcggccgcgctcttggtcatgtatgccacgtgcggctggccgtcggcacggtagctcagggacacaaagttgcgatgcaacgcgataccttcgatgcccagaccgtgggcaccttgcaatatcgccggattggaggcgttgaagtatgcctcggtaatcggcttatccggctcaccatgttcacagccgtacggcgacccggcggcaatgcacacgccttcgccgagtcggtacggcggctcatggccacgcatgtcaatgacgtcgatttcgaaattcggattggcggcgttgtggtagaccacggcgagtggcacatccgcaccgttctcccccgcgccttcaaaacaggcaaagctcacatcatattcaatatcgttctgacgtggaatgaaggcttggaattcgccttcaggcgtggccaccggcagcatcaacacttcggtggtggttttggaaccggtgccgatcacgatattgcgctcatcaaaactgatgccgacgcccacccagaaccgttcatcggtttctcggtacacgcacacatccgattcgaccgccgtgccaacacgatgccgccacacggcgagcggccgccaggaatcgtccaattccacccagaacacccattggccgtccggcgtgaagcatgcgctgccaatgccggtgaactgttcgggcagttcgctgaccggctccccggtctccagcccggcaaggtcgcgaatgcggaaatcatatcgttcgtctcccgcaacatccacgccgtacagcatccaacggccgtccttgctcagatccaagccgccgagccggaagaagtcatgcccctcggattccttgttcgcatcaaaaacgacctgttcaccgggcatggagccgggcgcgccttgcggatccacgaccggcgggtcccagtcatcggcatcgcgcacggggatgcggcattgcacgccatactgtttgccctgctgcgtgcgggtgaagtaccagtaatcgttgatgcgcgtgggaacagacatatcggtctcttccacatgcgatttcagctcttcaaacaacgtatgccggaaatccgccagatgcgccatgcgacgctcgcagtactggttttcggcagctacgtagctgcgcacatcatcggagtctttgtctcgcatccactcgtaatcgtcgtcgaaaacgtcaccgtggaattcgcggcgcttcggctcgcgcttggcgtaaggcggcatcgcggccgcggcgtttgtgctctcgtcagtcataccacgcgattataggcgaggcaccacaccaggacgcattcggcgttcatcacgccgcgcttatcgcaacaccgtcttcagatacggcagcatggtcttcagaatgttcgagccggtggtgccggtgaatactggtacatcggttaccggagtcggctgggtcgaggtgagtcccgtcaccgacgccaatccggttgattcgcgcgggctcaactcacgaatgacgatcgccagtacacgtccgggatatctgcgggcgatggtggcgtacgtggtcgggtctttctgcccgtcatcgcccaccagaatgaacttcatgtccgggaagtcggccataagttgttcggcaaactcaagtttgtgctgggggccggtgggcacgaaggtcttgggcctcgggtcgaggtcgcgcagcagcagcgggccttcgggaaaaccatggtcagtgatgaagttgcgaatcgaactctccacattccagggcgatgtcgaaagatagaagaacggtgcgccggggaacaagtcggcgatgcgggtgaacagcacgctcatgcccggcacggaggctttcttcttggggtcgaggaacagcaggttgtacgcggccttccatggcaccggggcctgtgtgatcatgatggtgtcgtccacatcggagatgatgccgactttggcactggcggggatggtgtacaggttggcgctcacgggtttgcggttggccacgctgtaggagacgcgatggataccgggcaccagacgatgctcggccacgaggtcgaggtatccggcggaatcggagatggcgtattcgctgccgagatcgcgcgtgcggtccaccttgtcatagacctcggagacgccgatctgcacggtgttgagcggcgtgtcatcaatgctggcctgcacgtgggtgcgcggcgcggatacggcaagcatgccgcggatgccgcggatcagttcgccggattgcgcatgcttgggggcgtataccgtgcggcagatcagacgcgagtaatcaccggtgccataacccacatagggttccactcgcggataccagccccattggcgcaccacctgagtggagatgtgtgaccatacgccgaacacgcgggtgatggcacgacgtatgaatcgggtgatcggcggcttgacctcgatgcgctcacgcttggagggggtgtcgaacgtcgtggcagccttgcgtgcgggaatcggcacggtgggcatgtcatcggaatgttcagcattgctggcattgctggcattgtcggcgccattggcggatgccttgacgtcagagactggcgcggtggcggacagcgctgcattgcgagcagcagcatcccaaggcagtcgcttgcctgccgcctcaaaatcctcgcgtgggcttctcatagacaccaatataggccatacgcctcattttcttggcttccctccataagaggcacgatgcatataggtttgatgccacatactggctcccctcagggaggggagctatgggtggaactaccgcacgaccttctcgtattcgtcggcgctcagcagctccggctcatcgtcgtcaagctcgaccttcagcagccagccttcgccgtacggatcgccgttgaccacggacgggtcgtccgccacgtcacggttcacatacttgaccgtacccgccacggggctgatcaacggctggacggccttggaggattcaagctccacgatctcgtcgccggcctccacacgggcgccaggctcaggcaaatccacgaacacaagttcgccaagctggtcggcggcgtattcggttatgccgatgattgcggggtcgaccgaacggtccacccaagcatgctcctcggagtattcgaggtggtcgggaatgtcgaggttcagcggctgttcgttttcgttgtcatcactcatagtcataagcttaacctatcttcgcggtccgtcacagctcgcgaccgagccattcctcaatcatgtagcgggcgatggtggcgcggcccggcgccgccatacggccggcgatgagctcggccgtgtattcgtcgcgtgtgacccatcgcgcggtcatggtctcctcgccgtccacatgcacgtcggtggtgatcgcatgtgccttgaacgccatcatcagcgaagccgggaacggccacggctgcgagcccaggtaccgtacctcgccgagcttgatgccggtctcttccatggcctcgcggcggcaggcgtgttcaaggttctcccccgcctccacaaatccggcggacaccgaatacagcctcggatccttccatgccgcgttgtgttgcagcagcagacggtcgtgcccgtccacgatggcggtgatgaccgccggctccacgcgcgggaacagcacacggttgccgtccgcctcgttggtgcatcgctgcgcccatccggcgagcgccggccggaccgccgcgccacaggtggggcagaaccgctggcggctgtgccagatgcttaaggtgatggcactggtggcttgcccagcctcgcgcgcgttggcgtgaggggcgaatccgcgcaggtccacccagtcgaaccgggtcacggcctgttgcagcagcgtgggcttcggggccaagggctgtacgggcgcgccgaccgaatcatcgaaggcatcgtccgcaccttgccctgccgaatccggtacaccgagcggcccggagattttggctgcggctacgccgccattgcccttggcgtttcccggctgccgtattccggcggcagcacctccgctgatgccgttcttgcccagcgcgccgtccacggtgccggaatcctgggtgccgagcacgccgccggcagcaccggaaacatcagcaatcccgccaacaccgggaacaccggcttccggcacgcgcgtgatatccacggcgaccacggattcgccgcgcgccccgacataggagccgaggaacatggcgaccgcttcggggtagcgtgccagttcggcggacacataggcgcccggcaacgtggcgagccgcattttcacgttctcatagtccacgagctcgccttggccgcgcggtacggcgacaa

SEQ ID NO: 2128 - DNA, 4859 bp, Unknown
  R51_24m  MAG No. k141_5579
ccggggataatctggccgatctgcttgcggtattcggccatttccttgaccagccggtaatcgccggcaatcagagccgtacggtagccggccatgttggactgcttggacagcgagtagagcaccaggatgccagctgccgaaccttcacacacatgtgaattcagggcacatggcgtggcggagagactgaatgcggtatcggaggcgggctcgttggattcggccaccggtgcggcaggcacagacgcagcagatgcagacgcggcaggcgcagaggacgaggctgtattgcggcgcaccgaacgccagtccatcaacgcatagcattcgtcggagagcaccacggcaccgatgcgacgggcagcagccacgatgtcggtcagccagtcagcggagatgacctcgccggaaggattacacggcgagttgatccagatggccttgacgttcggaatattcacccaggaatcgacgtcggtcacatcatcgactttgaccacggtggcgccggcaagttgggtaccgatttcgtaagtcgggtaggagacggccggttggacgaccacatcgccttcgccaaggtgcagcaggctggccatcagcgccacggcctccttggaacccacggtgggtacggcggcagcgttgatggacttcagatccacaccgcgcagttcgcggaaccatgtatcgatagcggccttaaggtcggcgctgccggcggtgaccgggtatccatgggcgttgggggcgtctgcgccggcaaccagcgcctgctggacactgctcggcaccgggtccacgggcgagcctacggacaggtcgatcatgccacccggcacggttttggcggtggctttgaagccggcgatacgagaccagtcgtatggcgacgaatatgcgtggaagcccatgagaacccctttcttggacggtatgttcctaagatacgacgaaccctcggccgtgatagaccgagggttcaatccgaactatgcgctgtgtgcagcgcttatccgcaaatcagcttactggttctgcggcggcagcgcggcgacctgttccgggtctttgccgattgggccattggcggaagcgccgcccaaatcgccgacttcagcgaagaagttgacagcggcatccttgtaccaagcccactcgtccggcagatcatcctcatagaagatggcctcggtggggcacaccggttcgcatgcaccgcaatcgacgcactcgttggggttgatgtacagcgagcgggaaccctcgtaaatgcagtcgacggggcactcgtccacgcaagccttgtccttgacatccacgcaaggctgagcgatcacatatggcatggaatcctccttaacaaatactgatacaagggtacgcgcccgttgggacgctcctcgctctcagccgttaacggccttatcggtttcggcggacagcgtttcggtcaggtcgcccttgccgaggcgcgcatgccagtagccgtagccgaagtagatggcgacgccgaccacgagccacaccacgaaacgaatccaggtgagcacggacaggttgagcatcaaccagaagttggccacggcgatgaggatcggaatccacgggtcgccgggcatcttgaaggcgcgcggcaggtcggggcgcttcttgcgcataatcgggatggagatggccaccagcgtgaaggcggacagggtgccgatgttgaccatgtcggagagcacgccgatgtcgaagaaggcggccacgagcgccaccaccgcgccgacgacgatctgcagagcggccggggtgccatgcttgccggtcttggacaggccgcgcggcagcagaccatcgcggctcatggcgaagacgatacgggtcaggccgagcaacagcaccatgaccacggtggccaggcccagcacgatgccgaagctgatgatcttggcggcccagtcggcacccaccagttcgaaggcggtggccagggaggggctgtcttgcttggcgagatcggcataggagaccatgccggtggtcaccacggccacgagcatgtacatgacgatgatgagcagcatgcccacgccgatgccgagcggcacgttcttgtgcgggttcttggtctcctcggaggcggtggccaccacgtcgaagccgatgaacgcgaagaacacgagcgccgcgcccgaaaggatgccgggaacgccgtacacggatggggtcatgccggtggcgaactgccacagcggctgggtcatcacgccggtgacggcggaggagccttccacggtggaggccggctggctcggcggaatgaacggggtgaagttggaggccttgacgtagaagaagccgacgatcaccacaaagaacacgatggcgatcttgagcacggtcatagcaccgtccacgcgggcgccgatcttggtgccgaatacgagcagcgtggtaaagaacgccacgatgatgatcggggcgatatcgatatggaaggagccgaacgccaggttggtgttggcgttccagcccatcaggcgcatgaaatcgttgaggtatacgccccaatatttggaaatcacggagccggccatcagcatttccagaatcagatcccagccgatgatccaggccatgatctcgccgaccgtggtgtaggtgaaggtgtaggcggagccggccaccggaatcatcgaagcgaattcggcgtagcacatcacggctgcgccgcacacgatgccggcgatcaggaagctgatgatcacggccgggccggcgtggaaggcggcggcctgcgcgcccaccgagaagatgccggcgcccacggctacggccacgcccatgattgacagatcccaccaagtcaggttgcgcttgagcttgcggccctcttcacccgtttcggcaatggtctgttcgacggatttcgtacggaacagttgcatagtgctcttctttttctctgttgtttgcgcaccgaatgcgcacaataccgacaatcgagtatagaagagcccgcgtgtcttgtctattaataagacttagagtccgcaatatatgggattaatatccaactccatcaatcaatagcgcgattacagcacgccgacgcagaccggttcgggcaccaagtccactccgaacgcgctcttgaccgcctgctgaaccgcacgcgccaaagctgcgatatcggccgcgctcgctcccccacgattggtcaaggccagcgtgtgctgcgtggatagactggccggcgcgtacgcatcgaccttatatcccttatggcagccggcatggtcgatgagccaggcggcggacgtcttggtgccgggagtgccgtcaggcagagtcgcgtcgaacttcggcgcatcttcgggcagggccgccgcttggccggcggtcagaatcggattcataaagaacgagccgcagctgtggcgattgtagtcgggagcaggcaggccgtcatcgccaacgggaacgccggcggcctcattgagggaggccagacgctccagatcggtcaggatattggcctcgcgcttggcggtggccatgtcgggcaaggcgtagcgagtgggatcctcaagcatgcccttggcggcacgtactgcgagcacggctttgcggatgtcggcggtggccatacggtcgcccacttcgacgccaagcgctttggcaagctgtccgtaacctaccgtgccttcggccgagtgggtcagggcaaaggtgacggagagcaccacgtaacgtggcgtcgggaagaatcggtcggccggctggccgggaccggcgtacatgctggccttcagtgcggagtatcgatagccgaatcgaagatcggcgggtgtgaggtcgcgcgttgttttggtgtctcgatcccagacttccaccgattcgaccgaagtggcgacttcctgtccgtaggcaccgatgttctgcaccacggaagcgccgactgtgccgggaatgccggacagtccctcgacgccctcgagcccgagctctacggtgaaggccacgaaatcatcccaattggcaccggcctcggcattgacatgcacggtgcgatcctcgccctctaccggtgcagcctcgtccggcacagtgatgaggcgtcgggcgtctcgaaccaccacgccgtcaaaaggcttatcggaaacaagcaggttggagccgccaccgataacgaccaagggcaggcctttggaatcggcatcctccacggcttcgatgagccccacgcgcgtggtcggctcgatgaaatgggcgatggggccgcccacgcccatggtggtgatgtctgcaaagcttgtcatgacttcctatcttagtggcgcaggtgcgatatcggggcaatcatcggctgaaacggcagaacgcccgcgaggggttcgttcagacgcgggatttctgccgtttctcacgcgatgcggatactgattccgcaccctaccactcggctctggagtcaatacgcaaaaacccggccgaatgggccgggttttgtaaagctgtgatgcttgcgatcaacgagtctcgcggtgcacggtctgcttgccgcagcgcgggcagaacttcttgagctcaagacggtcgggcgtattacgacggttcttagtcgtaatgtagttacgctccttgcactcggtgcaggccagcgtgatgcccggacggatgtcggcgctcttagccattgtcattcacctctgtgttcttaggtatagtgcgcgcccaccggttagcgggcgcgatttgtagcgaggaagaggctcgaactcttgaccttacgattatgagtcgtacgctctagccagctgagctaccccgccagagagccccgagtgagaattggactcacgacc

SEQ ID NO: 2129 - DNA, 16724 bp, Unknown
  R51_24m  MAG No. k141_5592
ggccaaggcgttcggcttcgaccggccgaacccggtcaccggggtgcctatcggcctcatcgcccccggcttcgccgccgatttcaaccttgccgatccgaccgattggacggtcgaacaggtgtggtgcgcgggccgcaagctcaagtagcagtaggccgaccggttgacgaatggaaagcattcgtctacaagcatgttcaaatggtgacatgatagcatgttcatctcaccatttgaacgttattcacgtcgtaatacaagaatccgtaatactgctcgataccgcataaaaccggccatggtcgccacaagcgaaacataagtcgatggctgtggaaacgcaggagtaacacatcctcaccatagtcaggcggtaatccacgcccgcagtgatggcgtggaaacaagttatgagagaggattcctgttgaattccaagaagattctggccgccgccgtctccgtggccgccatcgcatccctgaccgcctgcggcggtgtgaaggatgacaccaccgcaggcgccgattccggcaacgccatcaccatcggcaccaccgataagatcaccagcctggaccccgccggctcctacgacaacggctcctacgccgtgcagatccaggtgttcccgttcctgtacgcccaggactacaacacctccgagctgagcccggacatcgccgccgatgacggtacctggaacgatgacggcaccgaattcaccgtcaagctcaaggacggcctgaagtttgccaacggcaacgacctgaccgcttccgacgtcaagttctcctacgaccgcatcaagaagatcaacgacccgaacggcccgagctccctgctcgccaacgtcgaatccgtgaccgctaaggacgacaccaccgtggtgttcaaggattccgtgcctttcgacgtgactttgaagcaggtcatgtccagccccgccggcccgatcgtcgatgaggataccttcgacgccgacaagctcaccgacgccgacaccatcgtctccaagaaggccttcgccggcccgtacacgctgaccgccttcaagatcaacgagtccgccgcctacgctaagaacgactcctacaagggcctgaccccggccaagaactccgccgtgcaggtcaagtacttcgccgacgcctccaacctgaagatggccgtccagcagggccaggtcgacgtggcctaccgctccctgagcccgaccgacatcgaggacctctccaaggactccaaggtcaaggtcgtcaagggcccgggcggtgaggagcgcttcatcgccttcaacttcaagattcagccctacggtgaatcccagcccgacgccgacgctaacaaggccaaggccgtgcgccaggccgtcgccaacctcatcgaccgcgaagagctctccaccaaggtctacaagggcacctacaccccgatgtactccttcatcccggacggcctggccggtcacgatgacacgctgaagtccgcctacggcgacggcaacggcaagccgagcaccgagaaggccaagaaggtcctcgccgatgccggcgtcaccaccccggtcgacctcaagctccagtacaacagcgaccactatggctccgcctccgccgacgagtatgcggccttgaagtcccagcttgaggaaggcggcctgttcaaggtcgacctgcagtccaccgaatggacccagtactccaaggaccgcgtggtcaccgacgattccgacggtgtgtacccggtctaccagctcggctggttcccggactactccgacccggacaactacctgtccccgttcttccgcgacggcaacttcgtgaacaacggctactccaacaaggaagtcaacgacctgatcgtcaagcaggccggcgagaaggatgcctccgcccgtgaggacatcctcaagcaggtccagaaactcgagaccgaagacctctccaccatcccgctgctgcagggtgcccaggtcgccgtcaccggcacctccgtgaagggtgtcaccctcgacgcttccttccgcttccgctacgcctccgtcaccaagggctgatccagcatgagctcccctctttgagggggggagctgtctggcgacggcagactgaggggagcccaactcgtatgactcccctcagtcggcttcgccgccagctcccctcggagaggggagcctttattgctttatataccgattaccaacaccaaggagcatcgcgtgtcagacagcgccacagcgacctccagcaccactccggcgaaagccaagacgaagaagaaccgactgtcaggtagtttcttccgcttcgtgctgacgaggttcctcctcattatccccaccgttttcattctggtcaccatcgtgttcttcgtgatgcgcgccaccggcgacccgatttccgccgccctgggcggccgcctgacacccgccgaactccagcagcgcatccacgcggccggctatgaccgcccgctgatcgtgcaatacgtcgactatcttggcggcctgctgcacggcgacctcggcacgacgctgaccgataaccagccggtgatcagcatccttacgcactacggcgccgccacattcgaactggccttcctcgccctgatcgtggcgctgatcgtcggcatcggcctgggccgactcgccgcccgcaaacgcgaccgtgccgccgacgccggcatccgcatcttcgccatcctgtgctacgccaccccggtgttcttcctcggcctcgtgctgaagctcatcttcgccgtctggctcaacatcctgccagcctccggccgctccgacctgaactccgaaatgcagttcacccgtctggtatcgccgaccggcttctacatcatcgacgccatccagctcggcgacatgaacgtgctcgtcgacgtgctgcgccacgccgtgctgccggccgtcgccctaggcctgctgaccgccggcgtgttcatccgtctggtgcgcaccaacgtcatctccacctacaattccggctacgtcgaggccgcccgctcgcgcggcgtctccgaaaagcgcctgctcaacaagcacgcctggcggccggccctgatcccgatcatcaccgtcatgggcatgcagatcgccctgatgctcgccggtgcggtcctgaccgaaaccaccttcgaatggaagggcctgggcttcatgctgtcccagtacctgaaggcccgtgacttcgtggccgtgcagggcatcgtgatccttatcgccatcatcgtggccgtcgtcaacttcctcgtcgacgtcatcgccgcgcttatcgacccgagagtgaggtactgagatgaccaccgcatcctccgacaagatcaccgtccccggtgacgaccgcctcaccaagctcaacgtcagcaccaagacgccgttctggaccaagattccaatcatcaaggaactgcgcgtggcggtcggctggcagaagggcatgctgatcaccggtctcgcgatcaccgcgttcttcctgctcgtggccctcttcgccccgctgatcgccccctacggccacgcccagatcaaggccgccgacggcacgtccttcccggcgcaggccgcgccctccgccgaacacatctggggcaccaccgccgccggattcgatgtgttctcccgtgtggtgtggggtgcccgcaccgccgtcatcgccatcgtcgtggccgtgctgctctccatcttcgccggcgtgctgcttggtctggtgtccggctactacggtggctgggtggaccgcatcctggtgatgatcgccgacgccgtctactccttcccctcgctgctgctcgccattctgatggccatcatgatctcccacggccagtccggcctgtggagcggcatcctggcctccggcatctccatcaccgtggtgtacatcccgcagtatttccgcacaattcgcgccgaagtgatccgcatcaaggaatccgcgtatgtcgagtccgcgcgcgtggtcggcgcctccacctggcgcatcatgaccaagcacctgttcaagaactccacccgcacgctgccggtgattctgacgctgaactcgtccgaagccatcctgaccctcgccggcctgggcttcctcggcttcggcatcgagccgaccgccgccgccgaatggggctacgacctgaaccgttcggtttccgacgtgaccgccggcatctggtggaccgccgtgttcccgggcatcgccatcgtgcttatcgtgctcggcatcacgctcgtgggcgaatcgctcaacgatctggccgacccgcgtctgcgcgcccgcaagtccgccggcgaagtggtcggatcgatcgaagacacgtccgtcgacccaaacgagaagccgtccgcacgcaacgaggtgatcgccgaactcgacgcgaacgtcgacccgccggccaccgtcaccgaccatgacccgaccatcgtcgcctccgaatggaccggcgaaggcaagccggaaggcaaggagtgagagatgagcgaagacaacaagaatctcgccgatatcaaggacctgtccgtctccttcatgaccgacgccggttccatcaaggccgtcgaggacgtgaacttcaccattccgcgcaagaccgtggtcggcgtggtcggcgaatccggttccggcaagtccgtgaccgcgcgctccatcatcaagctgctgccggagacggccaccacctccggtgccgtctacctgtccaagcgcgatggctccgattcgctggacgtgctctccctgagcggcgaacagctgcgcgaagtgcgtggttccgaggccgcgatggtgttccaggagcccaattcggtgctgaacccggtgtacaccatcggctggcagattgaagagggcctgcgcgcccacggcatgaaggacaagaaggaactgcgcgccaaggccatcgacatcctgaagaaggtcggcatcccggatgccgaaacccgcgtggactactacccgcaccagttctccggcggccagaagcagcgcatcgtcatcgccatggcgttggtgctgaaccccggcctgattctggccgacgagcccaccaccgccctcgacgtgaccgtgcaggccgaaattctcgacctgctgcgcctcgcccgtgacgagttcgacgcctccgtgctcatcatcacccacaacatgggcgtgatcgcggacatcgccgaccaggtggtcgtcatgtaccgcggccacgtggtcgagcagggcgacgtggagcagatcttctaccatccgaaggacgactacaccaagcgactgctgggtgccgtgccgcgcatcggtcagaagctggtcgtgcgcgaccgcgagggcaagccgatcgagcgcaaggccgattggcgcgaacagccgatcgccgttgaggccaagaacctgaccatcacgtacccgggccatctcatgcagcccgacttcaaggccgtggacggcgcgaacttcaccatccaccgctccgaagtgctgggcctggtgggcgagtccggttccggcaagtccaccaccggccgtgccatcgccggcctgcagaaggtgtccggcggctccctgaacgtgcttggcatcgagatgaacggcgtcaaggagcgtgacttcaagcccaagcgcgcggacattggtttcgtgttccaggatccgggctcctcgttcaacccgctgatgaccatcgcggagaatgtggccgagccgctgctcgtgcaccacaagtacggttccgtggccgaggccaagaactatgtgggcgacctgctggagatggtccagctgccgcgcgcctacatgaaccgtttcccgcatgagctgtccggcggccagcgccagagggcgtctttggcgcgtggtttggcgttgaagccgtcgctgctgatcgccgatgagccgacttctgcattggacgtgtcggtgcaggccaaggtgttggagctgttcaagcgactgcaggcggaaatcggcttcgcgtgcctgttcatcacccatgatttggcggtggtcgatatgctcgccgaccgcatcatggtgatgcataagggccagatcgtggagcacggcgatgccgaccagattatgcagcacccggagaacccgtacaccaagaagctgctggcctccctgcccgtgcccgacccgcgcgaacagcagcagcaccgcgcccacctccacgagctcctagcccaagaggcgtaatcgcatagcattggagctccctcgtcagagggagctaactttatatccgctagtactgctgcccatcgaactggaacagggcgtgggcgtcgccgtgctttttgttctcgatgtaagtatggaacagctccagccgctcgctcgtgctggccgccaggggagtgggcaggtcatccagatcgaaccagccgacgctgaggctttcctcgtcgcccacgaacggctcggcattgccgccgggcttcagggcgcacaggaacgaatgatccatgtacatggtgttgtcgccattggcgtaggtcagcaccttgtttgacgaggtgacggccaccaaatcggtgacgatggcatcgatgcccgtctcctccttgatttcgcgcaccaccgtgtccgccggctgttcgcccggctcgttgatgccgtagaccatcgcccattcgcccgtgtccgaacgacggcccaacagcagttgaccatgttcgttcagtacacaaccggtcacgccattgagccatagcagatcatggccgatcttcttacgcaattccaacacaaattccggagtaggcacattgcctccttagtagaaaaaaggagctccctctgatgagggagcttaagggttacttggcttgggcagcctgcttaatatggtgcgcttcgcgcatgatttcattttcctcgcgcttgtcagcgttcggcgtcgcctacaatcagtccaccggactgattgctttacggctccgcatccacgcttcgacgtcgtcgatctgcttcgggatgccggcggaaatccattcggggccgttctcggtcatgagcacgtcgtcctcgatacggatgccgatgccgcggtattccggcggaatcagcagatcatcctcgcggaagtacagaccgggctcgatggtgaagatcatgccgggcgtgatcttcgcgccctgataggactcatagcgggcctgcgcgcaatcatgcacatcaagacctaggtggtgggccacgccgcaggcgagccaacggcggtgctgctggccttgcggggacagtgactcctcgacgctcaccggcagcagaccccaatcgtgcagacgctcggcgatcacacgcatgcaggcgtggtggatgtcggaataggtggcacccggcttggcggcttcgaaaccggcctgctgcgagtccagcacggcctggtacagacgcttctggaagtcggtgaacttgccgttggtcgggaaggtgcgggtgatgtcggccgtgtacagggaatcgacctcaacgccggcatccaccagcagcatgtcgccggtcttcaccacaccggtattgcgcatccagtgcagaatcggggcgtgggggccggaggccacgatggagtcgtaaccgatggcgttgcccagctcacgggacacggcgttgaacgcgccttcgaggatacgctcggaacgcggcttgtcgagcgcggccggcagtgcggagagcagacggtcgaagccgtgcttggtggcgtccacggccttgcgcatctcgttgatttcgtagccgtctttgaccatgcgcgcctcggcggcgaactcgtgcagcttgtcgtcggatgcggagttcttgtccggatcggcgaaaccgttggcctcgcggatggactcgaccatcgaggtgatttcgggatcggtctcgctgaccacgcgcacacgcacggcaccggcctcggcacccacgtccttggacagggcgtcggccagctgggcgatgtcgtgggtctcgatgccggtcatcgcctgcatctccttgaggccagcacgcgggccaacccagtattcgccgtagtgggcggacatgaagaagtcctcggtggagttgtcggcgcgaggtgccacgaacagttccggagtgtgcgtcttgccggcggcggcttcgggggagtcggggtcgaccgggttcaggaccagcacggcgccggcctcgtaatcggaacccagaccggtgtagtaggcgaacgtggtgtccgggcggaacatgtaatcgcaatcattgttgcgcaccttcggctggccggccggaatgaccagacgctcgcccgggaaggctttgcccagcgcctcaaggcgggctggcgtgaacttggaggattcgagaggcttgatctccggatcatcgtcggcccagccggacttcataaactccttgaatgcagccgactgcgggcgcagcgagcggttgttcacacggtcgctcatcgactggttcgcgcccggcgccgtagcgcgctcctcggcctcatattccttgtccttggcggtgatcacttcacccattgccactctcctgtatgtagttgttgtcgaatcatcgattcccacctcatactagtcggctttatgcgatgtgccacgattgacggctgacggtaaaaccaagtacggaatttggacggtcttccggacatgcccatatggcgagtgcatcgggctggaatgcgggcccgtttattgttctcggtagggaaggaggggcatgggctggagcttgccgattgatattggcatattttgcgggctgaatccatgtgaacccatgcgatgaaggttcatcgcatcacgggacccgctgctctgcggatgcctccatctggggcactctggctttgagcagttttacccgcagcggagtgcgttcgatgacgtcggcgtatgtgaaatggacgatttcggtggcaccggctcgtttcagtccctcgtcgcgtgctcgttccttggccaccacctcctgaatgctgcggttatcggtcatggctgggtccacgtatttttgtgtgccgtcgtattcggccactatcacgcgcccgtcatcgagcttccatacgaaatcaacgcggtgctcggtattcgtctgcgggtcggtcaccgttacctgaatacgcggcgtgaggaagcgatcctcgatgatggtgcctcgcgcgagggattctccaccattctcgctcctttcgtttgcatagcgcagcaggcggaatactcgggcataatcgattctccattgaacgcagtcggcggctatctcttccttggttattcccttggcaagggccgaatcaaagatcggcaacgcaaaccgaaaatcaaggtctatagcggcctcgaccaaggttctagccggtgatatcagggataggccggaggcctcgtaatgtgtcttcggattgttcatatcgggcatatagacatgtcgtaagcgctgatggcattgacgagatccatgatcggaagtcacgatggttatgcagccatcatgcaaatgccattgatgttcgaatccataagcacttactgccaccaagccgccaaaaacccactgaggatgctcttgcgcaagagcgcgggccatatgcaacgttcgctccggcggcgtcaaaccatcccagtatgcggtatttgcataaagactgggaatgccgtcatacactttcaacaactcgccactctgggcacggcggcgtagagcggtctgttccgcttcatttcttgaatagacgcatctcagctcattctgcgcggctgatatgagcgaggccactgctttgtgtgtcttcatgacgtcgagcgtagccggaacgaagcagcgtaagtatgaatttcagccattgtggttctagcctcggagcttggctgtcttggagtgagatattcccgataatttcaaggtattaggccgctaattcggaatagtggataacatacaaaacttatccaccatcagtaatgtcattcgaacaacgtgctttggggattcgaacaagatatcatcggcgaaggcggatgtagctggtagagggcggcgaattgacggttaacggtgcttatgctttgtacgccgtcggtgctggttcagatattggctggcttctgtctgagtgtggaatctagcgtcggcgtgagtccaatggttgtatcgtggccgacgatttgctgcaatttattggcggcatagatccagggcttggacggctgccgacggtgagagcagtcataacagtgaatgagcctctgcgagttcaaaagatgatgtagcggacgtttgtgagagtcgtttccggggcaagacatggtcgattgacgatgttgaaatttctcagcgacggcagaatggcatgccttggcgaggagacgacactgagaggcgatggagtcgggattaatccaggttttggccagctaccgactcgcaagagcatcatagcgtcggtgtgccgccagaagctggcactgtaccgacgctgaatagcatcagcgtcgccggacatacaagttttggattgcagccgactaagaatgggatgccgacggcaagagccgcattgcaactatatgagatggcttcactgtgcgcgctgcaggaaaaggccgcccgcgcggcggcgacatatgagacggtttcactgtgcgcgcacgataaaccaccccggcggctaggatagagggaattgagggagtgcggctccacgcgtgaaggcaagaatcccgaaccatgcagggcaaacctgtgcgaggggagcttcttgcgcatgcggaagcggaatatatgcgggcatgcgtagacatgacgagaatggcacgaacacgtaagcggcatacgcactccgaacggttcaacagcaacacgagcagaggtcagaagaggatatgtcattcgagcatccgaatcggaacaacgagagcatgcgggacgtcgaactggacatcatgagccgcccgccggagcataacaccaccaatctggatctcgaccggatgaacctgatgctcgacatcctgggccacccggagcagtcgttccgcgtgattcatatcaccggtaccaacggcaaaggctccaccgcacgcatggccgaggccatctgccgcgcctacggcatgcgcaccggcctgtacacgtcgccgcatctggagaagatcaacgagcgtatcgccatcgacggccagcagctgtccgacgacgatttcatcgacatctgggaccagaccaaggatctcgtggccctggtggacgccaagatggaggagcaaggcaagccgaagatgagcttcttcgaggtgctcaccgccatggccatctggaagttcgccgacacgcccgtggacgtggccatcgtcgaggtcggcatgggaggcctgtgggacgccaccaacgtgctcaacgcggatgcggccatcatcggcccggtggacatggaccacatgcagtggctgggcgacaccgtcgaacagatcgccaccgagaaggccggcatcatcaagccgaactgcaccgccatcatcgggcctcagccgcatgaggaagccgtcatgccgattctcaccgaagccgccgaacgcaaccacgccatgctcgtgcgcgacggctacgaaatgaccgtgtccgaccgtatggccgcagtcggcggccaggtcgtcaccctgaccacgcccaacggcacttacgagggcgtgccgatcgccaagttcggcgagcatcaggcccataacgcgcttgccgcgcttgccgcctctgaagtggtgattccggtcaatggcccgctggacggcgacttggtgggcgaggcgttgagctcggtcaagattcccggacgcatcgaacagatccgcacctcaccgaccatcattctggatggcggacacaacgtgaatgccgccgaagccctacgcaaggccatagaggaaagctacgacttcaagcagctggtcggcgtggtcgccatgatgcgcgacaagcaggtcgaggaatatctgggtgttctggagccgatcctgagctccgtggtggtcaccgagaactcgtggcgcgagcgtgtgatgccggccgatgagctcgagaagattgccgtggacgtgttcggccgtgaccgtgtgatcaaggaagcgaacctgcccgacgcgattcaggctgccgtcaacatggtcgatgccgaggacgagctgggcgtgggctacggccacggcgtgcttatctgcggcagcttcgtcaccgccggcgacgcacgcctgatgcttgaggagcatgccagccccacgatgaggcaggccatggccgtccatcagccggcggtcgacccggacgattcggatcggccggcagacaaggccgaggatgaggccgccgacaacctcgaggattcggtgagcccggacgacttcgacgtgttcgacgtcctcggcctcggcaaggaacaggccagtgacgccggtaacgccggcaccggcacggtcagcgccgacacaggcgccgtcaccgacgattccgccgacgtccggtaacccgcatccaaggcacatcggatacccggacgcccgacatacggaaaacagtctcacgccatgtatctcaaggaactcaccctccgcggattcaaatccttcgcctccgccaccacgctgcgcttcgagcccggcatcacggcggtcgtcggccccaacggttcgggcaagtcgaacatcgtcgacgccctgacctgggtgatgggtgagcagggcgccaaaaacctgcgcggcacttcgatggaggacgtgattttcgcaggcacgtcctctcgcctgccgctgggccgtgcacaggtgagcctgaccatcgataattccgatcacacgctcgatatcgattacacggaagtcaccatatcccgcaccatcttccgcaacggaggctccgaatacgcgatcaacggctcgcaatgccgtctgctcgacattcaggaactcctctccgataccggtcttggccagcagatgcacgtgattgtgggtcagggacgattggatgcgattctgaaggccgacccgtccggccaccgcgcgttcatcgaagaggccgccggcatcctgaagcaccgcaagcgcaaggaacgcgcgttgcgcaagttggccaataccgaaacgaacctgagtcgacttgacgatttgctgggggagattcaccgccagctcggccccctcggacgccaggcacgcatctcccggcgcgccgacgcgattcagatatccgtacgcgacgcccaagcacgcctgtatgccgaagacgcccaacgttcgatgagccgccgcgacacggtacgtcaagagcttggcgatgtgcgcaaccagctggccgtcgcccaacgtgaactcgcccacgtcaaagtacgcatcgaacaggtcgaggcgttgagctctgaatccagtccggccatcgccaaggccaaccaatactggcatgaattctcacagacccgtgaacgactgaacgcgctcgcccagttggccgaagagcgcagccggtcactcaccggccagatcgtcaccaacttcggtgaggatcccggcatgctcgtcaaacgagccgaggaactggagtctcaggccgcggcacaaaccaaggccgtggccgatgcacgcatcgcactcgacaaggccaccgaggaacgcgccgacgacgagaagaagctcgcctcagtccgccagaccttgacggaactgcgcaaaaccgcacaggagcgcgatgcgcagatcgcccgactgcgcgaactcatcgcccgcgaggaatccgccgtgcaactggcgaccagccgcgccaaggattatgactcccaacgcgacttgctgacttcccagcgcgacgatgcccagcaacagctggacgcattgcgcagcgaagcggactccattgccgacgatgacggtgccgcattggacgccgcgcgtgcaacgctcgccgaatgccgcgaacgactgaacgaactcgccgataagcagcgcgagatacagtccaagatcatctcgctcaaatccaaggccgatgcgcttgccgacacgctaggcagccgcaatgcctccggatcattggaacgcgacacggacgtggcctcgcttggccgactcaccgacttcatccatgtggccgaaggctgggaagaagccgtggcccacgcgctcgaccagtatgccagcgccatcgtggtacccgaggcaggcaacatgttgcacgccctcgaacgcgctcgggaagataagctcggcaaagccgtggtgctgaccgcgagcattgccggcgatcccgccacagagccaggcacggagtcggaggagagtagcgccgagaacacggcggccgccccgcaatcgggcaacgcgctggcagcactcgtcaccgcgaacccggatgcaaagaacccggcacaggccgaagctgtcgtgcacaccgtgcgtctcctgctggctgatgtagccatggccggcaccgccgacgaagcacagcacatcgtggcatccggcgaagccatgcgggccgtcaccaagaacggcgagaccttcacacacggcgtggcggcggtcggcggctcttccatctctcaatcggacctgtctctggccgcccgtcgagacaaggcattggcacaggtcaaacagttggccgcccaagacggcggaatggctgagcaagtggccgaggccaaagccaaacgcgatgaagcggcccgactcgtcgaccaggaatccgccaaacgcaccgaagcccggctcaaagcccaacaggcggagaaatctctgaaatccgccacagaccgcgtcgcatcgttcacccgtcagctcgagcagctggataggaaaatcaccgagacccaagagaatcgcaacgagcatcagctcaagctcgacgatctcaatcgcgctttggcatcggcccggcaatccacagcggaacatgccgatttcgacgaacttgatgaacgtgaacgcacgctggagcgcgaactgaacctgactcgcgagcatgaggtcgccgcgaaaatcgcgtggaccgaagcaagccgcaaaggggagtcactgagccgacaggccgggctgctgcgggacaacgccagagaagccgccgaacgccgcgcccgcatcgaggcgttgaacgatcgcagatgcgagcaggccgcacacctgcaaggtgtggccgatgacgcgcgagcagtggccgccatggtggagcatacgctgcatgacgtggccgccaaacgagacgagctgcaggccgccgcctccagccatgacgaggaactcaaggccctgcgcgcgcagcgcaaccagatcgagcccaaggtcaccgatctgaccgggcgcgaacatgccttggatgtaaaccgcgaacggttggccgccgaatccgggcagctcatgcaaaaagtgtccgacgagctcggtctcactttggaggaattggttagtggttacggccccgaacagccggtgcccgtgctggatgatgagggcaaccctgtgccgttggatgagacggaagctgaggctgggaccgaagagggagaaaccgggggagaggccggcaccaacggcgattccgccctctttaagaccgtgccgtataaccgtcaggagcagaagaagcgtctcgataaggctcgccgcgatctggccgcactcggtaagatcaaccctttggccaccgaggaattcgaagcgcttgaggagcggaacaagtatctcaatgatcagcgcaacgatgtggtcaaatcacgtgacgatttgatgcagctcatcaaggatctcgattccacgatggtccaggtgttcaaatccgcgttcgacgataccgccgaggcattcgagcagatgttcgccacgctgttcccaggcggcaccggacgactgcgcctggaaaacccggaagacatgctcaccaccggcgtactggtcgaggccagcccggccggcaagcgcgtcaaacagctgagcctcctgtccggcggcgaacgttcgctgaccgcgctggcgctgctgttcgcgattttcaccgcccgccccagcccgttctatgtgatggacgaggtcgaggccgcgttggacgacgtgaacctgacccgtttgattaatgcgttcaatgagctacgcgcccatgcgcagctcatcatcattacgcaccagcaacgcaccatgtcgattgccgacgcgctttacggcgtaaccatgagagccgatggcgtaacagccgtggtgagtcaaaaactcgaacgataaacgaatggttcccgctgacaggaactggtaccacaggtgacagagggcggtccatatcgaaagaccgccctcagtctcgcttcgttcgacagctcccaccagcgggagcggggaggtattagcgcaatgccttgcgcacgccctgtacagtctgcagcgtcttgtagaagaccttcttgatgggtacgtcgcgggcgggggccaccggggtgatttcctcggtgaacttgcacttgaactcgttaaggcccttgagagacggcgcgaagtcggagccgatgcccatgagatcgtattcagtaataccctgcgagcctaggatgcagcattcggaatacagcagcttgtcggtcacatgcagacgcataacctcgttgcgcatgccggcatagtagcgcaccgcatgtgtgccgttcacggtgacaatcgaccatgccaccacacggtcttcaatacgtgcggcgaacac

SEQ ID NO: 2130 - DNA, 2555 bp, Unknown
  R51_24m  MAG No. k141_5613
ccctcaaaaaacctcacccctcatcaaaccctcccgggtacccgaccaccacaacaggcaatcaggcgaggaatgaactggcaatcattgactataaagaagtagtacaaacacgctcttgagttctcaaaccaccaccacaccagcaagacaggaaaccaaccagaagaaggaacccgccgcgctgagcggcaacaggtgaataacttacacgcaaccacgccacaacgcaaatcaaagcgcacaagaacccaaggaatcggcataacagcgcggttccttcggcgtgtcgcacagagcccaatttgctctgatagggctagcgtaacccctcgaatgtttccggaaaacatcgaatccattattcggctggcgtgtcgcacgagttttcggactgtcagctccatgttcatcgttcggcaaccacaccaccggcgcacaatcaatgcatggcaacaacgctccatcatcggatttcgttcatgaatcacgggtatacctgtagttatgaccaagaagattgctgtattaaccggggcgggcatttccacgtccgctggcatccctgatttccgcggtccggacggtgtgtggaccaagcatcctgatcaaatgagcgtttacgacatcgatctgtttctgcgtaacaaagaagaccgtgagtactcctggcgctggcagaaggaatcaccagtatggaacgcacagcccggcaccgcgcataaggcgctggtcaagctggaacaagccggcatgttgacgctgctggccacgcagaacttcgatgcgctgcatgagaaggccggcaacagcgacagcgtcatcgtgaacctgcacggcaccatcggcacctcgcattgcatgaagtgccatcaggaatatgccacggcggacatcatggcccgtttggatgaagaacccgatccacattgccatcgcaaactgaagtatcgtggcgatatgccatgcaatggcattatcaaaaccgatgtggtgtatttcggtgaggcactgccggacggagcgatggagaagtcgtacagcttggccaccaaagccgacgaactatgggtaatcggatcgacccttgaggtgtacccggcagcgagcattgtgccggtggccgcgcaggcgggcgtgcccatcaccatcatgaatatgggtcacacgcaatatgaccatcttgcgagccgcttgattcatgaggatatcgccgtcgcgctgccgaagttggtggacgagacgattgcggagaacaagtagtcctcagcataacgaaagcgccggtgggtggttaagcaactgatgattgttggttaaccacccaccggcgctttcgcgccacctcccgctagcgggaggtattggagcacacttctgcgcggcctcccgccagcggtattggaatcagtagatgcgcttgggctggaatccagcttccctgagtgccacgaggatgcggtcgatgtgctcggggccgttggtctcgaccgtgacgccgagagacaccgcgttggtgtagtggccggatgccttgaactggtcgtggtcaagctgaatgacgttggcgcgctgctcagcaagcagggtggccaccttgacgagctggcccggagtatccggcagctcgacctcgaagttcatgatgcgaccgcgggcgatcatacctttctgaatcaccgcgcccatggtcaccgtgtcgatgttgccgccggacatgatcggcaccaccacgtgcgggccggtggcggcggcgaacttgcgcgaacgcagattcagatgctccaacgcggccagcgagacggcaccggccgcctcgaccaccagcttgtgcttctcgagcatgagcagaatcatttcgttgatgtcgcgctcggtgacggtgaccagatcatccaggaactcgttgatcagcgcaaacggcagatcgccgggatgcttgaccgcgacgccctcggcggaggtgaccacatggtcagccggagacacacgacccgcggccagcgagtccttccatgccggggagccctccggaatcgcaccgattacgcgcacttcaggcttgaatgtcttgatggcgagcgccacgccggcacccaggccaccgccaccgagcggcacgaccacgtcagtgacgttcggcacgtcttcgaggatctccagaccgatggtgccttggccgcagatgacttcgtaatcgtcgaacggcggcacgtaaatcatgccttccttgtcggcgagctcagcagcgtgggcggcggattcgtcgaacacatcgccgtacagcaccacatcggcgccgtaggccttggtggcatcgaccttcagcggcggggtgatctgcggcatgcagatggtggccttcgcaccacgctcacgggccgcataggccacgccctgggcatggttgcctgcggatgcggtgacgatgccacgggcgatctgctcttcggtgagcgatgcgatcttgttgtacgcgccgcgaatcttgaaggaaccggtgacctgcaggttttccggcttcaggagaatctcatgaccggtcatctcgctca

SEQ ID NO: 2131 - DNA, 12511 bp, Unknown
  R51_24m  MAG No. k141_5859
gggtcaggagagcccgttcccggctcctgctcgctcagctcttttgccagctcatcgtaatcggtatcggtggtcaggtacttgagctttcgggcaattttctgctgttttgctttttgacgtccgcggcccatctgaccccctgcgattactgtgctgttcgattcatcaacaatagagagtaccactaatagtggcttgttcgttgtcggctcacacttttaccataaaaagcgtttatctgagccctatttaaaggattttcgcatgaccgacgagcagcaactgacagcggcaggcaatgagataagcgcgagcttcctcgcggccaaaaagcgttcggacgaaacgctcgccaagctggaggccaagccgtcgtccttcaccatgttgaccggcgaccgcccgaccggccggctgcacctcggccactacttcggctcgatccgtgagcgtgtcgccatgcaggagcgcggcgtcaacacgaacatcatcatcgccgactaccaggtgatcaccgaccgcgacaccaccgagcacatccaagacaacgtgctgaacctggtgctcgactacatggccgccggcatcgatccgaacaagaccatgatgttcacccactccgccgtgccggccgagaaccagctgctgctgccgttcctgtccctggtcaccgaggctgagctgcaccgcaacccgaccgtgaagtccgagatggaggcgtccggccacgcgttgaccggcctgctgctcacctacccggtgcatcaggcgtgcgacatcctcttctgcaaggccaacgtcgtgccgatcggcaaggacaacctgccgcacgtggaaatcacgcgcaccatcgcccgccgtttcaacgagcgttacgccaagaagaacccggtgttcccggagccggccgccattctgtctgaggcaccggagattccgggtctcgacggccgcaagatgagcaagtcgtacggcaactccatcatgctgggcgccaccgccgaggagaccgccaagcttatcaagaagagcccgaccgattccgagcgccgcatcaccttcgacccggttgcccgcccgcaggtctccgccctgctgaccaccgccggtctggtgaccggccgcgacccgaaggacatcgccgaggagatcggtgattccggcgccggcgcactcaaggcatacgtcatcgaatcagtcaacgagttcctggccccgcaccgcgagcgccgcgccgagctggccaaggacatggactccattcgtgacatcctgcacgacggcaacaagcgcgccaacgccatcgccgaggagaccctcgaccaggtgcgcgaggccatgggcatgaagtactgattttcccgccgctcgtagcaagacgccgtgtcagccccaactgggcaactgacaaggcgttttttgtattgcggcgtctgctgtgtcctatcttcacttcgaggggcggatttcttgttttccggaggtctatctccgcttcgaggggctgttgctcaagtaggcgaggcacaaaaacggcggaatgacgttggcgtgaatgggatttcatctgagattgagcgcatgaccagccccttgaaacggagatagacctccggaaaggctcaaatccgccccttgaaacggagaatcaagcgttagtaactctcaattcaaaaaacacaacatgttttccgtgcaacgcggctaccaagacggacctctggccacttcatgccgatggcttgcatcaatacgtacgctccccgcacagcaatgtcattacgacgtgttgcggcatagcgcgcatggcttccggagtatcggcggcgtatgggtcggcgtccaacaacaccatatcggccgggtcgccggatgcaaggcggtcacggccagtggcggtcgaggctgccagcgaggtgcgcacatcgaggcactgctcgggctggaacggctcgcggtcagagctttcggagccgaacacggcggcggaaatggccagccacgggtccagcggggccacgggcgcatccgagcccatgcgcagcgtggtaccggcgtcgtggagggccctgaacggataagggataccggccgggttggcccagaaacgggtgatgacgtcgcggtcatccatggcgtgctgcggctggatgctggccgtgagccccagctcggcgaaacgcgggatatcgacgggtttgagcatctgtgcgtgctcgatcgatccatgtgcgtgcgtggcggcgactgcgttgagcgcaatggtgttcgcttcgtcgccaatggcgtggcaggcgatgtcgaagccatgctcggcggctaggcgcatatagtcttcgatttgctgcggcgtgtagctcagcgtgccatacgtcggcggctcgatgcccgaatacggcgtggagcagtaggcggagcgggtgttgagcgatccgtccgagatgagcttcatggcgcccacatggccgagcccggcgctgcccggcagtgggttgccggtatgccaacccgcgtcaatggcggcttgcaaccgctcggggtatacaccagcgtccacgcgcaaaccgttaatgccggccgcgaaacgattgatccacgtatcgatgttttcggccatttcataatcgcggatgcccaccacgcccttgcttgcggcgtcctgttcggcctcgcgcagcagacggtcagtctcttcagcagcgcccggcaccttgtcgaaggcggtgtaggcgttgaaccattcgagttcaccgaccagaccggattcgtccacatgtacgccaagcctgcaggccgcggcggagttcacccatccgcagtgcatgtccgcgctggagagggccaccggctgttcgccggtcacggcgtcaattgcagccagtgtgggctgctcgtcgtcggcccacagcgagtgacggaatcgcatgcccaccacgaaggcatccgggtcaagcgtgccggcggcgcggcgctcatccagatgacggcgcaacatgtccatcgcttcggcggcggaacgggcattgatgaggtccagtcggcccagcgtcttagcccattgcgtgaagtgcgtatggcagtcccacaggccgggaataacccacaggccgtcggcgtcgatggtggtttcgtcggtgggtgcggcggccgacgttgggattgagacgctgccagaagcaatggcattcgtcgcgtatgccaacgatgtcgtatgcgccttagtctgcatcgtgccgtccgaagccgagaccgttccagcagggccgacagacgcaacaaccccatcgcgaagcaccacatccacgcgatcctgagaccccggaacaccggcattgacaatacgcaccaagctactcatacccgccatcatgccacctttgcatgaacgccatggagattcgttcaagctgaatcgcaccgtcggcggcgattcccgctggctgcctgcaaacccctacgttccatgtaattgcgggatgcctgcaactgcgatgaacgcccatagtttatccaccgacttatccacatttatccaccgaaaaattggggcggtagacaaggccggtagccggaccctacactgcgaggacaaagcgaacatcacgaaggggtgatcatcatgggtagctcaacggcattgaccgagctgacaatgcagaagtatcaacgaatgcagacgtgcgcagatgttcaacgacgaagcgcatggcacccaccctatgccctgacaacagcattggagcttttgtcaattgaagtaccccgcatatcaagcaaacacagaggccttgcaactacaaccattgttgcggttccacacgccaatgacaaacggcacattgtgggggtcaaagtggttgtatggcctttcccactagacacggtcataatcgagggacaattcacatgcacttcaccagcttgcacatgggccatgttctccgcgtatctcgaacttgaagaactcatcgttctcgctgattccatgatgcgacgagatcgaaggctctgcagaacaaccatcgacgccctttctctgtatctcgatgaggccgaggcccaggtgcgagccgacaaagagaatggcaccaattcgtatttgttccgcgggtataacaaatgccgtcgcgccctgcttttggcgcgcgcgggcacagattcctccatggaaacacgaactcgtttggttctcttgaaatacggtctggattgcccgcaggtgaattatccaatattcgtaggaaacaacaccagacccatatatctcgatcttgcataccctgaattcaagatatgcatcgaatacgaaggctctcatcatgccgggcaatggctgaatgacgcgagacgccgccagatgatcgaagacgctggctggaagtacattcaagtcaccaaattagatattggcgacgaagcgggagaagaggcccttgcccgaagagttgccgagaggatacaggaggttacgggcaaaacggtccagctcacgatgcggcaaaccacccagcaaattagcgatgtccgaaagctacgccgtattccgctgtacaaacggctgaaattcgagcctctgctgccgattattccgacgacgcaggaataataagcccggtagagtcagtccgcaccgtccgcaccgcgctacggtattcaaaacccatttcaaggggctgatttggcctccgccggaggtctacttccgtttcaaggggctgatcatccgctagaccacgtgtatcaatgcccttacgccaacgccattccgccgttttggagccgcgtctactcaggcatcagccccttgaaacggcagtagacctctccagaacgtcaaatcagcccctcgaagtccgttttggcctcaatggttcctgccgaaccacaaaaaagccactcctctgccatacgagccgaccgcacagcaggcacgtgtcatttgccgctgcggacctcggactccatggcttccatgggctcgtcgacgagcacggtgccggacggcagggtgccgggcagcggatcgtccatgtagtggtcgaactcgtagagcatacgctcgttcggcttggcggtcagcaacgaaaccaccacgatgaacagcagcgaaatgatgaacgccggcagcagctcatagatggcgaatacgccgcccaagggcttgacgaggttgtgccagatcagcacggccgccgtgccggacagcatgccggccacggcgccggccttgttggcgcgacgccagtatagcgagcacagcatcaacgggccgaatgaggcgccaagcccggcccacgcgtaggacaccacctggaagatcgacgagttctggtcgtatgccaccagaataccgaacaggaacatgaccaccagcgtgaccctggccacgatcatgacctgcttgtcggtggccttgcggtgcagcagcccgcggaagatgttctcgcccatggccgaagcgccgatgatcagatacgaggagctggagctcatcgaggccgcgaaaatgccggagaccaccacgccgcacatgaagctcggcagcagggtctgcgccagcacgatgaaaatggtttccgcatcggtggaggtcagcagttcggtgggcatcatcgcgcgccccaccaagccgatgcacactgcgcaacccagcgaaatcacgcaccaggaggtggcgatgattcgggacttgcgcacttcttccacgctgcggatggacaggaagcgcaccagcacctgcggcataccgaagtaacccaggccccacgccagcatggagatgatggtgatgatgccgtagtcggagggcgcgccgaacacggccttgcccgcctcgacgagctgctggccggtggccgggtccagcttgggcgcggccacctgcgtgccggacaggtagccggggatggcacgcaggaattccacggtgttgtcgatgccgcccgcgctggccacagtgccgatgaacaccaccgcgagcgcgaagaacatgagcatgccttgaatgaagtcggtcatcaccacggacaagtagccgcccaccacggtgtagacgaacacgaccaccgcgccgatgatcatcatgacgtggtagtcgaaaccgaacaacgtggcgaacagcttgcccacggtcacgaagcagctgcccacgtacacgctgaagaacaccaggatgatcacggccgcgatggtggagaccacgcccttcttgtcatggaaacgcttggcgaagaagtcaggaatggtgatggcatcgccggccactaccgagtagcggcgcagtcgccgggccacaagcttccagttgagataggtgccgagcgccaggccgatggcggtccacatcgggtcggccgcgccggtgaagtaggccaggcccggcaggcccatcagcagccagccgctcatgtcggaggcttcggcgctcagggccgtgagccacggccccacgccgcgcccgcccgcaaagtattccttggaagaggagttggagcgtttggagtagatgaatccgatggacagcatggccgcaaaatagatgaccatggccagcagaatccagaaatcgttggccaactgcggcacctccccaatcatgacgccaagcggctaccgccatggcagaactatgtgctgatatgcgtgctgatatgcgattgacgccggagaggcgtcatacagaccgtcacagccgtgaatacggccgcaacgcacttcgcctgatggtagtggatacaagggctcaagcaccttccaccgtttccatactgagacgctgttttatccgagctcccctcacctgaggggagccaagatgacggtcagatgtcgtagcgccaggacttgtcggtcaccacgcgggccatcgccaaaccgatcggcagacagataatcaccatgaacgcacggaacgcccagtccagcgcattcatggtctggaagctgccgaggtaccacatggcacggtacatatacagaccgggcaccatgatcacgatcgacggcacggtcaggcagatgcgcgggtagccgaggtgcggcggtagccagccacgtcgcacggatgaacgccacgccgatgccagaatgcccgccaggaacgcgccgatgaaggtagccatctcgggtgccacgttgaagtcttgcaattccaagcgcagcgtgtccgtgatcgcaccgatcagggcggcggccaggcacatgcgctgcggcgaattgaacagcacggagaagccccacacgccgacgaacgccgccacgaaccgcagcaatccgttgacccacgggtcaagccccagcggttcaaagccttccgggtgcaggtgcaccatcacggccacggcccagcctgccagcgtggccatcaggatgatgcacagcacgtacgccacgcgctggatgcccgaggggaagtcgattttcgccatgtcgagtccgccggtgatgagcgggaaaccggggatcacgaacagcatggcgccaatgtaggccgtatcgtgcgagagcgcgactgggtcgaaaatgccgatgagtcgcagggtgccggtgcaggcgagcgccgccgcggccacgcacacaaaggtgacgaagaactggttcagatggtatgcaaacagccggcgacgcatccactggccaaggcccgcgcccacgaacgcaccgatcatgtcgtatgggccgccgccgagcaggaacacgaaggccgcgcaggccagggcggaggccagaccggagaaccacggcttgtacagcggcttgcgacgctcaatcagatcgagccgctcgtgcgcctgccgcacggtgataccgcccttggccttctcttcgtcggagcgctcgttgaagtgttcggcgtattccttgggcacgcgattcttgcgcttcgtactgcttgcagcagggctttcggcggttgcgccgttcgccgccgcgccctcagcgcccgcctcggcattcgccgcgttcgccgattcaaccgactcattggagtcaccggtaaacacttcggcatcgtcgtaggccttctcttcggccgctttgtcttcgaccggagtgacttccgcgctgtccgccaaaagtcggtgggcttctccattgtcatcatccaaggacttggccacggaggtcacgagtaccttggttttcaacgcaagatccagcgtctcgtccacgctgccgttggccgcctcagcctcggccttggcacgttcgcgcaggcgcttggccagatcggccgaatactgcgaagcgtcacgttcatccaaatgcttgaccacgccatcggacagttgcgaatcgacgtgatacatcgaccccttgccgagattcacggagaaccagtcggcgaaatgttccagcagccagatacgttcggtgttcacgccggtggtcggcaaatccacgacttcggtgatgcggttacgaccatccgtgcaggtggcctcgatatccgtcaggttcacgtcggcgcgtacgtgcacgcccagcgggtaggcgatgcggtgcatcatttcacgcacgcggaaggagccggtgccggctcccaggtccagcatgccgacccgtacaatcacgctggctttggcggcgataccggcgtccaccaccggtttttcccaatcgcgcgcaatatcttccatgtccagcggaatggagtgggtgtggaatttacgtacagccgttgcgcctttcgcctcgggcgcactttttttcttctgttcgctcacatccctcattactactccctgcctccccctccagcaatcgtaaggtgctcaaatcttccgcgaatcggacagtgtctcatatgctgtccgatattcggtctctataggtggacaacttggcgcactatatggactccgtaacgcaaatagcgatttcgcggggatacactattgcccacacaacaaccacgttgaatatgggctgtgggctcgcaacgactggcctcaacaactgcggaggagccgcagacgaccggtagaccgagcaacctgttattcggcaaaggaggttatatggcaacacctgaagaacagatcactcccgctgacgccgccatcgtcactaccgggaccggccgaaagggcccggaggagcatgatcttcccgaaagcctgaagtacgacatggatctgtgtcttgagatcctgcgtaacgtactgggcgaatacaaccccgaactgctgtctacgttcgacaccgtgcgtcattacgcggtggaggccagcgccgagcatttcgccgagctgaaggatccgaaccccgaccaggatggcctgaaggaggccgtgaacgtcatcgacaacatgacgctgcacgacgcccagctgctggcccgcgcgttcgccacgtatttccatctggcaaacctgtccgaggagaactaccgcgtttccgtgctccacgagcgcgagaacaacgtgtccgttgaccaggcggtcgacccgatcaacgagctcaccgtcgcctaccaccagctcatcaatgagactggcccggccaaggccaaggaactgctcaaccagctcgaattccaccccgtcttcacggcgcaccccactgaggcccgtcgcaaggccgtggaaggcaagattcgccgcgtttccgaattgcttgaggagtacaagcgcctcggcggctcggataagaaggaatgcctgcgccgtctctacaacgagatcgacgccctgttccgcacctctccgatcgcgctgaagaagccgaccccggttgaggaagcggacacgattctcgacatcttcgacaacacgctgttcaacaccatccccaaggtctaccgtcgcttcgacgactgggtcctgggcgataaggccggtctcgtcgagcccgcttgccccgcgttcttccacccgggcagctggatcggctccgaccgcgacggtaacccgaacgtcaccgccaaggtgagccgcgccgtggcccgcaagttctccgatcacgtgatcgccgcccttgaggaagccacccgcaccgtgggccgcaacctcacgatggaagtcgagaccacgccgccgagcgccgagctcaagagcctctggagccaccagaaggaaatgagcgagcgtctgaccgacaaggccgccctgatctccaccaaggagatgcaccgagcggtcatgctggtgatggccgatcgtctgcactacaccatcgagcgcgacgccgacctcatgtaccactcctgcgacgacttcctcgccgacctcaaggtggtccagcgttcgctggccgccgccggtgccaagcgttccgcttacggcccgctgcaggatctgatctggcagaccgagaccttcggcttccacatggtggagatggagttccgtcagcactccgtggtgcacgcccgcgcccttgcggatatccgcgagcacggcctgcacggcgagcgcggcgaactgcagccgatgacgcacgaggtgctcgacaccttccgcgccctgggtgccatccagaagcgcaacggcctcaaggccgcccgccgctacatcatctccttcaccaagagcgcccagaacatcaaggatgtctacgagctcaaccgcttggccttctcccacccggaggacgtgcccaccatcgacgtgatcccgctgttcgagcagcttgaggatctgcagaactcggtggacgtgctcgaggaaatgatcaagatccccgaggttcaggctcgtctgaaggccaccggcaacaagctcgaggtcatgctcggttactccgactcctcgaaggacgccggcccgacctccgccacgctggccctgcactccgctcaggagcgcattgccaagtgggctgagtcgcacgacatcgatctgaccctgttccatggccgcggcggtgccgtaggtcgtggcggcggccccgccaaccgtgcggtgctcgcccagccggtcggttccgtcaagtgccgcttcaagctcaccgagcagggcgaggtcatcttcgcccgttacggcaacccggtgctggccatccgccacgtcgagtccgtggctgcggcgaccttgctgcagtccgcgccgagcgtggagaagcgcaacaccgagatgaccgagaagtatgccgacatggccgctcagctcgacgaggccgcgcacaaccgcttcctcgacctgttgaacaccgacggctttgccccgtggttctcgatcgttacgccgctgaccgaaatcggcctgctgccgatcggctcccgcccggccaagcgtggcctcggcgccaagtcgctcgacgacctgcgcacgattccgtggatcttctcctgggctcaggcccgcatcaacctggccgcctggtacggtctcggcaccgcatgcgagaagttcggcgatctggagaccatgcgtcaggcttacgaggaatggccgctgttctccaccttcatcgacaacatcgagatgtccatcgccaagacggacgagcgcatcgccaggatgtacctcgccctcggcgaccgcgaggacctcaatgagaaggtgctcaacgagatggagctcacccgcaagtgggttctggccatcgtgggcgacaagtggccgctgcagcaccgccacgtgctcggccaggccatccgcatccgctccccatacgtggacgcgctgtccgtcacccaggtgctggcgctcaagtcgctgcgcaagaaggtggacaaggaagagctctcgcaaagccagcaggcaggattcatctatctgatcctctgcaccgtttcaggtgttgctgcgggcctgcagaacacgggctgattcccggccgaccgatcgacaaaagcgagcggggaggttccgtgccgattgacggcgcgggcctccccgctcgcgtcatccggccctagactggccggcgacggcgcacgccggacggacgcgcggaacgggcacctcgacagatcggaggggacatgggcaagccagcggacgggcgcgggaacaccgggccaacggacggcatcaaggcggggggcgacgccgggaacgaacgccacgcttgcaaagcgaatccggctacaaccgatggcattgggaagaaacacggcacagaagatacgtcagaagatttttccggcgagagatgtgctttggcaccgaaagcagctaccaaattccctaaggcgagtagatgctatgtggctttgggcaaggccaggcgtgtgctgtggtggctgggattactgctgctttcaccagcagtaatgacatgggctgaacgcgataattacagcctcgtttgcagcgtgttgacactttctcccccaccctgcagtgatttgaatacgtatggctccagacttacagcagtgctgggcttaggttttctctgttgggtgatgataccggttgtttcttgtgtgaaatccgtcattcgaagcttatatcccaatgtgcccgacttggatacgtcgatggcttcacatgtcgtaatcggaattgtgtcatttttcatgctctgcgtatctttgcctcttctttttttaggcata

SEQ ID NO: 2132 - DNA, 10246 bp, Unknown
  R51_24m  MAG No. k141_6183
cagtagacggcggcaatgccgatgcataccaaaaagatgatgtttgaggtgctgatcatcgtgccatcggccattgcttctttggcggattgccatatccaaatcacgcatgcgacggcggtcagggcgtacagcatcatacgggagcggtcgttcatagaagaatctccagacttgttcaaacgacttgattatagccgtatttgtggattgcgtgggaaacgaaaaatgccgccatgtgtgcttcagcgaggagcgcggtataacagcggctcttcgcgatgcttgccatggcggcattcatcaggaatcgttattcagttgttatctcatggattgtgctggcggcgtatcagccgcgcgccttggcgtatgcctcgtacacggcttcggtgggctcgccggtctccacgccctcgatggtgagttgccaggtcagcggttcggcctcgccggacagcacccaggcggcctgacgggcggcgccgatggccacatattcgtcggtggccggacgggtcacgtccatgccgaggattgagggggccagcgtgcggatggccacggacttcgcgccaccgccaatgagcaggatgcggttgatctcggcacccagcgaacgaatcagctcgaggcagtcgcgctgggaacacagcaggccttcgacgaacgcacgagccagattctccttggtggtgttgtgcagggtcaggccagtcagcgaggcggtggcgtccggacggttcggcgtacgctcgccgtcgaagtacggcaccagggtgatgccgccggcacccggctcggccttaaaggccagttcggccagctcgtcgtagtccacgccaagggcggcgcgaccggcgtccagaatgcgcgaaccgttgatggtgcaggcaagcggcagataatgaccggtgcagtcggcaaagccagaaatcgctccggtcaggtcgtacaccgggttttcagcgatggccgcggccacgccggaggttccgagcgatacggacacatcgcccacggccatgccgaggcccagcgaggccatggcattgtctccgccgccggggccgatgatgcagccgccttcaacgtccttgccggcaatggcggggtcggccttgacggcggctgcctcacgcgggcccagcacggtgggcagcacaatggcgtcggcgtgggccttggcggcttcctcgccctcggcgggggtcagcaccatggcgatgagatcgcggcggtactcgtcatgcgcggcatcgtagtaaatggtgccggaagcgtcggaacggtcggtgaacagggcttcgagatgagcgtcctcgccctcggccaccgggccatagccggcgatacgccagctcagccaatcgtgcggcagacagacggcggcaatcttcttggcgttctcaggctcgttctcggccacccacgccaccttggtcagcgtgtaggaagcgacgggggaggatccgacggccttgacccagcgctgcttgccgcgggcggtcacgtcgtccggttcgtcgccctcggccggagttgcaccgagcttgtcgatcagggcggcggcctgcggggcggaactggtgtcattccagagcatcgcatcgcgaatcacgttgccctgcttgtcgagaatgaccatgccatgctgctggccgccaaccgcgagggccgcgacatcgtcaagcccgccggcctgctcggcggccttggtgaaggcctcccaccagaattccgggttgaccgaggtgccatccgggtgcttggcctgcccgaaccgaacctgttcgccggtggcggcgtccgtaatgcggacctttgttgattgagttgacgtatctacgccggcaaccagtactctcgtcatgcattcctcctcgatgagggtcgcgcttgcaagtctcggcgcgccacaaccaataagttagacgattaaactatactgtattgcagtgtatgattgcaaacggaaacacgcgagggtgcgtatctggttcaatcgtttgacgcacaatatcattgtgcgatagacggatgtgagcgcctgtgcggcgttcgagactaggggtgcaaggaggtaggagcctatggcaagtctacgcaggatcaatcaggaggatctgcgcaaccataatttgtcggtggttctcgacactttgttgcgcgcggagaaacccatgagcagggccgacttggccaaggaaacgggcctgaccaaggccacgctttcgctgttggcctcgatgctgatcgatagtggcgtggtgcaggaaggcgagccggtcgtctccaccacatatgggcggcccagcacgccgctggagattcatggcgggtccatcgccggcatcggcctgcagatcaacaccgatggctacggttgcctggcactcgatctgaacggcgacactctcggtcaggagtgggtgagtgaggatatgaccggcactgacccgtacgagatcttcgccaagctcgatgcgatgaccttcccgttggaaagccgactcaaacgacgtggctgcaaagtggtgggagccgggcttgcgctgccgggcatcgtcaccgacgacatgtggctgttggtggcccgcaatctgggttgggaaaacgtcaacctcacccggttcaacgtggtacgccggctggatgtggtggccggtaacgaagcgaagatggccgccatcgctcagattccggggtatgccaccgaacgtgcgtccttcctgaatgtggtggatcgcacggattcctttatttacctgtctaccgatatcggcatcggcggcgcggtggtgcgtgacggcgaagtggtgatgggctcgcacggattcgccggcgagatcggccatctgtccgtggcgatggatgggccgttgtgcagctgcggtcgccacgggtgccttgaggcgtttgcgggccgtcgcgccttggtcgaggctgccggcattgccgaggatggggatgccaccagcagcgaggccatcgatacattcctccagcgttggcgtgcgggggatccagacgtggccaaagtggtcgatcaggccgctgatgcgctggtttccgccatcgcttccgccgtgaatctggtggatgtcgatacggtgctgttgggcggactgtggacgcacttcggcgacgagctggccaccgtgcttgaaggccggctgcgttcggaaattctgggatacccgaatgtgaagatccgcgtgttcgtgccgccggtggcgctgcatccctcgctatatggcgcggccgaaatgggcttgcgacggttcatcgagaacccgttggggtacatgggggagaagtagcgccgggagatgctgcttgttgtgctggcgggtgcatggcatgggtgcatggcgcgtgtgccggcgttggtgggttcatgctacactttgcaagttggctgttttacgcagcgaacgtggggccgtagctcagtcggttagagcatgcgactcataatcgcccggtccagggttcaagcccctgcggccccactcttttgcgtcgcctcctgcggcggcacagcgcgtcttcacgtccagataggcgcgtacaatcccttaggttccggttcacgtcctgccataggggcatgacgacccgggtcccccgaatccataggagacgtaaaatgcagcagggtatccatcctgattaccaccccgttgaggtgacgtgctcgtgcggcaacaccttcgtgacccgcaccgctggcaaggaagatcacatgttcgttgacgtgtgctctcagtgccacccgttctacaccggcaagcagaagattcttgacaccggtggccgcgttgctcgcttcgagaagcgctacggcaagaagagcaagtagcatacttcacgccagtccgattcgattcggcatgctccggcatacccgatcgaggactggcgtttttgtattctttgacatttttttgacctgcacaaccgaatagacaccaccgtacgaaagaaagcgtgttatggcagacgaacagttcccggcggcggcaaccgcgcttgaggagtaccagtccatcgaagaacagatggcgagccccgaagtcgtgtccaacccggacaagctgcgcaagctgggccgtcgtcacgccgaactgggtgccatcgtgggcgcctacaaaacctggttgcaggtgaaggacgatctggcagccgctcaggagatggccggcgaggacgccgacttcgccgaggaagccaagcgtcttgaagccgaactgcccggtgtcgaagagaagctgcgcaccgcgctgatcccgcgtgacccggatgatgcgcgcgacaccatcatggaaatcaaggctggcaccggcggcgaagaagccgcactgttcgccggcgacctgctgcgcatgtacacccgttacgccgagaagcgtggctggagcgtgaacgtgcagtccgagaacaccaccgagctcggcggcgtcaaggacgtgcagattgccatccgcgccaagggcacgcccgctcccgaagacggcgtgtgggcttcgatgaaatacgagggcggcgtacaccgtgtgcagcgcatccccgtcaccgaatcgcagggccgtatccagacttccgccgcgggcgtcatcgtgttccccgaagccgacgaggatgacgacgagatcgagatcgatccgaaagacctgaaaatcgacatcttcatgagctccggccccggcggccagtccgtgaacaccacgtattccgccgtgcgcatgacccacctgcccaccggcatcacagtgaacatgcaggatgagaagtcgcagatccagaaccgcgccgccgcgctgcgtgtgctgaagtctcgcctgctggccatgaaacatgagcaagaggccgccgaagccgccgacatgcgtcactcgcaggtgcgttcgcttgaccgctccgaacgtattcgcacgtacaacttcccggaaaaccgtatcgtcgatcatcgcacgaattacaaggcctacaaccttgacgccgtgctcgatggcgacctgcaggccgtcatcgattccgacatccaagccgacgaagccgaccgtctggccaaccagcagtgatagccgacctgattcgtcaagccgccgcgcagttgcgcgaagccggcatcgagacgcccgaacatgatgccaaactgttgctggccgaggccgtggacgccgagctacgcgatatcgacaaggccatgctgatgggggagggcctcgattcgctggcccccgccggcgggggctgtcgcgcagcgactgggggtggtcaggccgaccccgtcaccaatatccttgccgccttccacgccatgctttcccgacgcgccaaacgcgagccgctccaatacatcaccggccacacgcctttccgctacctcgacctgcaggtgggccccggcgtctttatcccacgcccggaaaccgaaaccgtagtccaggccggtcttgactggctgacccggcacagcatgatccacccgcgcatggtcgacctgtgcgccggttccggtgccatcggcctgtcgatagtcagcgaagtgcccggcagccaagtatgggccgtcgaattatccccgcgtaccgccgaatggacccggcgcaatctggcggtaaccgcgaaacgatacccctccatcgcctccaattaccaactggaagtcgccgacgccacgtcactggccacgctggcgcaactcgacggcaccatcgacatcgtcatcaccaacccgccctacgtgccacaaaccgacatccccgaacaaccagaagtacgcgactgggacccggaactggcgctatacggcggttcggcagacggcacgctcatccctgaacgcattattgagcgcgcctggcgcctgctcaagcccggcggcgtattggttatggagcatgatctcacccaaggcgagcgattagtggcctatgccaaggccacaggtttcgccaccgcctccaccggcaaagattggaccggccgagaccgctatctcttcgccgagaagtagccacaggcgcggggccgccgctgctactgcgcgtaatactgcagggcggaggcgtccgcgtccgtgatttcgcgaatcggacgggccggattgcccacggccacggtgtgcggcggaatatcgcgcgtcaccaccgagccggcaccgatcacgcaaccctcgccaatcgtcaccgggcaacaatccagcacagtgaagttgaagttggcgaacacgcgctcgctggcgcgcggcatacgcagttcgacgggaggcatggtggtggattcagcattgattccgctcattgaacactcctgtaatttcgcgaaagagcatggatgaactcattgtatctacggtctgtgcgtatggggcgaatcggaaaacagcagtacggcaaacgagcgatgatgaactatgcaagtcggggcgcaatggtgcaatggtagattgtgaatacacaggcgaacggaggtgtcgtgagcgtggagggcggaacaacgctgaaagtcacggatgaatcgctggcacaagcggcgcgtgtcatccgggatggtggattggtcgtcattccaacggatacggtatatggagtggcgtgcgatccgcgtaataaggccgccatcgaccgtatctaccggctcaagcgtcgcccgcgctataaggcgttgcaggtactgctcgcatccaccgaccagcttgatgaactcggtctcgacctgccgtctccactgaatcgtttgtcggcggcgttcctgcccggcgcgttctcgccgattgccgtagcccggcccgactgcacgttggagactttggccgacaccgccgatggtcgccccggcacgcagggcatccgcatccccaattcggcgctgtgcctcgcgattctcaaggccactggtccgctggccgcgtccagcgccaaccgttccggcgacgaaagcgcacagactgtccaggaggcggttgacgcgttcggcaacgaagtcgacctgtatctggacggcggtcccacccaaggccatgtctccagcaccgtcgtcaaagccgatccgtacgcgcgcgacggcatcgagatcctgcgtgaaggcgtcatcgcccaaaacgtgattcgcaaggccctccacctcaacggcgggggactcggcgcatgagaatctacctactgattgccgccatcgccggtggcgtcacctggctggtgactccgctgattcgccacgtcgccatcgaaatcggtgcggttggcgaggtgcgtgcccgagacgtgcacaccattcccacgccgcgcatgggcggccttggcatgctgatcggttttgccgtggctaccgtattcgccagtcggctgccttttctctcgggattgttcaacggcaattaccagatgtgggtgattcttgccggcggcatcatgatcagtctgctgggcatggccgacgacctgtgggatctcgattggatgctgaaactcgccggccagctgctgatttccgtattcgtggcttgggacggattgcagatcatctcactgcctttgggtggttcgctgattaccgcctcgccgagtctgtccatggcgatcaccgcattcctgatcgtcgcctcgatcaacgcggtcaatttcgttgatggcctcgatggtctggcggccggtatcgtggcgattggtggcatagcgttcgccgcctattcgtatatcatcgcccggtcttccccgagttatgcttcgttggccacgctgatcgacgtgatgatggtgggtatctgcgtgggcttcctgctgcataattggcatcccgccaaactgttcatgggtgattccggttcgatgctgcttggctatctcatcacctgcgcttcgattgtgatgaccggacgtcttgacccggcctcgattcatgccagcatctatctgccggtgttcatgccgattctgctgccggttctggtgttgttcctgcctgtgctcgacatgtgtctggcgattgtgcggcgtttggccaaaggccagtcgcccatgcatccggaccgtatgcacctgcaccatcgcatgctgaagatcgggcattcggtgcgtggcgccgtgctgatcctgtggggatgggccgcgttgatcgcattcggttcgctgacgattctgttcttcaaagcgcagcacgtggccgtgggcatggccatcgctgtggtggtgctgaccatagccacgatgtacccctatctgcggcatcgtattcccgagatccaagccgagaacctgacgttcgaatccgcacgtaaaaacgcgcagcatacagtgcctaaatcgcagtctgcagtaggggagagccgggattcgattggctctcaggcagcggattcgatgactgattcgcctgcaaattcgcgggactcgcaggtgggtgaggtgcaggacccggcagcggataagtgagcgctcacaagcgtgtgtcgtgaaggtcagcgcattttcatatagtgtttacatggctacaaaccttgatgaattaaacgcccagtcggcgtatgctccccttcccccgattttcgccaagctcggccttgcctatgacgatgtgttgctgttgccgaacgagacggatgtcattccctccgaagtggacaccagcactcatctgactcgcaagatcgtgatgaaggccccggtcctctccgctgccatggataccgtgaccgagtccgagatggccatcgccatggctcgtaacggtggcatcggtgtgttgcaccgcaatctgtccatcgacgaccaggccgctcaggtcgatgtggtcaagcgttccgagtccggtatgatcaccgacccgctgaccgtcaaccccgaggtcacgctggccgacctcgacaagctgtgcggcaagttccacatctccggtctgccggttgtggacaaggacaacaagctcgtcggcatcatcaccaaccgtgatatgcgcttcatcgcctccgaggattacgacaccctgaaggttaaggatgtcatgaccaaggagaacctggtcactggcccgtccaacatctccaaggacgacgctcaccgtctactcgctcagcacaaggttgagaagctgccgctcgttgacgaggaaggccacctgaccggcctgatcaccgtcaaggacttcgtcaagaccgagcagtacccggacgccaccaaggatgagcagggtcgtctgcgcgtggccgccggcgtcggcttcctcggcgacgcctggcagcgtgcctccgctctgatggaggctggcgtggacgtgctcgtggtcgacaccgccaacggtgaggctcgtctggcactcgacatgatttcccgcctgaagcacgactccgccttcgacggcgtgcagatcatcggcggcaacgtcggcacccgctccggtgctcaggccatgattgaggctggcgcggacgccgtcaaggtcggtattggccccggctccatctgcaccacccgtatcgttgccggtgtcggtgtcccgcagctcaccgccgtgtacgaggccgcccaggcctgccgtgccgctggcgtgccctgcatcgccgacggtggcatccactactccggtgacatcgccaaggccctcgtggccggtgcctcctccgtgatgctcggcggcacgctcgccggctgtgaggaagccccgggcgagaaggtgctcctgcacggcaagcagtacaagctgtaccgtggcatgggctccctcggcgccatggccccgcgcggcaagaagtcctactccaaggaccgctacttccaggccgacgtgacctccagcgataaggtcgtgccggaaggcgtggaaggcgaagtgccgtatcgcggcccgctgaacgccgtgctctaccagatgctcggtggcctgcaccagtccatgttctacatcggcgcccacaacatcgccgagatgccggagcgtggcaagttcatccgcatcaccgacgccggtctgcgcgaatcgcacccgcacgatatcgtgatgaccgccgaagccccgaactactccggtttccacaacaactgatcggttgatgcccgctagcttgcgctagttaggggttgattccttgtgaaaagggtctgcttatgcaggcccttttcgcgtatgtgactcgagatagcttgtatgcgctggggtatagtctgaactgttctgcataagcgatgaccagcgaagaaaagaggcacaccatggtcgacagccatgacgcggaaacgtacag

SEQ ID NO: 2133 - DNA, 13013 bp, Unknown
  R51_24m  MAG No. k141_6736
catcttgcaataattcttacatgtaaacagagagttcttacatgaaagaattattgaaaggtgatgaaagaacttactttcacgcgcgccaatcatcccaacacgtatcgggatgacggcccattcccctcgcggcgcaacttgcccgcatcctctagcttcttcaacaaccggtatgcactgatatagctcaggccaaacaaatccatgacatccgccgtagtgacgacaccatcatttttttcggcgaaatccagaacaaggccactgcgccgggtggcatcgatgtcacgctggcgcacgtaagacgccagcccctctgaacgtttatacactcgggcactcagcatatacgaacgagagctcccgctaccgaccccctctaccaaaccagcttccaccagattctcaacagcggacacgatgcgtcgatgctccaaatgggagaaatcgcacaattggaccacggtaagcctacgatgctcacgcagcagcgagagcacaatcagtgaccagaccggcaatggagccccacgtcgacgttcctcgtcgccaatcatggttacgaatgcctcgtcaggtaccacacggcgcaagaacaagataacttcctcagcactggactgtgaataatccgggaaagaaccacccgccgcaatcgacccagcatagatggtatccacacctcgcccggtacgttcaacatatccggcagctttcagaatcagggcaagctgcggattacgggaacgcggttgtgcagtaagcaggttatcttcggagacaccctctatgaatcctccgggattagctatggtcaacccatcatcatcaaccaggaacctcaccgaacccattcgtgcataatcgcgatggcagaaagcgttaatcattgcctcacggaatgcccctcgatcgaagtctggcagatcgacacgaatcaagccgctcatgacttcgtggctgggattccacggctccatcagctcgcctacacgatcaaacatatccaccaagggcaacacgaatggatccatattgacctttggagacatgcctttcatcacttgaaaaacagccgatgcggctggaaccgatcgatgaatagcatcaaccgaaccaatggtgagcagaccagcaacagatggctgcaatccatacgggccatcaacaaccagctcaagtgcccgatcgaaatcctcatcagtaaaagacaacaacgagttttgcgcattggcactgcgaatacggcttctcaacttgttccgtgagtctggattcaaatcatccaaccgagactctggggcaggttgcgcgctgaaatcgtagaaccgttgctgagataaacggctaatgaattgggaaacaaacagcggaacgacctcaggcgagccgtctgctttcagccggcgctgcaatgtcttcccctgactggtagatacgatttgctgactgttatccacctcaatactgactatcggcacctcgttctcatacaagagcgccacgcgagcgggaagctgcggaacagtcttattgaaaattagtaccgcaagtccattgatattgcgatgctcgtcacatacgccggtcacagtgccatcgtcttcaataccgagatacagtgtgccgccttcggtattggctagagccactacgttgtcaacaatttcatcatgcgattgagggcgcttctgctcactcttgaactcaaccgtcaaactttctttggccggcaacatgagcatcccctttcaccatcttgcaataattcttacatgttaacagagagttcttacatgtaagaattattgcaagatggtgaaaggggtaaagagcaatccatcctgtcatctccagcaacttaaatccgatcatcgctgctttcggcatatctgatatcagccgctggtgccagtccaatcacccaattgaagctcaacacggccaaagactctacgccgcagtggattcgcgctcgatgagcttatagcccacattcacggtctgcgggaagaactcgtcgtccaggttctcgatacgccgcataagcaaggtcagcgcggtatccgccatgcccttgaaatcggtggccacggtggtcaaagtcggcacgctgtacatgctctggctcaggccgtcgaagccgataacgcgcacatcgcccggcacacttacgccatcgtccgccagaccacgcagaataccgagcgcaataccgtcgttcaggcagtacagaccgtcgtacttgcacttgcctttcttggccaagccgcgcccggcctcgataccgccgtcaatcgaccacgaggatttgatgaaatcacggcgctcgtcaaacggcagtccggccgcgagaatcgtctccttggcggcccgcatacgaatatcacgcgagccgggaatgatgttgggattgttgggatcgtgattgtcgccgacgataccgatgcgcgcacagccacgcgcgataaggtgttcgattgccgcccgtgagccggcgtcgctcggcgcgttcacggtgtcgatgggcaggctggtgtcgtagttttccagcatgacggccgggtgccgcttcaggatatcgaccgcacgtggcgcattgatggcgatgatgccgtccgaaaacgtgtacgacagatcgttgtcgtcggtaagataccgggacagttcgatgagcatgtgcgagtcgcgcttgtgcacttcctcagccacacacatggccagatgggagaaatagtcgccctcgaggcccgaggtaaggaaggtgatggtatcggaccgcccagaacgcagggaccggccagacaggttgattttgtagccgagtttgcgggcggcgtcacacacgcgttgcgtggtttcgggcttgacgtaatccttgcctcgcagggccgcggaggcggtggtggcggtcactccggccagttcgccgacatcctttaaggtcaccatcgttaccatctccgcatatcacgaaccttatcgataagaatccatagtaccgcccacatctcagccgaggatgagaccctcggtcgaggccctgcccggcgactcgaacgccgcggtcaccgtggtgagcaccgacgctgcaaacgaaaacatgtcaaaccaagaaatggacatgacggagtcattgttttccgagagggatatgccgcgtccacgggcagacgtcacgtatcaatcacgccgataccgtcatataactgttttcgatgtgagaaagctcatagcttccgaccacagaaaccagccacagcaaccccataacagcgttatagttctgtttgtcggcgtcgacaagagccagcagcgccgatgaaatgcacaccaaggatgtttagcgaattgttcgcagttcgcacgattcgatttgattcgattcgtgcagcccggacggttcacgggggcatgccgtcgtgatgtgcgtggatatgggcgatgcgactctcgttcgggtcggcaggtcatcgtacaccagttacgaaaggatccgtccatatatggcaaggtttaccgagaatcgttggaccagcgcgattattcccgcactgctgattcacatcccaatcggtaccgtctattgctggagcgtgttcaagcagcttatcgctgaccgtctccacgccagccccgcctccgtggaatggggcttctcactcgccatcttcttcctcggcatgtccgccgcgtttgccgggccaatggtggagaaaaacatcaagaaatccgcactcgtctccatggtctgcttcgtggtcggcttcgccggcacgggcgtgagcatcgccctgaacttcctgccgggcgtgttcatctgctatggcgcgatcatgggcatcggcctgggcgtcggttatctgactccggtcaagaacctgatgctttggttcgccgacaacaagggcctcgccaccggcatcgccgtcgccggcttcggcctggccaaggccattgccagcccactgatggaatatctcatcggcacggttggcctggtcagcatgttcttcatcctcgccgcggtctacgcggtgatgatgttcgtcggcttcctgctcatcaagcgtccggccggctgggtgtacgatcccgcgacctcacacgtcagccgcaagacaatcctcaagaagcccgtgttctggggcatctggatagccttctatatcaacatcacctgcggcctggccctcatcagccaagagaaggacatcctgcacgatgtgctcagggccttcccgcagtatgccaacctgagccccgccaagtttgccgccgccatctccggcatcatcggactggtgctcgccgtggactccgtgttcaacacggctggccgcgtgggcttctccacactctccgaccacctgaagcgccgcgagaccgtctatcaggtaatcttcatcatgtcgattgccgtgtgcttgctgcagatcttcaccaacagcatcgacaacgctctgctgtgggccgtgctggccatgctgttcctcgtcaacgcgggctatggtggcggtttctcgacgctgcccgtgctgcttgatcagcacttcggcaccaaaaccgtctccaccacgcacggtctgacgctgagcgcctgggcgttcgccggtctgtccggcaaccagttggcctcgttcgtagttgcccacgcgcctgatcaggcccaccgctacgccgcactcatcccggtgctcaccggcctgttcgttgtggccctgatcagcatcagcctggtcaagtacctcggcgacagaaacgtcacgaaggccgtcgaagaccgaggctgagctgccgcaaaacaacgattctgccggagtcgggcgcatcgatcgcatcaatcgatgtacgtcacgattttggcagaatcgttgttgttgctgttgagtacctgaggtcgtgcggcttacgcgccgaccagttcgagcatttgggggatgctctttttgccgaattcgacttgctgggtgccgtcggcgtgggtgatgacgatgcagggcacgctcatcgcgccgtactggtccttaagttcggggaagtgcgagacgtcgtaggcttcggcgcgcacggccgggctcagggaggcaatgcgctgggaagcaagcacggtttccgggcacatcgtgcaggtgagcgagacgaggatcatgatgttcagcgggtccgtgatggacttcgcgcgttcgaccaggtcatcgcccagcggctggccgggaccggccgcgttgtacaggccaagcacgaacgagttgaactcgtggccggaaggtacgccgtggaaggccagaccggtgaagaccagtgaaccattgccgtccttgccggccttgccgtcgccctcagccggcacgcagatgcgcacagttgggcgggcgagcggcaggacgccggcgacgtcgaatgtggcgcggccggaatcgtccaacgaaccataagtgggcagttcggtgccgtccggcaaagtgacggccaatggctcgccaaccaccaaagaagtaggcacagaagcaccatccaccgccgtgatcagccctgcggcatcgacggcgaccgagttcagcttgccattcgacaacgcgaccatctcgccgatgaagccctgcaattccgccgaaagcggagtgccgtccagctcgagagcgagcgtgaccgggcgggtcatgcggccgaagaccacgccaagctgctgcttgatggcggcggagaacagttcgccgggcttcttggcggcgctggctgcggctgcggcatcggcgctgcgtttggcgggagccggggcgggcgtcgtgccagcggccgagtcggcggaggcggccttggcctcggactcctcataagcggaagcagtgggacgcggcggcaccaagccggttttctcgctcatctgcttggcgtaacgctccagttccacggcggcaatcgcaccgtcggcggtggcggtgaccacctggcgcaggttcttgacgcgcagatcgccggccgcgtacacgcccggcaccgaggttctgaggtagtcgtgcgtgaccacgtaaccgtggtcgtcgagctccaccacgccgcgcaccaaatcggtggcgggcacatagccggcgaacacgaagacgccgaaggtgccggcgtcggcgggcttccacgtttcggtctggccggtggcaaggttcaggatcgaggcttctcgcaggcctccttggccggcggtgacgcccttcagctcgacctgataacgcacgtcgatcttcgggttgttcttggcttcggcggccactgcggcatcgcaggtgaagtccggttcgcgcacgagcacggtgactttggaggcgtatttggtcaggaacacggattcctcggctgcggcgaatccgccgccgaccaccagtacttccttgccggtgaagaactcgccgtcgcaagtggcgcagtaggccacgccgcggccggcgtactcggcctcgccctcgaagcccagcttgcgcgggctggcgccggtggcgatgaggatgccgaaggtcttgaggtcgccgcgtgaggtgtgcacggttttgatgtcaccatccacgtcgagaccggtggcttcggcggagaggaattcggcaccgaagtcctgagcctgctggcgcatggtctgggtgagtgcgcggcccgtggtgcggcccacgcccggatagttgacgacttcgttggtgatggtgatctggccgccgaaatcgtccttttcgagaatcagcacgcggtagcgagcgcgggccaggtacaggccggccgtcaggccagccggcccgccaccaatgacgacgacgtcatagagattgttggtctgagtcatgaaaactcccttacatacactggctcccctctctgaggggagctgtcgtagtgagactgagggaagcatatcggatcaggctagctctcgcgagcactccccccagtcgctttcagcgacagctcccctcagagaggggagccaaggttaccgcctattcagtgtcgatcacagctggccgacgaggtcgaggctgggctcgatggtttcctcgccaggggtccagttggcggggcagacctggtcgccgtgctcgtagacgaactgggaggcctgcacgcggcgcagcagctcctcggcgttgcggcccacgttggaggagatgacctcgtaggccacgaccttgccctcggggctcacgatgaagtcgccgcgctcggccacgccatcggcctcgttgtaggtgtcgaggtccttggccagcagggcggtcgggtcggcaagcatcgggtactcgatcttggcgatcttctcgttggcgtcgtgccaggccttgtgcacgaagtgggtgtcgcaggagacggagtagatctcgcagccgatttccttgaacttggcgtagttcttggccaggtcttcaagctcggtggggcacacgaaggtgaagtcggccgggtagaagaagaacagggaccagtggccgagcacatcgtccttggtcacttcgtggaactcgttgttctggaatgcgttcaccttgaaatcggtcagttcatgctgcagaagagtcatcatcggtcctttcgggaattgttaatcttcaagcgtttaccaccacctatcgtagtgtggcggcacagggctcgcacggacagaacatatgagccttatcacaccagccacagcccttgtgctgactatcatcacggcccacccttaaacaggattgagattgtgagcgttctcattatgctttgggcaaagccagattatgcatgcagtcgcgaatccgcacttccaatcgctactatgggtaccagcagtccgctgataatggaggttttcatggctcaggcagacgttgaacaggaatcaaccgcaaatgcgacgtggagccgtatgctccaaggcaatcgccgattcgccgaaggcaagcccgaccatccatggcaggatcaggagacccgccagacgctgcttgatggccagaacccggatgccgcggtgctctcctgctcggactcgcgcgtacctccggaaatcatttttgatcagggcctgggcgacctgttcaccgtgcgcaccgccgggcaactcatcgatagcgcggttatcgcctcgctggagtacgcggtcaagaaactgcacgtcagcctgatctgtgtgctcggtcacgagcactgcggcgcaatcgaggccgccgagcaggagctggacgacctgatgcacaccatcacttccgaagccgacggctcactggaggccgcggatgcgatggacgacctcgacgagcacatcgccgccgccgaatcgattattctgcgccaggccggcatgtccgtctggcaggcgcgcgaagccgagctcgacgcgcatgaagacatcgagcgcgtacacgtggcccacaccatcgagacgctggtggaacaatcccccatcattcagcaggcattggctgccgaccagctgatgatcgtcggtgcccgttaccagctcgacaccggcaaggtcgaggtgctgagtttctgaccatcagtcagaccccgttcaccgggggtaatgcggtcgtggtacatctgtgtgcagagagatcgaagaacacggaagtctgaaccaatgccacctgcccttactattcactacggatccgccacctatacccccaatcctgcacgtgccacgaccatcgggcgtgcgccggattgcgatctggtgattcacaacccgtacgtatctcaccatcatgctcgcgtcacctttaccgacgatggttggctcttggaagacacgggtagtgcaaacggactgtccatcaacggcattcacaccacttccgtactgctgctgaacagcaccaaagtgacgctggcacaaggtgccaccatcgtctgcatcgtcggaaccagcgggccgtccacgccggcacagcccccgcgacgccctgcggcaaacgtggcccagcctgcgctaccgccggcaccatcagcgcaaccggcacaacccacgcaactcgcgccgcaacaggcacgcccagtagtgcaacccacaccaccagcaccgcaaccggcacaaccggtacaaccgcaaccaacgccagccccgctggccccgcaccgcgtatccccggccctcgcgcacctgcaacagcaaccccgcccaacagcagtggcaccgacggcagtatcgccagtgccggtatcacccgcatcaccatctccgtctccctgcgcatccccttccccatcgaatgccgccggcaccgttctggcaggcagcacgcaagcggtaaggctcgaatcccaactcaccaccaaccgcgtgcacgggtccttcagccccgagcacgacaccacaggcgtcatcggccgcgataccgcctgcctgattcgcatcaacgattatctggtctcccgcaaacactgctcgctggaaaccaccagcagcggcatcctgctcactgacctgaactccgccaacggcacttacgtcaacggccgccgcgtcgcgaagatctggctgcgggaagacgacgtcgtcaccgtcggcaacaccgacctgatcgtgcatgaaggcgtgctgtgcgaccgcacgccgtttgtcagcaacgacgcggttatcgccgaaaacatcggactgaccgtgggcaaaggcacccggctgcttgacggcatcaacgccgtattcgccaagggcacgctcaccgccgtaatcggaccttccggcgccggcaaatcaacattcacctccatcgtcgccgggctcaacagccccacggacgggcgcgtgctgtttgatggatacgacgtgcatcagaacatcgaactgttgcgcagccgtatcggattcgtgccgcaggacgacgtggtgcaccgcaagctctctgtggacgcggcgctcgaatacgccgccaagctgcgcctgcccggctcaaccaaggccgagcgcgccgaaatcatcgacaacgtgctcaatgagctggaactcacgtctcgccgtaagaatcgcattgacagactgtccggcggccaacgcaagcgcgtgtccaccgctatcgagctactcaccgaacccgaactgctgattctcgacgaaccgacctcgggcctcgacccggcgctggatcttacggtgatgaccatgttgcgccaactggcggatgccggccgcgtggttatcgtagtcacccattcactgtcgtatatcaacaagttgtgcgataacgtgctcatgctcgctcccggcggccatccggcattcttcggcaccgtgcaggagatgagccaggcgttcaacggcaaggaatgggccgacatcttcaacgatgtcgccgaatctccggaacgggtgtattcgattactgattcacgccagcgcaccatgcaggccgagtccaccatcacgcggcacaccgagcatgagaaaccggcaaagccattccgcatcaaacagaccatcactctggtgattcgtcagctgcatttgatcatcgccgaccccggattgctgatcttcctgctgttgctgccattgctcctaggactgctgtcgctggttgtgcccggttctcatggcttgggtgagcccgatttcaaagacgccgccaccgagccgaaccagctgcttgtgctcgtcatactgggtgcctgttttatgggatcggctttgtccgtgcgagacatcgtctccgagcgagcgatttacggccgcgagcgcgcggtgggtttgtcgcccacgtcatacaccgcctcgaaactcatcgtgatgggtttgcagaccttgttgcaggcggcgattctgaccactgcggtcagcctcggcaagcccggcccggaccatggtgtggtcactgattccggcatacccgaactggtgttggcgatttggctgactgcgtggacttccgcattgttgggcgaagtcggctcggcgttggtgaagtcgggagaacagacgatgccattgctggtggtgctggtcatggcccagttggtgttctccggcggcatgattccggtcaccggccgcgacagcctcgagctggtcagcatgatcttccccggacgttggggcttctccgccgccgcctcggatatcgggctcaacgatctgctgtatggccccaccaaggtgccgatgttcaaaaaggatgatctgtgggagcacaccacggatcagttctggttcaacattggcattctgggggattatggtagtcgtcttcaccattgtgctgcgtatttgcgtcagcaatgccgtggccaagatgcgtcggcgctcatagaactggatcgaaactagcccgcaaccggcttacttcattcattaggtcaattatgcgttcatttggtcactgcactccaacactgaccattgaaatgccgccattccaacgcctcaccatgccgacaacccaccaaatgaacgcgcaacctaccaaatgaatgaacccagccctatatttggtgctacaacgactgcaaatactgccccaaatgcggcaccgcaaattccagctgcccatgacctgccgggcggatgagtttgtccttgaatcgtcgaaggcgagcagcgcatcggaaacaccggtcgacacgtcgtccgcggtaatgacatttgaacctcgacgttgtgcggattgccacatgtagtagccaacaagctgcaccatgtacgggtatccttcagactggcgagcggcttcaagcgcatcttccccactgatggtcttgccggaatccgcaactgtttccaggaacgcattcttgacgtctggaagcggcacgttatccaattcgcggcgtagcgcacggcgcaggaatgtggttacctcgttatccagcaaatcgttgaccatatacggcaagccagcaaacacgatggcaacgcccttcttatcctcatcaggcgtatcactttcatcggcatccgtaatgacgtgctgcacggctgtagcaatggcaaccaaatcatcatgcgaggccgcttgcgtctcatcgatagtgatgagaatgcccttccccttgccgagtttcttactgcccagccagcacaccccaatttgacgtgccgctcccctagagttgaagccatgtcacttggtttgaacatcctcctgatttttgtatttctcgttatcggttccgtgttctccggcaccgagttggcattggtctctctgcgcggctcgcagatcgagcaaatggagcaggaggacgctcgcggcgccaaagtcgccaaaatcgcacgtgacccgaacaccttcctctccaccgtgcaaatcggcgtgacgctctccggcttcctgtccgcctcgttcggtgcctcctccatcgccccctacctgattccggtggtcgaaagctggggcgtgcaccccggcatcgccggcggcctggtgaacatcatcctgaccctcatcatctcctactgctccatcgtgatctccgagatggtgcccaagcgcatcgccatgcagcgcaccgagcagatcgcgcgcgccgtggtgcccgccatcgacgccttcgccgccgtctgccgcccgatcatctggctcatcggcaagaacacgaacggcatcgtccgcctgctcggcttcgacccgcagcagaccgagtccgaggtgtccgacgacgagctgcgcgtgctggtcagctccaacaccaacctttccaaggacgaacgcacgattctggacgatgtgttcgacgcgtccgaaaccatcgtcgccgaggtgatgcgcccgcgtgccgacgtggtcttcatcgagggcgaccagcccttggccgaggccgccgcgttcgtacgcgaccagccgtactcccgttacccggtgaccggcaaggatttcgacgacgtgatcggcttcgtgcatgtgcgcgatctactggacgtgcgcgatccgaacgccaagatcgtgcgcgatgtggtgcgcgaaggcatctccctgcccggcacctccaagctgctgccgagcctggaactgctgcgtaagcgcggcatccatctggccgtggtcatcgacgag

SEQ ID NO: 2134 - DNA, 10127 bp, Unknown
  R51_24m  MAG No. k141_6804
ccgacccagttccagaagccgaacgcgttgttcgggtcgatgccgaattcggcgaccttctccaggttggtggagacggcgacgaagtgcttcttgatggcttcggcgttcttctcgtcggagccgtcgatggcgcccttggccttgagctcttcgagcagccaggtgcgggcttcacgggcgttggtcagggtctccagggtggtgaaggtcttggagacgatgatgaacagggtggtctccgggtcgaggcccttggtcttctcggccaggtcgttcgggtcgatgttggagatgtagcgggcggagatgccggcgtcagcgtacggcttgagggcctcgtacaccatgacggggcccaggtcggagccgccgatgccgatgttgaccacggtctcgatcttcttgccggtcacaccggtccactcgccggaacggaccttgtcggcgaaggcgtagatgcggtcgagcacctcgcgcacgtccttgacggtgtcctggccgtcgacgatgtacttgccttcatcctcgaccgggcggcgcagcgcggtgtgcagcacggcgcggtcttcggtgttgttgatgtgcacgccggtgtacatagccttggtgcgctcatcgagcttgacggccttggcaaggttggcgaacagctggagggtttccggcttgatcaggttcttggacagatcgaagtgcaggtcgccggcgtcgaaggacagcttgtcgacacgctcggcgtcttcagcgaaccacttcttgaggctcacgccttcggcctgaagctcgtcatagtgcttctgcagggcagcccactcaggggtctgggtggcgtcaacgggcggattgatggccataggattccattcctttcatcagtgactggagcgccttcgctcacggctcggatgcgctccgtatcaccaaacagaatactcacaaattcggacatgaacagaacaaaaatcagtcagcgatgtcggattgccatcgtttgcattatcgaacagttcgtggcgcggcacaaccgtcatcttcaaccgagcggtcacgacacaactgccaagccgccgattggacttttcgcggagatgtcttatacttaatttcttgtgcgcggctggcgaaatgccttccgcgaaccaagccactttagctcagtcggtagagcggctcactcgtaatgagcaggtcgtcagttcgattctgacaagtggctcggatgccctaggctggctggtctgtaatggctgtccggcctagggttttgtatatcttccacacctgtggaaacgcggatatgcacgcgcgagtggcggaattggtagacgcgcaggatttaggttcctgtgtctttgacgtgtgggttcaagtcccatctcgcgcaccggcttgagcctcctggaaacattggatcgccaacgattccgggaggctcttcgtatatgcgtgaggcaattgcaagcccttgcggacgcctctacatatggcaatgccaaggcggcaaatataatggtcacagcattgtgggtctgagcctgtgcgccgtgagcctgtgtgagccaaggagagaagtgtatgtccgccattcttacgccggttggcctattgctgatcattctcgccggctatctgttcaagcggttcggcctgttcgggcagaaggattatcgcgtgttgcaaaccgcggaattcaacatcgtgctacccggtgccatcgtatactcgttcgccaccaatccgcatgacatctcgctgctgcttatttcggtattcgcattcctgtttgcttttatcccgatcgtgttcatctttctggccacccgcaagcgcaatgtgaccgaccgcgccttcctgatgctcaatggcgccggcttcaatctcggttgtttctctttcccggtcgtccagtcattctggggtgcgggcgcggtggtgccggctgcgatgttcgatatcggcaactgcgtgatggtggccgccggcaccaatgtgctcacccagcaactgctgcatattcagcccggcaaaacacttgccgaacaacacgccggttcggttcccaccttgccgtacgaaaagcccaaggatcgcgacgccaaacggcttgcccgccgcgcattgctgcgcaccatcggcaagagcttcttcggctcggtgccgttcgacacgtatctgctcatgatcgcgttgaccgtcgccaacgtgaagattcccgattggatcgcctctataacccagccgttgagcggtgccaacgcgctggtgtcgatgctgatggtgggcatgctcatggatttgccccagtccaagcatgatgtgaaggaagtcatggccgtcatcgcttggcgtataccgttcagtgtcgccttcgcgttgatctcgtggttcctgctgccgttctcggcttcgattcgcgccgtgatggtgatctgcgcgttggctccaatcgccattttctccacgctgttcaccgacaaagtactcggcaacgccaaactggccggcttctcgctggcaatcaccgcgatgatttcactggtgatgatggcatttgctcacgcgctgatgggcgtgtgagcaaatgcgcgagtaggcacacgacgggcgcacggcgggcacacggtcaggcgagacgcagcccacataggttcgtcccccggccgccagctgctaccagtgcagcagcttgtgcgccagattgctcacgccgaagcggaacttgtccaccggcaacgtgaatttgcctaccatctgctcgacgtagccgttgaagccctgcttgaattccagcacgccgcggccctcgtcgttcggatcgtcgaacacgccggaaatgccgtagaagttgtagcggctcacaccctgttccacacacaggtgcagcatcgcttcgtactgaatcagcgccgaggcgtagaacggcttgtactcctccaacgaaccggaatactgatagaccacctcattggggtgactgacgaacattgaagccgctgccggcagcacatcgcccttcttggcatatccctccacctcagccagacgcttgtcggcggccgcgagattgcgcgattcctcccccagctgacgttcgatgcgcgtggtcggacgttcatcgtatttcgtctgcagctgtgcgaccttggtctgcaaggcctcgcgcttggcggtcatatccgccacatattcggcgatgtggatttccgcgagcatgaaatgcgcatccgcgccatacgcctgcttgaactggcggaaatagtccgcgccgcgcgtcgcgaacccgcggcgttcaccggtccgccgttcgatatcggcgaacacgtcgaactcgtcggggccgatttcgcgaacgtgcacgcccatcgactgcgcccgcttgacgctccattgagcgcgtttgccgaatgatgccagcagttccttgccgttggtgatgccggtgagatccttgacgtacatccactggcagaccacgtcataaccggtatggaatccgccatgcgtccagccggcatcggtgaatccggtcagcagtgcatcgttcggctcgccgtcgggctgcccgtccgaggaatacagacggtaggcgacgttaggccagcatgccacggaaacagcatggtggcgacgggccgattcacgaatcgcctcggttatggcccgcagcagagccggatcatcgctaatgccgatggggccgaaatatacggagccatctgcaccgaaacgaccattgaggtacagaatcacgcagccggctaccagattgccggatgcgtcgcacacgccaacgcattcggcttcatgcccacgaatcttggcaagacggacctgcccggaccattgctgaaagctgccctggcttgtggcttcggaaagccggtcgaactcttcgggcgtaatcacgccaaacgtatacgtcgtatctgttcgattcgcagtcgcgctcatctcgtcgtcacctgtgccttatttctgtgtccgtgctcgccactgtttgtcagcgatgcagcagcttgtgtgcggcttcggatacaccgaagcgcagtccgtccaccggcagcgtgaacttgcccggaagctcttccacgaatccgccgaagcgagtcttgaactgccagacgccgtaggaaggatcgttggcgtcgaaaatgccggaaatgccgtagaagttgaagcgctccacgccacgggcgatgcagtcaagcatcgcctcgaagtggattagggaagacgggtagtaatccatgaaacgatcgtcctcgccgctggacaggcagacgacctcgttcggatgccagaagtagacaccggcttccaccggaatgaccgggccgtccgaggcgatgatgccattgacttcgccgatggtcttttccagcgccgtgatcttcttgtctgcggtggcgatgcgcttttccagcgttgccgggtcggaggcaccctttttggccgtgccttccggccgctgttgcgcgcgctggagcaggcgttcgaggttgcgcttgtctttggaggccgcattcagcttggattgcagggtgtccagatattcgtcgaaatgggtttcgaccaccttgaactcgatcaggtcgccgaaggtatcgaacagacgctcatagtaggccagatcgcggctcttgaagccttgacgtgcggcgctcatatcgcacagcttgacgaaagtgctcagttcgccgcgttccagccggcgcacgcgcagaccggaatcctgggcgatgcggatgttcttacggcggtacttggagaacgaggccagcagttccttctcattatgaatgccgtcaagccccttgacgaagttccagcggttcaccacggattcgtagcccacggtgaagccgccatgtttccaaccgaagcgggccatgttgtccatcatcgtggtgtccgggtcgctggtcggcttgccgtccagatcatgcagacggtagactgcggccggccagcaggatacgctgatggcgtgatgggccttggccgaacgacgcagggcttcggtcatcgcctcaaccacctgtggattgtcataatcgcacagcggtccgcaccagaccgagccttccaaaccgaaacgggactgcgtgtacaccacgtagcaggcggcaatcagcttgtcaccgcgcttgacacccacatagtccaccggaccgttgaacgcacccatggcggccatctgcgaggtctgctggaaactaccttgcacttgagctgcggagaacgcatccagctcggcaggagtgatcttggtaggggtgagtgaggcgacgcctgcatcggattgcgtcataatcgaaccttcttacttgtcgttactctgatcgttactctgggctctggaacggcctgtgtgctgcgtccgtttaccgcgacagcagcttgtgcgcaaattgcttcatggcataggcgaccggtttgaccggcagtacgaactcgcccggaagttcctcgacatatccgttgaagccctgcttgaactccagtacaccacgcccctcgtcatcgggatcatcaaagacgccgtcgatgccgtagaagttgtagcgagacagcccgtgttccacgcagaaatgcagcatcgcgtcatgctgaatcagcgcggaggcgtagaagggcttgtactgctcgacgctaccggagaacaggtagatgacctcgcgcggatgctccacgaatagtgatgccgcagccggcagcacatccccgtctttggcgaactcggccgcctcgttcaggcgcttttcggctgccgccagattgcgggtctcctcccccagctgacgttcggttttggtggtggggtgttcggcgtttttggcggtcaatgccgccaccttggccgaaagcgcttcacgcttggccgtcatgtccgctacatattcgtcgatgtggatctcggcaaccataaaatgcgccttgttgccaaacgcttccttgaaacggtggaaatatgcttcgccacggtattcgaagctacgacgttcggcggtttgccgctcgattcgtgcgaatacccccaactcgtcgtccgacagctcacgcacatgcacacccatcgattgggcacgcttcacgctccactgggtgcgcttgtcataggacttcagcagacttttctcatcggtaatgccggtcagatccttgaggtagcgccaacgtggaaccgccgtgtagcccacggtgaaaccgccatgagtgaagccgatcgcctcgagccgttctatcagcttattgtcgggagcgccgttctggtcatccggcaaagaagctccattagtgtcgcgaagccgatacggggattcaggggtgatttccagctgtgaagcaccctttgccttggcatggcgtttcagcgcatccatgaagaaggtcaatgcttcggtgtcgtgatagtcgcacatcgggccatcatggatggccgcaaatgtagagaatcgagagcggtgagtttcgaacagcgccgccgcgacgatcttctcgccctccttgagggccagatattcgacgtcgatcccctgcgcggcgcgaaggcgtcccatcgccgaggtctgttggaaattgccttgtggatgcctggcggagaaatcatcgaactcttcgtctgtcaacttcaccagcacaaaatcacgcatgcttccctctgcctccgagtcaatcaggctcaccatgctagcataacgcgcacacgacgaatggggtccgagcagatgaggtgtgcacatcgttcgcactattgcctccacaatggctcaaagaacaatggcccgaagatgctgaacgtccggcttgcgttgaatcaaacgcagtgctatattctctacttggctcttggagccacgccaccttagctcagtggtagagcatccccctcgttcgtgggaaggtcggtagttcgattctatcgggtggctcttgttcatcaagaaggccgacgcactaagcgccggccttctttcgtatcgcccttgctaggtcataggcgcttgctagacacttgcccgattcgggaggggctgagttgctgagccgcgactcaactgtggcttagtcgcggctcagtgcagttagacagcctagacgacttagtgcagcagcgcctcgatagcggggaccaaggctttcagcgccttgcctcggtgggaaatcgcattcttctcggccggagtcatttcggcgctggtcagcggctcgccttcatggtcaggctcagtgctgacgcgaccggcaggctggtcgtccgggacgaacagcggatcgtaaccgaaaccgtgttcgccacgagcctcgcggatgatacgacctggcatgtcgccgagttccactgtctccgacttgatggcgtaccgggcatgcaccggggcagggctcccatctgcagccgtggtgtaaacggtgatgccgtcggcagccactccaccggtcacgtcggcactggcctcggtgtccgggaccaccagcgcggcggcgcagcggaagcgcgcggtacgcttgtcatccggaatatcttcgatttgggcgagcaacagcgcattattggccttgtcgtggccgtgagcacccgcccagcgagcagacagaatgcccggagcgttacccatcacatcgacgatgagacctgaatcatccgctacagcgggcagaccggtacggatggccacggcgcgggccttgagcagcgcgttctcctggaaggtgacgccggtttccaccgggtccggcaggtgaaggctgccagcggacaccagttcgatgttttcggcatccgcgccaagatcctcttcgagaatgcggcggatttccacaagcttgccttcgttatgggttgcgacgacgatttgcatgggttctcctttaagaaggctccccttgtcaggggagctggacattgcagaccgtacggcttccagccgacaacctcccctaaaggaaggggagctggcttagtctagggacaaagcggcacgctgggcggcttgcagttccttgttgcccttttcggccaagtcaagcagggtgccgagttcggcacggttgaacggacggtgttctgcggtgccctgaatctcgatgaaggtgccggaaccggtcatggccacgttcatgtcggtcatggcctgactgtcttcaatgtatggcaggtcaagcatcggggtgccgttgatcacgcccaccgatacggcggacacatagtccttaagcacgcggctggcggacttgatatggcggtgcttctccgcccaattgactgcgtcgaccaaagccacgtacgcaccggttacggaagccgtgcgagtgccgccatcggcctgaagcacatcgcagtcaagctgaatctgattttcgccgagcgccttcatatcgatgacgccacgcaggcagcggccaatcagtcggctgatttcgtgggtacggccaccgattttgccacgtacggattcacggtcggtgcgttcggcggtggcacgcggcagcatcgagtattcggcggtgacccagccgaggccggagtccttgcgccaacgcggcacaccaggggtaaaagtggcggtgcacatcacgcgcgtgttaccgcattcgatgagcacggagccttcgggggcgtcggtgaagtggcgggtgatgcgcacggggcgcagctcgtcgaccttgcggccgtcggcacgaattatttggtgattgccaagcatgtctttgatttcaaccatgcgccccagcatacgccatccgctctatgcctggatagcaactcgtcaaccatcatcaaaccccagcgcaatgtcattccctgcttacatatccattccatgacacttggctgcacgccactattttcttatgcaccactcgcttacagagtcaatgcctgcgtacctgatgaggattgggaaagatcgtccgctggaataagaatgccatattccatgaaatcttggttgaattgcttgcgctgcatagcgttgagttcgtaatcgattaacggcaaatatgtatagtccatgtcatgcaacggctcttcatatcgatgaagcacgtgcataattgccgcgctcggcagtggggaccaccatccatccaagccataccggtacggaggaaccaatgtcaagcgtctgttccttgggttgatatcccaacgcagaaaacggtataaaccagcgagaaacgcaatccagcacgcatcgttcacccgtgcaaccgctcggacgaacgatatacgttgatgttgaacattccgagcatgaatcagattgacgcagagcatcttcaacgtagaccaggtcgctccgctttctattgcatcgaaatcaggaggcctacgcagttgcgccaacaacatgtgcaattcgtcttccggaatcgtttgcgagggggccacggcttctaggtgaagaccaaaaccagcccgctcaagcccctcggccaaaacatcaaacaacatacctctttgcccacgcaatacgcgaccaattgcagaccgatccaaaccagtacgctgtgcaagctcataggcattccaaccagtctgcgacatcacttcattcagcacagccgcacacgaattaacagggcaaccagataccacaccgtgatgcacgacatcgcactgttctaacgctcgatgctctacagcgcgccgctctgatacgtcatcgttgcccgccgcgttctcatcattgagagtttcactcatcgaagtcaccttgcctcggccgatttcccggtcatttcatcaaaccgcaatcatcatatcccacaatcccatgacgatacgattcgtcatatcccacaattcagagacggtatgattcgtatcgcatcagttcacacgattcttcaacgattgctccgcaaacgattgctctgcacgcatcacggcattctatcggcacactattcctcccaatcagcccaacgcaacatcacacgcaacatcacacgcaacatcacacgcaacacccctcacgcaacactgcgccatctctgtaacatcaccgacaacacggcaatcccacaacgtctcggtgcaatatcctctgaaatggtttggtttttcactccacctcgtcggcatcctgaccaggataggaatatgtgtcgttccg

SEQ ID NO: 2135 - DNA, 2672 bp, Unknown
  R51_24m  MAG No. k141_6814
aattgcgtttgaccgcactccgtactatattgttgcgagttgctttgcggagcaaagtaacatccaaggggctgtagctcagttggtagagcgcttcgttcgcatcgaagaggtcgcggtttcgactaccgtcagctccacgagaccctctgcattcattccaccgcagagggtctttttatttgtcttcgttgaaattctgccatctcgcgtttcaaggggctgatttggggtttgccggaggtctacttgcgtttcgaggggctgatggtcaagtagatacgccgccaaaatggcggaatagcgttgcgtcaaagccgtttgtactggtgcttcaccggatgaggagccccttgaaacggaagtagacttccggaacatgtgaaatcagcccctgcaaagggagaatgcctcgattccgccatggattgtcgtggattgctctgtggtatgggcaatactgggagtatgacaagcgcagatgagttgaatgagcagtatgacgctgacggtagcgtgacgcaagtgcctgaacgcaatgatgaagttcatgccggcgaatccgccgccacccaatcccgcgaatcggccgtgaccgtccccgccggcaccgtggtgctcgccgcaaccccgatcggcaacgttggcgacgcctccgcccgtctggtggccctcttggagcgggccgatatcgtggccgccgaagacacgcgccgcctctacgatctcgcccgtcgcctcggcgtctatgtgaacggtcgcgtcatcgcctatcacgaccacaacgagcgcgacaaggccgacggcctgctcgaccaggtcgaaaccggcgccaccgtgctcgtcgtgtccgatgccggcatgcccaccatcaacgaccccggcttggccatcgtgcgccgtgccatcgaacgcggcctgcccgtcacctgcgcgcccggcccctccgctgtgctcgacgcgctcgccctctccggcctgcccaccgaccgcttctgctacgagggcttcctaccgcgaaagcattccgagcgcgtgcagtatctgcgcacgctgttgcccgaacgccgcaccatcgtgttctacgagacgcctcatcgcattgccgattcgatggacgatctgctggacgcgttcggcccgaatcgcccgatggccctgtgccgcgaactcaccaaggattatgagcagattcgtcgcggcccgattggcgagattcgccaaagtgtgattgatgatccgccccgtggcgagatggtgctggtcgtcggcggcgcgtccaacgaggaggccgaagcggccgcgcccagtacgttgagcgtggatgacatggccgtgctggccatcgaccgtgctttggaggacggcctgcgtatcaaggacgccatcgcgcaagtggtgcaggagcatccactggctgacggatcgttggccaatcgcaagcaggtgtatgcggctgtgctgaaaatcaagggatagcgcagcagccggcgattatctccccgttacgcttccatcgactcgaacaatatttccaacgcctgccggaccccgggcccaccacgctgcgagaccaattccagcaaaggcgcgtcggctttgggattggcaaccagccatttacgcagttcgggcacgtgatatgcgatgtgccagagcacggcaacatccgtatcgggcgaacatgccaccgcgggcgtaagtctgatgggtggttcaggcggcgcggtcatatccgagattgcgcgcgatgcggattcggatgagtgtgccgccgccgcgtggcgaggcaaccgttgcgcctgccgcaaatgccgtaaacggtgagcggcatggcggcctctgcgatgtcctttggcgatgaatcccctcgtcatgcgcattgctccaaagccggttcgtcaatctccttctgcaccgattcaaaaaacatgcgtgcgcgtccggcatacttgtgatgccgatgctccttgacgatttgcagacagtcgtttggccgaaactggtacgcggacatcagctgacacaccagtgcgttgacggtggaaggatcggggatgtcttcaggactcatcaccaggtcgcaagccgtacgggctggcgtggtgacaggcagcccgccgagcttgatgatttgctccggcaacgtcaatcttttgaatacgcggatgcggcggctgacggatgccgagcggaagtgcgatgtggagatcacgtctatggtgctcggaaagtcggggcctcccagccatacccaagcggcggtcatcgaacacaccacagtgccaaacggggcgacctccgcgacgatttttgcgcgaccatacagtgtgcccgaatgctcgatccagtagccggcggaatcgtcgagcttacgtaacgcgccgaaggcggccagacggttaaggctgagcggtcccggcagatccttggtaaacagtatcggcggcaccgcgggctgcgcggttgccggcgaggtgactgttgtgatgtccgtcatcggacctgctgtgatatccatgaccgaacaatatgcagaagtacggcttgcgcgccaccggataagcgaaaacggtggataagtgcataacttcactaggtgcgcgaatgatgtggataactcggtggatatcgacaggcggaagtgtgtgcggatgtgcgtggacgtgcgt

SEQ ID NO: 2136 - DNA, 11822 bp, Unknown
  R51_24m  MAG No. k141_6851
cagctggcatttcccgccatctcgctcatgaaatgtgaaaaaccgccgaaaactcgctcatgaaatgtgccagacggtagaaaactcgctcatgaaagtgtaaaatcattgatatagcagtaattcggaaaggggctcctcatgtatctcaaacgcaaagccgatgcctatctcaatgcatggaaatccgacccgaatcgctccccgctaatcatcaagggccctcgtcaagtaggcaagacagagactatcgattactttgccgcacacaactaccgttcggtagtggaaatcaacttcgttgaggaaccgaaatatcgtgcaatcactgcggacggttatggcgcgaataccatcgtccgcaatatttccctgatcgacccagccaaaaagttcattccgggcgatacgctcatctttttcgacgaaatccaggcccatcctgatatcgccactgcactgaagttctttaaaatcgacggcaaatatgatgtgatttgcagcggttcaatgttgggcatcagctataagcaaatcgaaagcaatagcgtgggatataagaccgactacgaaatgcgatcgttggacttcgaagaatttctgtgggctcgcggatacgatgaggccgtcatcgaaagcatgttcacccacctgtgtgatgctacgccattctctgaagtggaaatgaacgtcttctccacggcatttatggattactgcgtgcttggcggcatgcctgcggttgtcgcctcccatatacgcactggcacgttcgagggaacactgcaattgcagcgccagcttattttggactaccaggaggatatccgcaaatacgcgcaaggacccgatcaggcacgaattctcaacgtgttcaaccatattcccgtgcaactcgccaaggaaaacaagaagttccaaatcagcaaggttgccagcggagcgcgtttcaaagactatcgaggatgcgtggaatggcttgaaacctcgggaatggtgaatatctgccgatgtatgtcctatcctgaactgccgttgaaaggcaattatgacgaaaacaagttcaagatatatttcggcgataccggtctgttcgtagcgatgcttgacgacgaggccagtgatgatctgcgggccaatcgtaatcttggtgtctataagggtgctatgtacgagagcatcgtctctgaagcgctacggaaatccggctatgacctgtactactacaaaaaagaggattccacactggaacaggatttcttcgtccgcacgcgcgaatggctggtgccggtggaggtgaaatcgaaaaaaggcaccgccaaatccatgcggacgctaatcgcttcggattcttatccggaaattcagttcggcgtgaaactatccgccggcaatatcggtagcagcgaacacgtgttcaccgcaccatacttcaccacatttttgctccgacggctcctgcgcgcttatgacgaggggcaggcacctatgctcaacaatcctgagcggtagcccctattcgtctgcgggcacggcctggcccgggcaggtatggaggacggcgagcatggcgtccttttcttgggaggtgacggtgagctggtacttgtctttgacgccaatctggcgggccacgtagtcgcaacggtagtcggcgttggtgggtagccagtaggcggcggaagccgaacccttctcctgattggccggaccgtcgacggccagcaggttataggggtcattgccgaattcatggcgtttggcagtggaccagtcgtgcgcaccggattgccaagcgttttcaagggccaccacatggtcgatctgcactttggcgctggtggcgcggccacgtacgaaatggatggtctgggcggtgtacggatcggccagtgtgccggactcgaccacacaggaaccggcgtatttgtaggtgatgtccgtgagatcgcgggcgagcacgtcgtcgcgtacgtcgcagccattgccgtcgacgtcggtggtgcggaaaccgaaggaatcgcggtcgtagccggaggagctttggttgtcgtctacggcgagcgcgttcaaagtgtcggcggctgaaccggtggcagtgtagccaccggtgattttggccacgtcggagctgacctgcggcagtaacaggccgatggtcacgccgattgctacggcgagaacgatgagaatcagcacgcgctccagcggtccagaggcgttgaaacgacggcggaagtgggcgttacgacgtgccatcaatcacgcataggtgaaggtgagggggtcgtggccggcgcgggtggggccgtcgagggcgtcgatggcagcgtgttcatcggcggtcagggcgaagccgaacaggtcgagattctccctctgacggtcggcatgcacggacttggggatgatgatcgtgccgttttcgatgtgccagcgcagaatcacctgggccgggctgacctcatgggcggcggcgatcttctcgatggtgccgtcgccggcgttgaggtcggcgccacgcgccatcggcgagtaggcctccacggcgatgccgtgcttcttgcagaacgccaccacttcgcgctgctgccacgtggggtgcagctcaatctgattgacggccggccatgcgccggtctccccgtgcagacgcttcagatcggcgggcatgaagttgcatacgccgagcgtgcgtgccatgccttcgtcgcgcagcttgacgaacgccttccaggtgtcggtgctgcgccagtcgaacggcgtgggccaatggatcatgtacatgtccacgtaatcgagctggaggagtttcagggagttgtcgaatgccttgagcgcggagtcgtagccctgctcggagtcgcgcagcttggtggtgacccacagggtctcgcacttggcgccggtgttgtatccggaagcggcgagcgcacgacccacgccggcctcgttgttgtatccggcggcgccatcgatgtggcggtatccggcttccagcgcagattcgacgacaggggccacgccctcgtcatcgatacgtagcatgccaaggccgacctgcggaatggaatggccgtctttcaaggcgatgtccggcacgttggcgggattgatgtgtccgttggtcatggcttgtgatgctccttcatgtactgcaactacacgccactgtacacggttatgcaggcgatgtgcgggtgctgcaaccaaacggcatgattgcgcccggccttccgtgtgggagagccgggcgcaatcatgacaacatcacgctctactcctgcgaccggccctcgccctattgttcccgggcgcgaatttgccccggtacaggcgtcaatcgattgacgtttgcaccggggcagaaatcgttgtcccggtacgcaatttcgggccattttcgagaaccaggacaagacaatccccaaagtccacataccccgacaaacagaatcggcggaatacagccaatcccgaaatcaacatactgtcccggttctcacgtagaacgattgacgtgcaaaccggggcaacgggaattgtcccggtacgcgaaaaacacccgttttcgcaaaccaggacagtgatttctgtcctggtacccacatcaaacgattgatgcacgaaccgggacagaatcgcatcgctgcgccgagacagacgcatctgacagccgacaaccgataaacgacagccgacagatggcatctggcagccggttgccggctgccggcaaccgcatcataatgccgcatcagtctctatcaggagcgcttacgacgcaaagcaagcgagaccccgccggccacgccgagaacgacaaccgcaagacccacggcagtcaccgcgctaccggtattgctcagcacaccagtgatcttgtcgccattcgcaccgttggtcttatcgccctcgcccgtatcgggattgatagtagccccgccattacccgcaccgtccgagccgttgccggaaccaccttcggcccgagcggtaaccgcaaccgtataggtttcggtgacattcggattcgacttgagcgttacggtaaccttcgccgcatcagcgggagcggagaaatcgtaatcgagcgtgaactggtcggcggcaagcgcctgatcgagtttggcgagcgactcgttggtgtactcatcgcgattgattttcccggcttcggccacggccttgtccaggttctccgtggatggcttcaccggagtttcggtctttttgacgagtgagaccttgtccacattgtggttgctcaactgtttggcgtaagtggcgtaggtgccggctttctccgggttggtgaaatgaatgacgaccttggcttcggggagcacttcgcgtatggctttggaacctgcggagaatactttggacatgccgtcccagccggagatgccggcgattttcgcagtggtttcgttgccgacctgcaccatgccgacgtccacgccggcttgtttgaacgtggtcagagtctgcttggtgtagtcgtatacggtgtcggcggttttgtccgcgtcgccttcaaaggatttccacgtcttgggcacctgctgcttgctggggtcggcccagaaatcggagtaatggaagtcgaccagcactttcagccctgctgccgtggctcgcttggccatggtcagtgcgcgatcggcgttgacgttgccgccgccatatccttggccgtctgcggtgaacggatcgttccacacacgcagacgcacatagttcacgccggattccttgagcaacgtgaacaaatcctcgacctcgccattggcgttcttgaacgtgacgccgctttcttccagcgagagcatggatgaaacgtccataccgccgatgaaatcatcgcttaagccttggatggccttgaccgagacgtcggctttaactggttcttcttcggtggcgtttacagtgaacgtgcctcctgcgcagagcattatggcggccacgccggatgccataatgcgagtaagcgcggtatttcggcgcatgctttttctcctttgaatggtgaacgctcagaacgaacgcccagtgatgcttggcgcttcctttccttatgcgccacgcggtacagctgtgtaccacgcaatcgtcaccttagcactttatgccgtgttggtcaaccggtgtatcaacgcctcgtacggcccagtacagcaacaccagcattacagcaatgtcgttcagcgtgtggaggcgcgggcgatgacctgggattcggtggtgagcagttcggacttggtgatgctgccgtcgatgcgtccgaggatgcgatccactgccgtgggagccgtccagtcaaggcgggaatccatggtggtcagcggaatctgcaggtagggggcttcctcgttgttatcgaagccgatgacctgcacctgcacgggcacctcataaccagcggtgcgcagagcggtcaatgcgccgatggccaactgatcgttcaaggcaatcacaccgtcgaatggcacgccggaatcaatgagccgctgggtcacacgggcaccggctccgatggtccaatcctgatcggtgttgccaatcagctgcggatccaaggagagcccacgcctacgggtctcttcgatgatgccgcgcagacgcagctgcgcgttgccttctacggcattcagcaatgcatcttcgtcgtaaacgtcacgggcaccgatcactgcaagtctggtggaaccgcggtcatacaggtagcctgcggccatggcggctgcggatacatcgtctggggtcacgtgatccacaatgccccacgtggtacgcgcgccaacgatgaccagcggaaaatcaaccttcagatcatcgggcgaaatgttttccacctcgctcatggaaaggatcatgccatcggacaccgtggagttgaacttcttcagcagatcgcgcgcgccttccgcggagccttccgcatacgtggtgacgtatacggaatagtcgcgctgacgggcggcctcgatggtgcggttggcgagctcggccagatatggcggaatcagcgaaggcacggcgagggtgatgaagccggtgtgatcgcggttgaggttgcgggcggccacgttgactcggtagtcgaggtccttaatgaccgactcgaccttggcacgggtctcatctgtcatacgcccggagccattgatcacgttcgacgcagttttgagcgatacaccggcggcctgagcgacatcgcgtagcgtcactcgacgcttggctgttttctcgtcgctcatgccgcactcctctatccggacaacattgccattctagcgcggtttagcaggacgttttagcgataagaatggcgttgcggttcagcgtatatccaacggcgtcagtctcgcaacggtgggcgatgatgggatcaccttccacaccgttgatggcgacgggctggtttgagcggttgaggtagaaatcgaagcgggtggagccgtctgcggatcggcggatggtgtgcaggatgcggggatctgtggtgggataggttggagtttgaccactctcagtcggctgcgccgacaactcctgccatcgggagccaagtgctttgagcaactgggcaatgtcgtgacggttgaggtcgcagcccacgtagatggcggtaccgttgccataggggcggctggtgatggcgggggtgcgctccagctcccagtcggcggcggactcgcctgcgtaagaggcaagcactgtggtgtccgcggctacggaagtcacgtcgttctgccacaggcgggtcgtcagaccattggacaggctgatttcgctgggctcgccttcggcttcttcaccgaggatgttgaattcttcggagcggatgccgagcatgtcgcgtaggagcccgttgccggcgccggggtagccgccgaggccgatgtggaagtgctcgtcgatcaggccggcggcatagccgacgatgacggttccgccggccttcgcgaagtcggcgatacggagaacgtcttcgtcggacaggctgagcacggtgggcagcacgatggttttgtagccggtccagtcgtaggcgagcggcaccacgtccgcgcgcagcccggcatccaggaagccgcggtaccagtcgcgcacgtcgtgccagtggttgagtttcatgctgggcagggtttcggagcgtgtggcccattcggattccgcgctgaacaggatcgccgtgccggcacgctcgagctcagtgccctgcagcccggcgtcggagagggtcttcagcgccttaccgagctcgcatacgccgcggaagaccttggaatcggcgcccgcgtggggcagcatggcggagtggaacgcctcggcgcccgacttggattgccgccattggaaaaagcagatggcgtcggcgcccatggccacgtgggccagggagtcgcgcatgagttcgccggcccgtttgcgtgtgttcagcggcttccactgcacggctgaggtggagtgctccatcacgtaccacggcttgcccagcgcgagggagtccatgagcgcgtccgagcaggcgagttcgtccaggtgggattcgccctcatggaagtagtgatcgttggacacgaagtccacctcatccgcccatttggcgtagttcatgacgcactggtcggtggagaccatgaagttcgtggtgaacggcttgtcggggcagatctgctcgatggcgtcgcgttcggctttgtagaagtcgagcagcatgtcgttgccgaaccgctcgtaatccaactgctgcgacgggttaaccatggcgtcgccgcccatgtgacgtggcagcagcacctcgtcgaaactgttcacgtgctgcgaccagaaggccgtgccccacgcctcgttcaacgcgtcgatggtaccgtacttggcctcgcaccacgtgcggaacgcggccaaggcgttgtcggagtagtcgtagcggttgttccagccgtattcgttgcccatgtgccaggcggtcacatacgggttgtccttgtagtgttcggcaagtttgcggcacaggcgcagcgcgtattccttgaacaccgggcttgtgggctgccacgactggcgtgagcccgcgttgacggtatgaccataccggtctaccggcagcacctctggatgggattcgtacagccacagcggcgcggcggctgtggcggaggccaagtccacggcgatgccggctctgccgagcctgtcgatcacatggtcgagccactcgaacgtgaacgcgccctcgaccggctcgatcttgtcccagctgaaaattgccagcgacacgacgttcacgccggcctcacccatgagacggatatcctcgtccagcgtctcctcgggccactggtccgggttgtagtcgccgccgaacgcgatgccgcggccggattccgtcagcagggacggccacctaaatgctctatgagtagtcatattaatcaaatcctttattgtatcggctcatggccggtgctgtgtttgccggttttgggctttggctcccctcagtctcactgcgttcgacagcgtcatcggcgctttgatcaaggcgtgaatgctgcgttgcgttactgcattgccatgttgccatgttaccgcgttattgcatcgctacgttgccacgttgccacatcacattgcattgccgcattgctgcgttgccgcatcacatatcgcaacacaaacgcagcaacgcaatgacgaccggagatggcatcgccgccacccgcgaggaaccgcaatgcaacgcggtaacgtaacgcaatgcgatgtgattcccgcgtagttacaggcagttacagattgagtaccgcatcagcaatgcgcatggcggattcgcggtgggagaccagcaccacagccgcgccgcgctccttgtctgcatgctgctcacccacggccatagcgtgaatggaacgtagaataatagcctcgttcaaagcatccaaacggctggtcggctcgtcgaaaagcaccagatcagcattgcgcaggaacacacgagccaaaccgatacgctggcgttcaccttcggatagacggtcgcccaactcgcctacctgagtatcaaggccatcgggcagggaatcaatgagatcaagcacggaggccttggcgagagcctgacgcaaacgagcatcgagaccgtcagctgctgccacctgaacggcatcgccctctgccgattgcgccgccaaccgctgctgtcgggaatcaacggtcttggcacccacttccccattgcctgcaacatttgcagcttcaacctcggactcaggcaaagcaatcagcagattgtctcggatagagccatcaaacaggtgggtttcctggctcatcatggcctgaatacgtcggcgagcatgcacatcgacctcgggcaacggcgtgccggacaacgtcacctgaccgcgctgcggatcccagtagcgcagcagcagcttgagcatggtggacttgcctcggccggacggcccctggatacccagcacgccatgctgcggcacgtcaagcgagaagtcggacaggacttcatgctcccccgcatatgcaaaggtgacgtcatcaagacgcatgcccatatactcctgcggcacaacagtgccgttctcggtcacagcgggcatctcgtccatcagtccgaacagtcggctagcggacgcgaaggtctgagtcaggttagcgggcaaggcggcgagcgccaaagtcggttcgaacgagctggcgaacagcacgaaggcggcaatcagagccggaatgctctgcgggttcgcgccggcacaggcaatagccacggcgaccgaagccgctgtgagcacagccaccaagagtccgctgattccggtgaaacggccgttgaccttgctgagtttggcgtgatccttccacaacgcatgggtacggtcctcgatggcctgcgcacgttcctcgccgcggccaaatcggatgatttcgtccaggccgcgcatgtcatcgagtatcacatcgtcgagttctccggcagcgccacggatggcagggccaaggttacgtacgccggtggcaaagaatcgcggcacaaggatgccgataaccaggtgggcggcaatcaacgccagcgccatccatgggcttagggtggcggccacaatcgtgtagatgatggtggaggttaccgcgatggccaccggactgatggtgtgggcaaagaagatctcaagcagttccacatcggtggtcagcatggcgataaggttgcccttacctttgcccgcgagcttggccggcgccagtctgcgcaacgcggcgaacgccttggaacggaagagtgcgagcagatggaatgccacattgtggttcagatattgttcaatgtatcgggtgatgccacgcagaagagcacagataatcatcatgatgacggcgggcgcaacacccatgccccacaccggattaccggtaagtgcaaatgccgcgataatgccgaacacgggcaggaaagtggccgaaagatggccgatggtgccggcggtggaggccgctgccatcagtcctgccagaggtcgggcttccttaagcagtcgcctgatcacttggaatgtgctcattttggaagacgaatcgctatttgcaacaccagccggagtctcagccgaggcctgctcactcccgccaacggaagccgtcggcaaagctgactgcaggcggtcaaccgtcatacccgcctctgcgcttacgcgcgctgcgccaccctcagtccgactgtcgtcggacagctcctgcttgcgggaaccaacctgcagcacacgccgagcatggccttctccgaagttctcaatatctgcctgcgtggtaaacagcttggcgtagacgccgtccgccgtcatcagctcggtatgggtgcccctctcaaccgacttgccgtgttcgagcaccaccacttgatcagcgtgttcggcgttggccatgcgatgggtgatcataataaccgtcttgccgcgggattgcgccaattcgcgaattgtatccaggatcagctcttcggattccatgtcaacgctgctggtcgcctcatcgaacacaaataccggcgaatcatgcaggagcgcgcgggcgatggcgatgcgctggcgttggccgccggacaggttggcggcatcggactcaatcggcatgcccagtccgttcggctgtgcgtgcacgaagtcggcaatgcgcgcctgctcgagcgcggaccacagacgggagtccacggaatccggcgaatcaggaatctcgtcatcgggcaaggccatcagaagattctcgcgcaatgcgcccgcaaacagatggctgctggcaccaatcacagtgacggctccggccagtgtttcgcctgacaaatcggatacctcgacgccgttcagcgtgagcgaacctcggtaaccggccagtgtaccggcgagcagcgaggcggccgtggacttgccggaaccggagatgccaacaatggcggtgaactgaccgggccgtgcggcgaaggtgatgtcagtgagcgcaggagcgacggcggaattggggctggtttcaccttgcttatcggcctttgcggatgcggacttggagtcgccgtgcccggcatcatcataggaatagccgacgtggtcgaagcggaccatcagaccgtcgtcagcggaatcggaatcgttggccggcagggtcgccgtgccatgctcgggctccggggtgtccagcagagcgaagatgcgcttggtggaggtcatgccgttcatcgccacgtggaagaacgagccaagctgacgcatgggaataaagaattcggcggacagcagcac

SEQ ID NO: 2137 - DNA, 3207 bp, Unknown
  R51_24m  MAG No. k141_7920
cagaacggcaacggccggaatggttacggcaatggcaacggcaacaacgatggcggcaccggtgatggcggcggcttctccgacccgttcggcctgtggtaaagctggttcagcgcgtcacacggcgttgagcggtaaccgttgaacgccgtgtcagataggcaaaggtccgcagcagtgagcaactcctgctgcgggcctttcgtatacgcgggaagcgtttggctgggtcggccggagcggcggcagatatcttgttccgtgggcttttgtatgcacgggaatcgttctggcaggacgtcagctgcaggcgcataagggctgcgagcccctcatatgcacgggaattcttggcggaatcgtaggaggggggcgattgatgccttccgactgagctgccaacgtagtttcgccgcccggcatgtcgcgttcaggccgctgatagggtaggccaagcgctgattcgggcaatgtctcgaacgatgcgcacaataattcaacacataactaaaaacgatttctttacgccgtgtatcggatggtcgcgcggagccgaaaggccctaagcaaagccgccggtgggttaacaaggcgtgaccgcagcgccgattgcgcgggccacgcttgccgcaatcgactccgtatacgagcgtaaggagcaatgatgagcggactcatcagattcttcaccaaaatcctcgacatctgccgacttgtgccgatgcttcccgttgttgttatcgccgcaatcccgctggcattgctgggcgattggcgcccatggggcaacgcaattgcgatgccggtgctgggtaatcctggtgtaggccaatggctgataatcgcgctggtggcaatcattgtgattgacacagtgcgtggcatgattgacgatttgcgccacggacaagtcggcgtcgatttgctggccgtagtggcgattctttccaccgttgccgtccgcgagtactgggcaagctgggcggtcatgctgatgattacgtccggcgaggccattgaggaatacgcgcaggccaaggccgagcacagtttgaccgcattgatgcaggcagcaccgcaaactgcgcacgtcgtcaacttgcctggcgtggggtgtggggctgccgctgataaggacgattcgtccgatggcttccggcgtgtaggctcggttccggcgacgtcctcccctcagtcgacttcgccgacagctccccttggagaggggaaccaagtaccgccgtcgaggggagctgactcgcggagcgagactgaggggagctggccggctgaggccgccacgcaccgcttcgacacggtgccggtcgagcaggtgaagctcggcgatgtgctcatggtgttgccgggcgaaaccgtgccggtcgacggcgaactgctttccggctcggccacgctcgatctgagcaacatcaatggcgagccggtgccgcgcgaggtgttcgccggtgcccgagtgatgtctggcgcagtgaacggttccactgccttgaccatgcgcgccacccaggtggccgccgattcccagtaccagcgcatcctcgaactcgtcgcttccgcacaggagtcccgtccggccgtggtgaaaaccgccgaccgattggccgttccgttcactgtgctgtcgctggtaatagcgggcgtcgcctgggcggtgtccggcataccgacgcggttcgcccaggtgttagtgctggctacgccctgtccactgcttatcgccgcgcccgtggcatacatcgccggtactggccgtctcgccgccgccggtgtgctcatcaaggcgcaggatgtgctcgaaaaccttggccgcgtcacccaggtgttcttcgacaaaaccggtacgctcaccgtcaagcagccgcaagtggtgcgcgttgagatgctgcctggagctgagacccgtcttaatgaggaccatgtgctgatgatggccggcgttgtagagagctattccgtacacatcctgtcgaagggcatcgccaaagccggtgccgacgcgatggcccgcttgcgtcagcgtttcgcggacggccagcgtctctgccccgaaccagaggccagctggcccggccacggccgcgaatatccggtcgtcaagaatattaatgaggactccggcaagggcgtgtccggcgaggtgaacggccatgccgtccgcgtcgggcgactgtcgttcgctgcagccggggaggatgggttcttgactgccgaggtagcgggtgtaagccgggcggatggcccacggcaggaggcggccgacctcctcagcccgcttcacggacagtcccctctgggcggggatactgaggcaggatctggccgtacgattgccgggaacactaaggaaaaggaaacgctgcgtacgcgattcggtatgctgcagccggacgaaatggcctcctacgtgtccgttgacgggcaactgatcgcccgcatcgtgctgcgagatgtacctcgcgccaacaccaaaaccgcgctcgccaatctgcacgaactgggtgttaccaagctcgccatgcttaccggcgataagcacgcctcggccgaaatcatcgcggacgaagtcggcatcgacgaggtccacgccgagctgttccccgaagacaaggttgccgccgtcaaggctgccacggaggcaagcgccgcgccggccgggcgcgcgaatcacgccgccagccctgtgtccgatgccgtagatggcatccggtccgatggttctcaaccgtcgcgttctcgatgcagccgcgccgccgcaatccgcaagccggtcacgatgatggtcggcgacggcgtgaacgatgccccggtacttgccgtcgccgatatcggcgtggccatgaccgacggcacttccactgctgcttccgaaagcgcccaagtggtcattatgaatgacgatattgccgctgtgccgcgcgctatcgccattgcacgccgtaccaagcgcgtgatgctgcaggccgtgatcgctggtctcgtactcgccaccatcggcatgattgccgccgccttcaacctcattccagtgatcgtcggcgctttcctccaagaggccatcgacgtggtcagcatcctctgggccctcactgccctcatcgaccgcgactaggcggggtatctcctcgactgagtcgcggttttgccccgctgacggtctgtaagcggggcgattctgtgggctaatag

SEQ ID NO: 2138 - DNA, 7094 bp, Unknown
  R51_24m  MAG No. k141_8321
atcgccgtcgcggtgttggtgcataacacagatgtatacggttcgctcgccgctggcccgatcatgcgcgcgatgatgcaggaggctttgcagcagtgaaacttatcgaaggacagcttattcaccgccgatatcgtcttgattcgcgtcttgcgcaaggcggtatgggcgaggtctggaaaggctacgatattcagctcggccgtgaagtggccatcaaggcgctgcgctcggacgtgaccaacgccgaggccaagctgcgccgcctgcgtgccgaagcccataattccgccaatctggcgcacccgaatatcgctgcgttgttcgaatactacgagcatgacggcatcggctttctgattatggaatacgtcccctcgaaatcgttggcggatctgttccacagcaagggcgcgatggatcccgtcgaactgctgcccattctgattcagaccgcgcgaggcctattcgtggcccactcgcacggcgtgattcatcgtgacgtcaagccggccaacatcatggtttccgacaccggcgaagtgaagatcaccgatttcggcgtgagctactccactggccaaggccagatcacccaggacggcatggtggtgggcaccgcacaatacatctcccccgagcaggcgcagggccagcaggccacgccgcaatcggacatctattcactgggcgtagtggcgtacgagggccttgccgggcatcgtccgttcaccggcaccactccggtcgatatcgccgcagcgcacgtgaacaatcccgtgcctccgctgccgaactcggtggacgtccagttacgcgaatttgtcatgtcaatgctggccaaggacccgttggaccgcccgaaagacgcgctggtggtgtcccgtacgctggcacgcatcgaacgccgtctgctggatcagcagaccgaaatggccgacaccgccatggccacgtccggcaatcgactgccgcgccgagtgaccagcacgccacgcattgttttggaggccccggcctcaagattgggagggaataagcaatgagcaccagtatgcccaccgcattggccggcggacgctaccagcttggccagctcatcggtcgtggcggcatggccgaggtccacgtggctcttgacacccgtctgggccgtaccgtggccgtgaaaatcatgcgcgccgatctggccaacgacgacatcttcctggcccgtttccgccgcgaagcacacgccgtggcccagatgaacaacccgaacatcgtgaacatctacgattcgggcgaagaactggtttcttccgaaagcggcgataccgagcgtttgccgtacatcgtcatggaatacgtcaagggccagaccctgcgcgacatcatcaaggtcaacggcgcactcagccagcgcgactgcgaacaggtgatgttgggcgtgcttaacgcgctcgactattcgcatcgcatgggcattatccaccgcgatatcaagcccggcaacatcatgatttccgagcagggcgcggtcaaggtcatggacttcggcatcgcccgcgctctggacgattccgcaaccaccatgacccagtcgcagggcgtggtgggcaccgcacagtacctttctcccgagcaggcgcgcggcgagaccgtcgacatgcgttccgacctgtattccgccggctgcgtgctctacgagatgcttaccgggcgcccgccgtttaccggcgattccgctgtggccatcgcctaccagcatgtctccgaagtcgccacgccgccatccgccgtggtgccggggctgccgaagatgtgggattcaatctgcgccaaggccatggccaaggaccgccagaaccgctacgccacggcctccgaattcaagaccgacatcctgacctacatgaacggcggcgtgccggtggcggccgcgttcaacccattgacggacctgtcgaatatgaaggcccgcaaggaagccgaacgtgatttgcccaccacgccggtggaaccgcagcagcagcccacccaggcattcaacccggtgaccggtcagttcgagcagattccaccggccaatggtgccaactcagcggcgttgcagtcccgtgcgcagcagcgtgcggcggcggccaaggccaagaagcgcaagaagatcatcatcggttcggcgatcgcggcgattgtcgcggtgctcgtcattgtgggcatcatgttcgccatgaacggctccggcaacaagtcctctgaagacaccgtcaccatccctgaagtgtgcaacgcttccacgtccaaggacaacatcaagctcaagcttgagagattgggcttgaagatgaccgaaaagcaagacaccgactccaccgagccggaaggcacctgcaccaagatgagcccggacgccggctccaaggtggccaggggatctgccgtgaaggtgtggttctccgcaggcccgcagtccactcaggttccggatgtcaaggagcgcagccaggaagaggcgcgcagcattctggaaagcgccgggttcaaggtgaacgccaccgtcaaaaccgaagacagcgccgacatcgccaaggatatggtgacgagaaccgatcctgccgccggtcagtcggttcccaagggcaccaccatcaccatatatgtttcttccggcatgaccaccgtaccgagcaatttggtcggtcagtcgaaggacagcgtgctacagcagtatgagggcaagttcagcttcaccgtggagcaggaaagctccgatacggtggaggccggtctgattacccgcgtaagccccgattcgggctcttccatcgcgcagggcgggtccatcaccatctgggtgtccacgggcaaggaaaaggtcgctgtaccgaatatcaccgctggcactgactacgccaccgccgaactcatgctcaaggccgtgggcctcaaggctcaggccagtggcccaaccgacagcaccgctgtggtagtcagcatcaatcctggcgctggcagccaagtagatgcgggatcgaccgtcaccattaccacgaaggccggcagcaccggaggcgacaccggtaccggagacggtggcaacggcaacggtgccaacaacggcaacggggggcggaacccgtgagtgagtgagcgccgggcgtgtgtgttgcgcatacgcaacgcacatagcgcaacacatgcgcaacacatgcgcaacgtaaacacgcaacgcaatcacacaacgcaaaggggaggggcttctgcacccctcccctttgctgtataaagagctatcccagcgcaacattcccgggaaagcgtcgccgcgcgcggaaaagctacttcgtaaccttgggctgaaggccggcggacttggccacggcgttgtcttggccgcagaccttaagccagttggccagcagacggtagccgtcctgggtcatcacggattcgggatggaattgcacggcgtacatcggcttgcccttgaccttgatgccctgaataatgtggtcgccctgcgtccacgcggtaaccaccagcgtatccggcaccgaatcgggctcgacggccaacgaatggtagcgggtggcggtcatggggttggccacgccctcgaaaatctcgtcatcgatatgttccaccaagctggtcttgccatgcatgatggtgggcgcatggcccacagtgcagccatacacctcggcgagcgcctgcaagcccaggcacacaccaaacatcggcacgccgctggccgcgcacaggcgaatcatatcctcactggcaccggattcggccggagcgccagggccgggagaaatcagcacgccatcgtaaccgtccagtacacccggcgcggctgggtcgatagcgtcgttacgcaccacatcaacagtggcgccaagggtttgcagatagcctacgatcgtgtagacgaaggaatcgtagttatccaccaccaaaatatgcgcggaatcggtcatagggctctccttgagggacgtgtactgcaagccatagtactaggctgccgtcagctcactgccacgaagttcgacatctgctgtaggaatgggatattggcggcggcccaagggaatccccactggaacagcgccgcggcggctgcgaacagcagcagagccagcagcagccatcgaatcggtgccacgccgggctgcaggcgcaacagtccgccatagatgctggcatccgggcggcgacgctcacccgcgcgaatctcgcgcagcaccggccagcgccatgccaccgcagcggcgatgaacagaaccagccacactaccagcgcgccgaataccaccttgtccagcgagccaatgcgggaagcgatcgagggggtttcggtggtggagaacttcactgcaccggacgaatcagtagtagccagctctttgggcacgccatcagacactttggtccagtacgccaactcaccatagctgatccatcgatgggtgggggtggagtatttcggctcacaggtagtcagtgtgatcatgcgtttggtgggattggcagtggagtcttccggattgggcgcgatcacatacacgtccgtgggcagcacaatctcgtaccgggtgtagtggtagacgtaccagtaatccttggtacgaacgatgatgggatcgccttcctgcaacttgtccacatcgcccaacggctgcccgtagccgttgcggtggccggcgacggcgaagttgccgacctgccccggcatctgggtggtgtcgtaatggcccagaccgtggcgattgagctgctcgagcgtggtgccttccacgatgttgcggtgccattgggagccgaagcgcggaatgtagatctgcgcaatcaagtcgccatatttcgcgtctttcggctgtactggagcatcgccctcctgggctttggcgatggtgaccgttcccccgttgttgctggggtcgctccagtcgacggactgggtggtttcgttctgggctcgctccgcctcgacaccggtccaccacatctgccagacgatgtacagggcgcaaatcacggcagcggtaatcagcagttcggcgcagatgccgagtgcctgccagatcaggctccgctggggcgaagacgcgccgcgtactgcggcacgacgggaccttgccctgctggcattggccgggtctgccgccattcgtgcggcgtcgtcctcggggaagggctgtacgtccgacacggacgcgagatcaatgggcgccggtgcgccgctgttgtgcctgccgtgtctcattgctgagtctgctcctcatctgtggtctttgacgtatcgaccgtggcatatttcaactgctgcagcaaggcggcggtaccggggaactgaaggccctcggcattctccaccttgtagccaatgccaaacgcggtcacatattgcttaagaatggtaatggcttcggagtcgttcaacgctgcgcgaagtctttgcgggtcaccaatcgcggaaatggtgaatggcggcgagtatttcttaccgtgcaacgacagcacgttgccggaacagatgaccgccgaattgaacagcacccgctgatccataatcatcagcgcatcggcaccgccggcccacaaggcattcaccaccgattcgacgtcctgctgatgaatcacgtaatcgttgatattggcggtcgtgccattgttgttgacggcgttctcccataacggagaatcatccagcgttaccgttacgccgctgccgctgagcgcgggcagcatcaggctggaatccacattgctggagtccttgccttggttctgcgtgctgtcagtaccgtcggtgccatcggccttgagcgcgtccgtaagattggcgacctgtttggtcagatcgctgacgtcctgctgcagctggttggcctcgcccacgccttgctccaccagatcggccgtatcgttggtggcggcaaccgtacgattgaccctcacgttggtgctcagcagaaaaccggtcaaggcaatgacgacgaataccgcgacaccaccccatagggagtgccgtgcgccgtgcttacctacatgtctggccatgaatttcctgtcttcttgccgactctggtcgccgctttcgagtgtagccactattatgacttttagcctattgaatggagactatgctgatggctgacgaagagctgcacgagaccgactcgaacaaccagaaggactggcagagcgagacctcatccagcaccgctgctgacgagaccgccaacaaagacaccgagcagaacgcagagaacgcttctgccgaggaagacgcggcttacggcgtgaatatggagcaggtgcaggccgtgctcaacgccactgccgataaggccacgctgaccccgcagatgcagcgcatgatgaaccgtcaggcggagaacaccaagcgtgttgaagaaaccattaagggcaccaagtcgaacccgcgttggttcgtgccgctgttctgcgcgtttatgatcatcggcctgatttggtgtgtggtgtactacctctccccgtccggctcctggccgattccgaacatcggcgcgtggaacctgggcatcggcttcgccctgatcatgatcggattcctgatgacgatgggatggcgctgagttccgactcgttgcgcttatctatcggtagatcgttttttctatcgttaggttgttcttagttcttatgcgaaaggccgacctcccgtatgcggaggccggcctttttcgtgccttagcctgttcatccacagctatccaccacttatccacgacttatccactacgttatccacagcctgtggatgaatcacacccatgtagttttccaccgaatgtggaaaaccatgtggataagtggtggataagcggcgtttctcggtgtatatctcgtgcataactttggcttggcatacatcgccacagcgagggaacagttatacacccgagttatccactgcaacaaacccagtaataccgcggcattcctaacttatccacataagttatccacagtcttatgcacttttctacacacttgtgcacaagtcaccattgtggataactcgttatcgtggataactcgtcattgcgcgcatctca

SEQ ID NO: 2139 - DNA, 19636 bp, Unknown
  R51_24m  MAG No. k141_8546
ccccatgagatatttaccgccctatgggtgagttaccgccccatgaaacgtgtaataacaaagcatgcccttgctggtggaagcgatgctttgctatttcgcctgcttgtcggcgaggatctcatccaccagcttgggcttttcggtcagctgtccggtgaagccgggacggatatccatgtgcagcaccagagaagtgcggtagccctgctcggcgagcttcttggcggcctcaccggccaccttgagcacgtcgtccagattgccttccacgttggtgaacagggcgttggtttcctgcggcagggcggattcgcgaatcacttcgacggcctgagccacgtatggtgaaacctcggagcccacgccattggccgacacctggatggctgccacggtgttgaggtacggtttgccggtttccgggtcgatcggcacttcctgagtaacggcattacggtcaagaaccatgattctcctttttcggtagtgttaagctcccctggcaaggggagcttaacaaccacacttatgtcagcgatacttccagaaatgatccatcgggccggagccgtggccgagattcagctgggtcttcagcgcaccggtcaggtacttcttcgcatgcttgatggccttgggcaacgtgtcgccaagcgccagatacgaggcgatggcggagctcagcgtgcatccggtgccgtgcgtgttcggattattgatacgcgcgccatcaaaccaggtcacggttccatccgtctcggcaagcacatcgttggcatcctcggtgccatgaccacccttgaccagcgtggcacagccataacgctccacgatgcggtgggcggcggcctccatatcctcctgatcgcgaatcagcgtatcggtcagcacttcggcctcgggaatgttcggagtcacgaccgtagccatcgggaacagcttgccggtcaaggccgcaatggcatcgtcactgatgagcttggcaccggaagtggccaccataaccgggtcgagcacgatgttcgtggcgtgatggaaggtgagtcgttcagcaatgacgtcgatgatgtcagtggcagacaccatgccgattttcaccgcgaccggcggaatatcctcaaacaccatgttgatctggtcggcgagaatgtccggtttggtgtcctgaatggaacgcacgccggtggtgttctgtgcggtgagcgcggtgatggcgctcatgccgaacacgccgcaagccagcatggtcttcagatcggcctgcatgccggcaccgccggacgagtcggagccggagatcgcgagaacagcgggcagtgtagatgttgcaatttgtgccatagtgttcattctaagtgaggcccatgatgtttttcggagcggttttccttgatgttttgccgctcctgtggtgagatggggagggtttgctgattgcgattgattcatgaaatgttcgggaggggacatggctgataacgatgtactgcgccgtgacggcgtcttggtgcgcatcaccggttttgacgatgaacgcaccgcatattttggcgtaatgcctaatgggcacaccacacagctcacatttccgcgtcaggaggtgttcgatgtgggcgacgtgttgctcgtcggcacggatttctatcgtaaagtgccgcatgatgtgtggccgttgaagccccgtgtgggcatcgtgcgccgtgcgctcaacgaaggcgtggtcctggagacttccgatggcctcgaactgcttgaaggcgattacccgaattcgatcatgcccggcaacaccgtgcagttcaccgacctgttcggcatcgaacgagtgctgtggcccacggccatccgcccaggcgaatccgatcacgatgacgacatcaagcagtaccgcatcacgccgggcagcgatccgtcgcttaccttcgattcgttcggcggttatgagcaggtgatcacgcgcgccaaggagcttatcgaaacgcagctgggcaacagtgcgcagatgcgtgcgatcggtgccaagcccatcaagggcgtgatcttcaccggtgctccgggcaccggcaaaacgcatctggcccgcatcatcgccaatgtggcggacgcgcagttctatctggtgtccggcccgaccatcgtgagcaagtatgtgggcgatagtgaggaaacgctgcgcatgattttcgccgccgcgcaggcggacaagcgcgccatcatcttctttgatgagatcgattcgattgcgtcctcgcgcgagaacgataccaatggcgtcggcaagcgcttggtggcgcagttgctgacgttgatggatggtttcgagtccaagggcaatgttgtggtggtcgctgcgaccaatcgtattgaggacgtggatcccgctttgttgcgtccgggccgtttcgactggcagattcctttcccgatgccgtctgagcgcgaccgtttgggcattctgcaggtgcaggcccgttcgttgtcaatcgagggcgaactgccgttggtggatatcgcacagcggaccgaaggctggagcggcgccgaagtgtgcgccatctggaccgaggccgctctggtggccgccaaggaccgccgcggcgcgatccgggctgccgacctcgtcaccgccttcgagcgagtcgagcgtcgtcccgaattaagacaccaccgggcataataattggctcccctcagagaggggagccagagaggtttactcctgggcggtggagtagagcttgccgccttgggcggtgtacttttcgctcatcgcatccatgccggcgaggatttcttcggggctgagcacgttggcggacaccacgtcgttatcgacattggccttggccttagccagtgcctcggagtcgatgccagcagcagcctccttcacgatttgctgctgagcggcctcgccaccgaatgccttgcggatgttctgggagatggccatcgagcagaacttcgggccgcacatcgagcagaagtgcgccatcttggccggctcggcgggcagggtgtcatcgtggaaggcgatggcggtgtccggatcgtaggacagattgaactggtcgagccaacggaactcgaagcgagccttggaaatcgcattgtcacgatccatcgcgtgcgggtggtgcttggcgatgtctgcggcgtggcaggcgatcttgtaggcgatcacgccctgcttcacatcatccttgttcggcaggccgaggtgttccttcggggtcacgtagcacagcatagcggtgccgtaacgaccgatctcggtggcgccgatggcggaggtgatgtggtcgtaacccggagcggtatcggtggtcagcggtccgagggtgtagaacggggcgcccttgcacacggccttctccagctcgatgttcatacgcacggtgtcgaacggcacgtggcccgggccctcgatcatcacctgcacgtccttggcccaggcgcgctcggtcagctcgcccagagtcatgagctcggaaagctgcgcggcgtcgttcgcgtcggccagggagccggggcgcaggccatcgcccagagagaacgccacgtcgtacttggcgaagatgtcgcacagctcgtcgaagtgcgtgtacaggaagctctcctggtggtggcgcaggcaccagtcggccatgatggagccaccgcgggagacgatgccggtcacgcggttggcgggcagcggcacgtaacgcagcagcacaccggcgtggatggtcatgtaatccacaccctgctcgcactgttcgatcacggtgtcgcggaacagctcccagctcagcttggaggcatcatcctcgaccttttcgagggcctggtacatcggcacggtgccgatcggcacgggggagttgcgaagaatccactcacgggtggtgtggatgtcgttaccggtggacaggtccatcacggtatcggcgccccacttggtggcccacgtcagcttctccacttcctcgtcgatggaggaggtgacggccgagttgcgcatgttggcgttgagcttggtcaggaaggcggatccgataatcatcggctcggcctcggggtggttgatgttgcagggcatcaccgcgcggccggcggccagctcggagcgcacgagctccacatcgcagttctcgcgggtggccacgtactgcatctccggggtgatgatgccgtggcgggcgtaccacatctgggtgatcgggtggtccttggcgcgcatcggctcatgcttgcgtccacgccattccttggtggcgcggccgcgcttgatggcgcgcttaccatcatcctcaaggttgcggcggcggccctcgtagtcttcgatgtcgccgcggtcgcggatccagtcgagacgcaggggcttcaaaccttccttcgggtcgcacttggggccttcggtgttgtagtcgtggaacggcgggttcgggcccacgccgggcgtgtcgctcagcttgatttcggtgtacggcacttccaggtcgtaggaaccatactgataggtgaacggtacggacttggtcttgcggatgtgcgccttgtcgcgctgcttggaaccacgggcggcgatgtccacgcgctgctgcttggcgagcttctgggcatccttggcgtccttggcgttggtgaacttcttctcagtggcctcggagccaggctttgcggccccttcctgagcagcctgagtatcagcagcgggggtgtgggctacgacgcgcggcgcgtagccgtgcttcttgtcgccgcggacggccttccagccttcgaccatggtgcgcgcggcctcttccgggttctcggcacccgcgatggcggagaccgcgaaccagccggcggccttggtgccggcgagcatggccatatcggctgcggtcacgccgccgcccacgaccaccgggaattcgctggcagcgcagatggtgttgatctgggcggcgtccagtgtcttgccggagccgtcgttgccgcccacggaagcctcgggcttggtggtggagacgtgcagagggccggcgccaatgtagtcgatgcagccgtcgggcagctcgttgatgagctgaacgaggctttcggtctcagccgacagacccacgatggcctcgtcgccgagcagggcgcgggcttctcgcggctccatgtcggtctggccgatatgcacaccgtccaccttgatgcccttgcggcgggcctgccacaccacgtcggcacggtcgtcgatcacaaaggccacggaatcggacttctcattgtcctcgatgatctgcgcgatgtcgcgggccatgtcggtcagctcagaggcatcggcctccttggcgcgcagttggatgaaggttgcgccgccgcgcagagcctgatccaccacgtcggtcagcggacggcctttgcagtcctccggccccaccacgaagtacgcggacaagtcgaagttgtctcgcatggaggcgtatgggtattcattactcattattattcctacctttgttgtttcttgtggaagtcttattgggaaaaactgttatgagctccctcatcagagggaactgaaactactgcaccaaaatctcggattccgccacctgttcggcggtaacattccacagcgcgtcaaggaacgcgacctggaacgagcccggcccgtgcgaagtcgtatcggctatctctgccgcgcggttgtacagcagagatgcggacagagcggcggtcaacggatcggaaaccgccagatatgtggcagccacgccgcccagcgagcagcctgcaccgatgatcttggtcatcatcgcgctgccgcccggcagtcggtacacggtttcgccgtcggtcaccagatcggcgatgccggacacagccactgcacagcgggtggaagcgtcatgggaggaatgcttggcgtgctgttcggtcagatactgtgccagcgccaccgccgcaccggttgcggactccacgtcgtcgacggattccactccggcggggcggtgctcggaagcgtcccccacggtttcggtattgagcccccacatgttcgccagcgcgattacctcggaggcgttcgcgcgaatcatggtcgggggagcggccttgaaggtctgaagaatggcggtgcgggtgtggccgatgccggcggccaccgggtcgagcacccacggcttgtccaagtagttgagtcgctgggcgatttcgggcagcgcatccttatagaacggcagcagcgtgcccacgttgatgtagttcgcgcctgcgattttcgcggtttcgatcacgtcgtccggcaggaaactcatggccgcagtgccgccggccgccagttgcgcgttggcgaccaaattgatggtcacgaaattggtgaacgactgggccaatggggtcgtctcgcgcacgcggcgaacggcatcgacgatatcttcacggataggtgaatcggctggaaccggagtcccggcggtacaaccgctggacataccggtaaacaatgatgcactattgctcatttactgctccctacgatggtcttaaccaacaggttctaagggtcaggctcaggcctttctcaactcgcgaaccacatgcgagtccccctgcactacagtgccgacgctatgcgccaacatggacattatcgtgacggatttgttcgatacgtgtcgtcaggtctggcgcgtcccgtccattcgtgatatgtggacgcctccgccgagcaacatctcccgaatttgtgacgctgacgcgatgtcagtggtacaaattggggaagggcaaaacaacaggaacaatatggaggtgtttgcgatataggaatcgctgcgaacggccgctcgtgagacgcggaacatataccggacaatgccgcctgacctgtcaccgtatacggctatcctgaagcggttgttattagaccccaaaccgttcaaaccagaaggtgcattgtggctcagtccaaactcgatgaagtcgtatcccttgcgaagcgtcgcggcttcgtgttccccgccggcgaaatttacggcggcacccgttccgcttgggattacggccccctcggcgtcgctctcaaggacaatatcaagcgtgaatggtggcgctccatggtcgtcacccgtcctgatgtcgtcggtgtcgacacttccatcattctgccgcccgaagtgtgggtggcgtccggccacgtgagcgtgttcaacgatccgctcgtcgagtgcctcaactgccacaagcgcaaccgcgccgacaagctcgaggaatcctacgccgagaagcacggcgacaagatgccggaaaacggcatgaaggacatcgtctgcccgaactgcggcacccgtggccagtggaccgaaccgcgcgacttcaacatgatgctgcgcacccacctcggcccggtcgaggacgagaacagcctgcactacctgcgtccggagactgcacagggcatcttcgtcgacttcaagaacgtgatgacctcctcccgttccaagccgccgttcggcatcgccaacatgggtaagtccttccgtaacgagatcaccccgggcaacttcatcttccgcacccgtgagttcgagcagatggagatggagttcttcgtcacgcccggcaccgatgaggaatggcaccagtactggatcgacgcccgcacccgctggtacatcgacctcggcgtcaagccagagaacctgcgccactacgagcacccgaaggagaagctctcccactactccaagcgcaccgtggacatcgaatacaagttcggcttccaaggttccgactggggcgagctcgaaggcatcgccaaccgtaccgattacgatttgagcgcgcactccaagcactccggcgaagacctgagctacttcaaccaggccaccggcgagaagtacgtgccgtacgtcatcgaaccggccgccggcctgacccgctccctgatgtgcttccttgtggacgcctacgatgtggacgaggccccgaacaccaagggtggcgtcgacaagcgcaccgtgctgcgtctcgacccgcgtctcgccccggtcaaggccgccgtgctgccgctgagcaagaagcccgaactgcagaccgtggcacagaacctggccgacgacctgcgcttcaacgaatggatgatcgactacgacgagtccggcgccatcggccgccgttaccgtcgtcaggacgagatcggcaccccgctgtgcatcaccgtggacttcgacaccctcgaagaccatgccgtgaccatccgcgaacgtgacaccatggcccaggagcgtatcgccctcgacaaggtggccgattacgtggccgcccgcatcggcgagaagcgcacccgcgtgcccctgaagcctgtggaaatgggcggtgagccttggcctgagtccggcgttcaggaagccggcggtctgtactaaagacgggtctgtatagaggctcccctctatgaggggagctgtccacgaagtggactgaggggggctcttgctgaggcgactcccctcagtcgcctacggcggcagctcccctcaaagaggggagccaaaactatttcagaacaggaaccacatggcagaatctgaaaccgaaaccaccatcaccgctactcacgagaccaacaatctcgacccgcgtacggacgcgccggcacggcccgagactccggtatacatcgcccccgtgcagctcggcaacattaccgtgccgaccccggtggtgctttcgccgatggcgggcgtgaccaactggccgttccgcgtgatctgcgaggaatacggtcccgatggtctttacgtggccgagatgatcaccgcacgggccctcgtggcgcgcaacccgaaagccctgcgtctctgccatttcgccaaaagcgaaaaaattcgttcgctgcagttgtatggcgtgaatccctccatcaccgaacaggcggcgaaaatcgtggtcgacggcaacatggccgaccatgtggacctgaacttcggttgcccggtacccaaggtcacccgtcgcgggggaggctcggccctgccatggaaaaccgacatcttcaccgagctcatccagcgcgtggtcgccgtatgcgagccggcgggcatccccgtcacctcgaagatccgcgtcggcatcgaccataaccatgagaccttcctcgaagccggacacatcgcgcaggaggagggctgcaaggccgtaaccctgcatgcccgcaccaccgccgaatactatggcggtcattccgactggtcccgcatcggcgagctcaaggaacacctcaacattccggtattcggcaatggcgatatctggggcgccgaggacgcgctcgaaatggtgcgcgagaccggctgcgacggcgtggccatcggccgcggatgtcagggccggccgtggctgttcgccaacatcaaaaacgccttcgagggcaatcccgaacggctcaacccgaatctgggcgaggtctgccgggtgattcaccgtcatgccgagctgcttaccgagttctatgagggcgatgagatgatggccgtccacgatctgcgcaagcacatcgcctggtatctgaaagggttcccggtgggtgggtccacccgcaaggcctttatggaatgcgagagcctggccgatgtggaccgcgagatcggcaagctcgacccgaccatcgaatacccgccacgcgtggtcgacaaaccgcgcggccgcgtgcgtttcgccaagaaggtgcacttgccgtatgggtggttggaatcgcgtaccaccacccacgaagagcgtgaggcgctcttcggtgacgacccaatggacgccagttactgaaaaaatactgaaaatacacgcaacacgcgccattctgcgcgtgaatttccctccaagagtagcctgtttgcgctactcttgggtgtaaccgtgaagtgacaggagccaaacgtgagcgagatcgcgcagaatgagttcaacgacaagaccaacatcaaggttgttggcgtcggcggtgccggcggtaatgccgtcaatcgcatgattgccgagggactgcagaatgttgaatttgtggcggtaaataccgatgcgaaggatcttctgcgctccgacgccgacgtgaaaatctccctgtccgatcagtccagccgcggactcggcgctggcgcggacccggagaagggtgctaaggccgcacaggatcatcagtctgatatcgaggaatccctgaagggtgccgacatggtgttcgtcacctgcggtgagggtggtggcaccggtaccggcgccagcccgatcgtcgctcgtgcggctcatcagcaaggtgctctcaccatcgcggttgtcactcgtccgttcagcttcgaaggtcctcagcgttccgcttccgccgaatacggcatcgacaacctgcgcaaggaagtcgacgcgctgatcgtcatcccgaacgatcgcctgcttgagctttccgaccgttccatcggcatcatcgaagccttcaagacggccgataccgcactcctcgccggcgtgcagggcatcaccgacctcatttcgatgaattcctacattcacgtcgatttctccgacgtgaactccattcttcgtggcgctggtactgcgctgttcggcattggttccgcgcggggcgaagaccgcgccacccaggccgccgaaatcgccatcagctccccgctgctcgaggagagcatcgagggtgcccacggcgcgttgatcaacattgccggcccgaccgatctgaagctgcaggaagcttccgccgccaccgagcttgtacgcaaggccattcaccccgaggcccagatcatctggggtcttgctctggacgatgcctatggcgacgaagtgcgtgttaccgtcatcgcggccggtttcgatccggttacaccgcaggatccctctgccgccgctccggcaattgccgtaccggccgcccagccggctgccacgcaaacgcagcagcccgccgccgctccggccgcccagcccgtggccactccgcgtccggaattcaccccgacgaccgcagacccggcatccctgccctttgacgatccgactacctcgcatccgaacatcgccgtgaacgatcccgccggcgatctcgacattcctgatttcctgcgctgaaaggactgatccatggctgggttcatgaaaaacgcgatgtcctatctgggcatgagcgacgttgtggacgatgaggacgactacatcgaagaggacgaggagcagaagccggctccgaagtccgcattcgattccgaccatacggtcacgccgctggcatcaaccaccgcgcctgccgcatcgtcgactaccaagccgttccccggtggtcgcgtgaacagaatcaccaccatccatccgaagtcatatgaggatgctcagctggtcggtcgcgcattgcgtgacggtgttccggtcgtactgaatctcaccggtgtggccgaagccgtggcatatcgcattgtggacttctccgccggcgtggtgttcggcgtgcgtggttccctcgagcgtgtcactccgcgcgtgttcctgttgagcccggcgcaggtgaacatcaaggtcgaagagccgacaaaaccaacctcgtcccacgatttgttcgctgactgaccggttcagtagttttcgcattcgacgttatatcggtattcggccgactcccagcaaggagtcggccgattcttattgcgctccgagcaaacttttcatgcgcggttgttagtctgtcagcatgctttccttagtgttctctctgatcggccgcattcttgcatggctcatcaacgcgtatatcacggttctgttcgtgcgcatgattctggactgggtctccgttctcgcacgaaactggtatccacgtggtgtggtggcccagctgatcaacattgtgtattccattaccgaaccccctctgcgctggctacgtcgctatattcgtccattgccgctcggctcgatttatcttgatgtcagcttcatcgtgctgtattttgcgttggtggtactagaaagtgttgttctgatagtgttctgaggccgtttttgacccgccggaggcatatatctggcataaaaacccacgttgaatgttctgaaacgatggggtcgtgatagcattctgacttgagaccaacgtaagtgcgggcaatgccccaaagcgaggtgcaagatttatggctctgttgacgccgaaggatattagggagcataccttccagactgttcgattcaaggaaggttatgatgtcgacgaggtcgatgacttccttgatcaggtcacggaaaccgtcgaggctcttggacgtcaggcggtagccggcggtcaggccactcagtctctgggccctgacgtgaccaaccttaatgcgaagatctccgatcttaccggtcaggtgcagcaactccagtcggagaatgctggtttgaagaacgctgtggctcaggcccagcaggccgctcaggctggcaatgatcaggcggcacagcttgcctctgccaagctcagcgaagccgaggaatccaaccgcgcgctgtcctcccagaatgagcagctcaagggtcaggtcgatcagctgaacgctcaaatcgatcagctcaccgcccaggccgctcaggcctccggtaaccaggaagccgtcggccagcagatcgccgccattcagcaggaacgtgatcagttccgcgcggccaacgaggagctgtcccgtcagctcgccgctgctcagcaggagggttccgccgctcagcagcagtccgctcagatcgctgaactgtctcgtcagctcgaagaagccaagcagcgtgaaaaccagcttcgtgcccaggtttccaaggtcgagccgagcactgagaccggttctctgcagaagatcgctggcgtcgcttccatgccgggcaccgagcccgagcgcgccaccgccatgctgaccctggctatgcagctgcacgatcagtacgtggagaagggcaagaacaaggccaaggaaatcaccgaggccagccagaacaagtacaacgatttggtcaccaaggccaacaactactccgagcgtacccgctccgaggccgacgactactccactcgtactcgttccgacgccgacacctattcggatcgtacccgctccgaggccgacgcttaccgtgaccagattcacgcggatgccgagacctactcccagaacacccgttctgaggccgacgcatactccgtcaagactcgtcaggatgcggacaactactccaagtctcagcacgatgacgctgacaactacgagaaggaagtgcagcagcgtgccgccgagtatgacaagaacactcgttccgcagctgatgcgtacgacaagaacacccgctctgcagccgatacgtatgccgagcaggtgcgcgacaaccttcaggctcagtccaaggtcgtcgagggcaacatccagagcctcaagcagttcgagactgaataccgcgcccgcctcaccgagtacctcggccagctggcatcgcaggtttccgagtcgaacaactacgtcgaccagacctcgtccaagaccaactgagcgtaggcaggtacaggtcgtatgacgaaccaacagggacggctgcgcactcgcgtggccgtctttgcatgtgtggccgcggctgcgctgattgtcgatcagctcaccaaggcttgggcgatggccgcgttatccaacggtcagaccattcgcgtgattcccggactgctgtccttcaccttggtgcgtaatccgggcgcgtccttgggcatggggtcaggcgctacttgggtaatcagtctgttggccgttgtggcttgcgtggcccttgctgtggctggggtgcgcactatctccatgaaatggtcggtggcgctttctttcgcgtttgcaggcgctctgggcaacctgattgaccgtgttatgtacgctgacggcttcctcaacggcaaagtggtggatttccttaactatggctggtccgttggcaatgtggcggatatctatctggtagtcgccggtgtggtcctggtgattctgattcttatgggggagccgttctcccacaaggatcttatcgagcaatccgacgaatccctacagtctgagccggaggcggacgccaagtaatgagtcgaatggtccctgctcccgatgcattggtgggtaagcgtttcgacgtagccgtggccaaaatgctgggtatttcacgatctaaagccgccgatctggtcgactccggacaggcgcgcgttttagggcgtgaagttgcgcggtccagcacgttgcaggcgggggagaccgtcgaatttgatttggcggaggaacaggccgggcctgagcctatcgcaactgatatggctgttgtctacgaagatgatgatgtcgtcgtagtcgataagcctgtaggcgtggcggcgcatgcctcggttggctggaccggtcccacggtattgggatcgttgcgtgatcgtggcgtgcatatcgcttcctatggcgcggccgggcgtgaaggcattgtttctcgccttgatgtaggcacttccggcttgatgttggtgtgcaagtccgaccttgcgtacaccgagatgcgtcggcagttcgccgagcatgaggtaaagaaaacctatcatgcgctcgtgcagggcggtcttaaagagaacaaagcgaccattgaggcaccgatcgggcgcgccaaagtgtccgatttccgcttctgcgtgactccggccggcaaaccggccgttacgcattgggatgtgttggagcgtttcggccatgaggccacactggtatccgtgaatctggagaccggacgtacccatcagattcgcgtgcatttctcctcgattgggcatcctctgtgcggcgaccctatgtatggtgccaatccggtgctgtctgaagctttgggacttgaccggcagtggctgcacgccatgaagctcgaattccgccatcctcgcacccgcgtctggaccacggtccggtcccagtacccggccgacctggccgccgccctcgatgccatgcgtgcccgtcacatcgaacccgctgaacctgccgagcatgccgaagttctggtggactaattccgcaacgtgtgcatcatgcgttttaatatttagattcagttccagcctcgccggattcatcccagaataatgagagatcggtcatgatggctctccgtcatgaccataccccaagtgactgcggaggctgagtacgagtattcgtggccgtcatcaatcgatggtggtcattgggattcgcgccatgtactacgcagtatgttgtacgctctgcctggctgttgaacgaagtccacaagaaacagtagatactagggcggccagcggattagcaagacatcggttggtgaggactgctgacattgaactccgacggatgaattgaatactcatatggtatccgattctgaacaattgagtgggggcgttgatggttgccatcgtttgagctggctaaatgcgatttcgcgccacgctgtttcaacaacggtaacaacagctacagttgaactatgcatgggttgaagagtgcgattgacaggggagcggacgcgtgggcgcgttcgctgcctgggcgcgtgctcgaccggtatgtgtcgcggcgcggccccctgctggcgaatggtctggcatatggtctgctgttcgccttttttgccggcgtctggattgcggtgagcgtgttcggccttatcatggtcggcaacattgattggcagcagatgctgatcgacgcggtgcgtgaagtcattcccggtgtggccgactcgtttctgacgtcttccgcactaaacaccatgtcaagcacattgacatggaccggtctggccacgttggccatgttctggtggacggtgaccggctggatgaactcgctgcgccacgccgtacggtccatgttcgacgactgcggcgacgagctcaatatcgtcgtcgcaaggttacgcgatacgcttgccgccatcgccatcgcaatactgttcattctttcgaccgcggccggtacggtgtccggtggcatggtgcggcgcgtgttgcagtggagcggcatcgccagcagctcgctgccggggattctgctgctggagctgaccggtttctgcaccggcgtcgcgctgaacttcgccttgttcatgctgctgttgcgtgtggtcgcgcacatcaaagccggacgattcacgctgatcggcgcgtcgtcgggttccctgacggtttcggtgatgcagctgctcggcgcgcgactgctgaccggcgcctcccgcaatccgctgctcgcaccgttcgcggcgttgatcggcgcgctggtgtggttcaatctcgtcgcccaggtcatcatgctgtgcgccgccctcatcgcggagtgccgacgggaatgctgaacagccgcccagaccacacggtatggtggggcgcatggctgattacgggaacaactttgtgcaactgcataaccacacgcactattcgctgctcgatggtgcgtcgaagatccctgatttggccaagcgtgcggccgaacttggcatgcctgcggtcggcatcaccgaccatggcaacatgcatggcgcctacgagatgtacaccaactgcgtggccaatggcgtcaagcccatcatcggcatcgaagcttatgtgaccccggaaaccgcacgtcaagacaaatcccgcgtgcattggggcactgaagcccagcgccgtgacgacgtctccggtggtggtcttatcacccacttgaccatgtgggctgaaaacgacgaaggcctggtcaacctcatcaaagcttcgtccgtggccaacctcgaaggtcgcgtcatgcgttatccgcgtatggataaggaggtgctcgccacctattccaaaggcgtgatcgcatcctccggctgcccctcgggcatcatccagacccgtctgcgtctcggtcagttcgatgaggccctgcgcgccgctggcgaattccaggacatcttcggcaaagacaacttcttcatcgaactcatggatcacggtctgcccatcgaaactcaggtgaccggtgacctgctgaccatagccaagaaactcaacgcaccactgctggccactaacgattcccactacgtacacgccgaagatgcccaggcacaggacgccatgctctgcatcaactccggttcccgtcttgacgatccggaccgattcaaattcgacggcaccggctactacatcaaaaccgccgaagagatgcgcgaactgttcaaggaccatccggacgcctgcgacaacaccctcgccatcgccgaacgctgcaacgtgatgttcgacgaccacgaagacggcgcgttcatgccgaaattcccctgccccgaaggctgggatgagacctccctgttccttaaaaaagtcgaggaaggtctggagaagcgttacgacggcaacccgccgctcgacgtattgaagcaggccgactacgaatgtggtgtgatctgccagatgcagttctgcggatacttcctcgtggtcgccgactacattcagtgggccaaggaccacggcattatggtgggtccgggccgtggctcggccgcaggcgccatggtcgcctattccatgggcattaccgagctcgatccgctcaagcatggcctgattttcgagaggttcctgaaccctgagcgagtgagccttcctgatatcgatgtcgacttcgaccctgaaggtcgtgcgcgagtcatcgaatactgcggcgaaaaatacggcaccgataaggtcgcccagtgcgtgatctatggcaccatcaaaaccaagcaggccttgaaggactccgcccgcatcatgggctacgagttctcggtcggtgaaaaagtcaccaaggcgctgcctcccgcggccaccggcggcaaggatatcagcctgcatgacatcttcgacccgacagccaaacgctacgccgaggccagggaattccgagaactctacgattccgacccggacgccaagcgcatcaccgaagaagccaagggtatcgaaggcctgatccgacagaccggtgtacatgcctgcgccaccatcatgggtagcgcgcccatcaccgacacctcgccgttgctggaacgcaccgatggcaccatcaccaccaccttcgaataccacacgtgcgaaacgttggggttggtcaagatggacttccttggcctgtccaacttgacgatcatccacgacaccctgaagaacatcgaggccaacggcaaacccgccatcgactacaccaagattccgctcgatgacgccgaaacctacaaactcatgtcccgaggagacacgctcggcgtgttccagctcgattccgacggcatgcgttcactgctgaaaaccctgaagcccgataacttcaacgatatttccgcacttatcgctctgtaccgaccgggcccgatgagtatggattcgcacaccaactacgccaagcgcaagaatggcctgcagaagatcacgccaatccaccctgagcttgaggaacctctgaagcaggtgcttgacgagacctatggtctgatcatctaccaggagcaggtgcagtccgccgcccgaatcctcgccggctattcgctgggcaaggcagacgtgctgcgtcgagccatgggtaagaagaagcccgaagtgctggccaaggagaaggtgccgttcttcgccggtatgaaggagcatggatactccgaagaggcctcccaggccgtgtgggatattctggtgccgttctccggctacgctttcaacaaagcgcactccgccgcatacggtctgatctcctactggaccgcatatctgaagacgcactacccggtcgaattcatggccgccctgttgcaaggtgccgccaccaacaaagacaagaccgcactgtacttgggcgaggcccgccgcatgggcatccaggtgctctcgccggacgtcaacgaatcggtgtacgagtactcggcagtcggcgacgtcgtccgattcggtcttggtgccatccgtaacgtgggtgacaaggccgtggccgatatcatcgccgaacgcgaaggcccgcgcggcaagttcgtgaacttcatggacttcatccgccgcgtgcccctgaccgcgctgaaccggcgattggtcgaatcgttgatcaaggccggtgccttcgactcgattgacccgaaccgtcgcgcgctgttcaccgtgcacgaggccgccatcgactcggtggtgagtctgaagcgcaaacaggcggagggccagttcgatttgttctccgatgccgaggatgggggagcggaggccatgggcgacgcttccgtgaccgtacccgatcttgaggaatgggacaagaagaccaagcttaacttcgaacgcgaaatgttgggcctgtatgtgtctgaccatccgctctccggtatgcagtcgattctcgcgtccctgcgtgaaatgtccatcgcgcatctggttgatcgagccaaaacgatgggcgaaggacagcaggtcacgttggctggtttggtcaccaatgtggaccggcgcgtatccaagaagggcaacccctgggccatcgtgaccatcgaagacatggaaagctccatccaatgcatgttcttcggcaaggtctatgaa

SEQ ID NO: 2140 - DNA, 10344 bp, Unknown
  R51_24m  MAG No. k141_8642
atccggccgatcgtaacaataaatacgagacggaccatacttgaaaatatgacgcgtgggccctgacgacctctcaaagaacggcatgacaccaccatacgaccagcatcgccgcgtacgcaatacacatcacacgcggccggcaagaaaaccgcacaactcctgcgccaccggtagcatctgcgactccaaaccggggttcatgaaacggtcgtagatattccacctatcgcaccggaacacccacagatacgcccgccccgaagcaacaatcacattggggcgcaacggatgagcggacaatacctgcaacacattctgcggcggccccaccaactgtggccgaaccgcatgccccaacaaatcgcttaccgagcaccacgcataccccctgcgaacgagccggcacaggcaacaccaccacctgcatataccgcatggcgtaattactcaaaaagccattattgtcatacacattcagcgtgaacgtcagccacggtcccttgctgtagaacctgttcacccgcatattacgcacggcttcgccacgaagcaccaccgtgcttccagcatcgacggtccgtttggcctgccaatcacgcgcatggaccgaatacgtgaccgaagaaactccgggagccggctcataacggatctcaaccagcacaggaaccccgaaaccacggaaaaagcccaacacatcatcgcaatgcaaacgcacgccaccacgaacgacgcgatgacgccgttgcgataccaataccgccacgtcggccacatgcgctgcctgacacggaccatacgccagccgagcaacgaaccagccaccacgaacacgcaccagacaacaatgccgtaccggaaaaccctacccacccagaaaggaaaaccagatttatcagcattcagcagccacagcacgccgacgaacaccacggcctccagcatgtaccacggccaatccaactgccgacgaacaaccgcaccggcaacagcatccacacgatcccacatcatcaaccttctctcatcaaaaaccgcttcgtaaggcaaccatacagtcagcagtacggacaacaagccggctatcacacgtaccagcacagctcctgtgccacacaagcagcatctgcgactccagcgccaggggccatgtaccgcgaatcattgtcgcacacattgatcggcgtccacaggcaagccaggccattcgtcaccttcatgctgtcatgatttccgtggaaggccggggtgagcgctgcagaagcgcagacgatagccagtggggtctgttcgtccgtccgccatggacagtggccggccgaatacagcctcatgcctgtgggacggcacgcggatttggccggtttccgcgcggcgtcccgcaggaacgtgggatggtagagaaatcaatcgtttgacgttcgtggcgttccacactatcaaccgccagaaccgcgcaatcacgccaatccccgttacggaccataatcatcccccgggctctctgcgggacggcagacgaaaaaccgcgaaatccgcgcgtcgtcccgcacttcgcccggtccacgaacaggacaagcatcaccgatagaccgaacacacatctacagccgcgacaagaaccccaacagctagccgcccgccccggatatcgccgtccaatagtaaatcgagcccaaaacgcaaacccaaagcactgactcagataataaaactcggattttccaccacagacagcgagaaactctcccctataccaagtagcgtacgtgccaccttgctcgatagacgaacaatgagaagtatcggttaacgggcatgccgggcaggtcgatgggctctggcgcgggaacgaagacggcgtaccagcacgaatgggccggcaaacgtgatcgtatacaacacgacggcgaggaacacgctgagccatgcggtgaacatgcccaacggcatctcctctaccggagtggtctcggctatgcatgcaacgatctatcactccgatgttgtggtcagtatgcgcggcagttgttcgtcacggttgaggaaagaacgcgtttggcaacgaagtagcgtacgccggccttcctcagtgcgggtgtataccatggtgcaatgcgtcaggcagcggtccaactgccggcgcagtatttcggcgtcctgctggcggcgggcaaatatggacgggaatgggaagcttacaccgtacgtgcgcacgccccattccttgccgatgatgacatatcgcggattgttgatgggcgcgagtagctccttcataacgccggcgaacagcacctgctcgcgccgcgaaccaccaatcagcatggcacgcaacgccgtgaatctgcgacgtgtctggcggatcgaggaagtcactcacctctttgcctaccgcgttggtttctaggcgctcaggttccgcagtcgccaaatgccagacattggccaccttatcggggtctgcggccacgctgcggttggcggccatgctgtatgcttcactgcatcagtgtaaggcatgaatcaataggttttgagccccagatcgatggtgagaatgatgccggcgattacggcggcggcgcgcatgatgtttgcgggaatcttgcgggtgatgggcggggcgatgtacccgccgatgaagcagccgatgcacagcatgatggcggccggccaatcgaccgcgccttggatgatgaataccactgaggcgctgatgttcgcgcctgtgccgatcagggttttcaatgcattgatcttgtggaatgggccgattttggcggcatcaagcatggcgagagccagggtgccggcgcccgcgccgaagtagccggagtagatggcgactgccaccacgcccagccatacccaccaggaatcctggctcatgggctgcacgagttgttccggcgggcggtgaggtgcggtaggggtggttgcgcgcttggcggcatcagtggcatcggtggcttcagtggcttcgatgtgcttgagttgcgcggtggcatccgcggcggcctgcttggcctgcatgcggccgcgcggattgatggcgatgatcagcgagctcagcaaaatcagcactggtgcggcgaattcaaagacactcgggtcgagtttgagcaacagaaacgcaccggccaccccgccgaacgcgccaatgaccacatacgtaatggagcgtaccgcttggcctttgagttctttgcgcgcgcccatcacgccaccgatgcccgtgccgaccacgccaacggtgttagaagcgtttgccaatacaggcggaatgccgaacgcgagcaaggccgggtatgagaccagtgacgatgcgcctaccgcatagcccacgaatcctgcgccgattccggccaacagaatcagtagtaatgaagttatggaaaagcccgcaatcattccccgtatccttgtcgctcatcgaccggcacattgccggccttgagcgagaatacgctgttgaggattggttgcgggttttatgttggaatgtggacgtagctcctcgcggaagcgattccctcagtcgcctgaggcgacaactcccctcgcacccgaggggagccagaaggaaatcagagcgcttcgttgtattcgcgaaccttgagggtgcggtgggaggatgccacgttttcgacgatcagacgcttcagggcgttgtcggcggcaatgtgctcgtccagccaggcgtcaccgagcttgaccagcgtggcgggatcggcgtaacccgggtacaggccgttgagcaaagcctcggccatgtgataggtcttgttggcccagacccagtcaacggtctcgaagtacttggcggcgaacggctcggccagatcggggcgcggggtggcggagaagccacgggccacggcttcgagctgggagttggtcagctcgtcgttgtggagtgcctgatcccaagcccattccttggcttgcgtcgtggccatggaggcgcgggcgccgtaggcgaactcgcggttttccgtggtctccttcttggcgagctgcgcgtccacgtcgtcgttggtcatctcgttgacggaggtgagcgcttggacgatggtccacgtgaagttgttgtcgatttcgaggccttcaagacgcacggtgccgtccagcagaccgtgtgcgttggcggcgaatgcggcatcgccctcctcgccatagcccaggtaggcggtggcgagctggaactgggtgtccgagccggcttcggcggcgttggccagggtccacagctcggcggccacgtggcgcagcacatcgtcgcggcgggctggcgccacgtagtggtgggcggtggtgctcatgcaggccagcgcgtaacggaaggtggtggattcggtttccgtggccagaagacgcagggtcatgtccacgaagcgttcggccgggaattcgccgtcacgggtcatatcccagaaggcgagccaggtcacggcgcgggccagggcatcgtcgaaacgatgcaggttggcttcggcgaatgcctgggattcggcgtcgaaacgaatcttggtgtaggtcaggtcatcgtcgttgaccagcacgaatgccgggcgcggcttgcctgccgcggcctcgacgatggtggtttcgccatccacgtcgagttcgaactgctcggtgcgcacgatcttgccggtttcgacgtcttcgttgtagaagccgacggccaggcgatgcggacgcagcaccgggtgttcggccggcgcgctctgggtgagcttcaattcggcgatggtgccgtccgcgtttacggtcaggccggtggcgatcgtgttgatgccggattcctccagccacttggcgctccaggccttgagatcgcggccggaggtcttctccagttcgctcagcaggtcggctagggtggcgttggagtaggcgtggcggttcaggtagttgtggataccttcgaagaactgcgtgcggcccacgtagaatgccagctgcttcagcacggaggcgcccttggcgtaggtgatgccgtcgaagttgacgtaggtgtcgttgaggtcgttgatcggggcgacgatcgggtgcgtggtgggcagctgatcctggcgcaacgcccagctcttctcaccggagcagaaggtggcccaggcgtcatgccattcggtggcttcggcagtggccagcgtggaggtgaattcggcgaaggactcgttgagccacaggtcgttccaccacctcatggtcacatagtcgccgaaccacatgtgggccagctcgtgcagcacggtcaccacgcggcgctcggccagcgcgtcggtcaccttggactcgaacacgtaggagtcacggatggtgaccatgccgatgttctccatagcgcccgcgttgtattcgggaacgtagatctggtcgaacttggcgtacgggtagggcacgccccaggtcttggcgtagaacgcgaagcccttcttggtgatgtcgaacaggtagtcgacgtccttcgcgaaggccttggccaacgactgtcggcagtactgggccatcggcacggtgcgaccgtcttcgttcaggtattcggtgtgccattcggcgtacgggccggcgcagatggcggtcaggtaggagctcatcaccggggtcggctcgaagtcccacagacgggtgctttcgttcggcttgtcgccgagggtgccgtcgagggtttcgcgcggatcgtcctcgatggtggcaaccggcatgttggaggtgacgatccagctggcgggagcgagcaccttgaaatcgaaggtggccttcaggtcaggctggtcgaacacggcgtagacgcggcgcgcgtccggcacctcgaactgggagtacaggtagatgttgccatcggacgggtcgaccgagcggtgcaggccctcgccggtgttggagtaacggcacttggcttcgacggtgacctcgttcttctccttgaggtcggtcagttcgatgcggttgtcctggaaggccacggctgggtccagggacttgccgttgaggtcgatggatgtcacttcgtcggcaatcaggtcgaggaaggtcgacgaaccaggcttcgcgttgaagcagatgagcgacttggaaccgaagttcttcgcgccgaccgtcaggtcaaggtcgacgtgataatgaatcggcgcttcgataacggccttacgttcttcggcttcaatacgagtgagattagaaccgggcatgacttcaattactccttacggtcgtccctggataatccggactacttggtttctacggtttcgacgtcctgggcgatgtcggccacgacgggcacgatcatcggcttgcggtgcagctggcgcgcaacccagctgccgagcgtgcggcgcatggtctgctgcagcttgtaggtgtcacgcgtgccctgcatcatctggtcgttgagctgttcgacgatctggtgacgcaccttgtcgaactcgctttcgtcctcggccacggcgttcaggtagatcttcgggccggtgacgacctcgtggttgtcggtgtcgaccaccacgaacgcggatacgaagccctcggtgccgagaatgcggcgcttttccagctcgtcatcggtcagctcgccgacggaatcgccatcgacgtacacgtaaccgcacggcacggagccgacgaccgcggccttgccgtgatacaggtcgaccacgtcgccgtcttcggccaagaccacgttctgcgggtccacgccggtcttgacggcgatcaggccgttggccaccaggtgacggttctcgccgtggatcggcatggcgcacttgggcttgacgatgttgtacatgtacagcagctcgccctcgttgcagtggccggacacatgcacggcggcgttgtcgcggttgacgaccttggcgccgagctgcacgagcttgttgatcaccttgtagacgccgtgctcattgcccggaatcagggagctggcgagaatcacggtgtcgaactcgttgatgtggatgtcgcggtggttgccgtcggcgatgcggccgagtgcggccatcggttcgccctgggaaccggtgcacatgaagacgagcttgtcgtcctgaatgtcgttggcctgcttcaggtccacgacggtgccttcggggatgtgcaggtagccgaggtcggcggcgatggacatgttgcgcaccatcgaacggccgacgaacacgaccttgcggccgtacttgtgggcggcgtccaccacctgctgcacacggtgcacgtgggaggagaagctggcgacgatgatcttgcgggtggcctgggcgaacgcttggtcaagggccgggccgatggaggtctcgggcttgacgaagccgggcacctcggcgttggtggagtccatcatcagcaggtccacgcccttttcgccgatcttgccgaattcgacgaggtcggtgatgcggtggtcgagcggcagctggtcgagcttgatatcgcccgtgtcgatcagggagccggccggggtcttgacgtagacggccagggcgtccgggatggagtgggtgacgttgacgaattcgaggtcgaaggggcccaccttgagcttctcacggccggcaacctcaaccttggtggggttctggtggtgttccttgcacttggcgtccacgaaggcgagggtcagcttggagccgatcagcgggatgtccggacgcagcttgagcaggtagggcacgccgccgatgtggtcctcgtggccgtgggtgagcaccagggcgtcgaccttgtcgagacggttcttgatgtagctgaaatcgggcaggatgagatccacgcccggctgctcctcctcggggaagagcacgccgcagtcgatgagcagcaggtgaccgttgtattcgatcacgttcatgttgcggccgatttcgcccaagccgccgagcggcgtgatgcgcatggagcccttgcggtacttcggcggggcgatcagcacggcatcctgctggggtgcggtggcctgccgggtggcgttgatcttacgggacggcgtacggctgttggatccgttggcgttgcggccgcgcgcggaaccgcgacggcgagaattcgtgttcttgcttgttttcttttgttcttgtgccataacctttttgggatttctgttgtggtgcctctgctctgtcatgcaggggcggcgggctggcaacccgtatgcagcgtttcgggcttacagcagtccggcagcgcgcatgccctcttcagccttgtcaagctgagtggcgtcgggaccgatgttcggcagacgcatggtggtggaggggataacgcccttgaccttgagcgcagccttggccatgacggcctgatagccgtcgccattcaacgcgtggacaaggggggcgagctggttggcgaggcgacgggcggtggtgatatcgccgcgatcgaatgcctggacaagctgctgcatggggttggaggcgacgtgggcaatcaccgaaatgatgccgacggcgccgatggagaggaacggcaggaacaggccgtcatcgccggaataccaggcgaggccggtgcgctgctgcttctccactgcggctgcaagatcgccggtggcgtccttgacagccttgacgtgttcaagttcggccagtcggtcgtaggtttcgaccttgaccttcaagccggtacggccgggaacatcgtagacgatgatcggcttttcggcggattcgtcgacggccttgtagtggccgacgataccgtcctgcgaggggcgggaatagtaaggcatgacgacgagcaccgcgtcggcgcccgcttcctgagtctgttcgaccatacgcacggtgtgtgcggtgtcgttggagccggcgccggaaatcaccggaacgtcgacgacctccttgacggccctgaccagctcgaccttctcatccatatgggtgacgggcgattcaccggtggtgccattgaccaccagaccatccgcgccatcggcgacgaggtatttggcgagcttctgcgcggcggcgaaatcgacgctgccgtcggatttcatcggggtgaccatagccggcagaatgcggccgaaaggtgctggctcaagaaggtgcatgtcatgctcgctcatagtgttcaccgtacttcccattgtggactcttacattacgtaccttgattgttgctgaatgcgtggcattatgaccggaaccggtggcaatgccgtgatgcgcgtcccggcgcgcttccctgcctgaaatgcgggggcgactactggtcgactgcgggtcgattacaggtcgaggaagtggtcgaggccgatggtcaggccagccggagcgtcgccggcgagcttgcgcacggcaagcaggacgccgggcatgaagctggtgcggtcgaagctgtcggcccgaatggtcagctgctcgccggcgttgccgaagagcacttcctcgtgggcgttgaggccgcgcagacgcacggcgtgcacgtggatgccgtcgaccacctggccgcgtgagccgccatcggtttcggtggcgtccggcacgggggcgagtcctgcggccttgcgcgcttcggcgatgccgtgggcggtgtgaatggcggtgccggagggggcgtctaccttggtggggtggtgcagttcgatgacttcggcggattcgaagtatttcgcggccttggttgcaaagtagtcggccagtacggcggagatcgcgaaattaggtgcgatgaagaccttctgggtttcgggcttcgggccgttggcgatggcggatttgacctgggcgagtttctcgtcggtccaaccggtggtgccgaccaccacgtccacgccttggccgatcagggtcagcacgttgttcaggctgacggacggcacggtgaattcgacgaccacatcggtgttgtcggtggtgacctgggtcaggtcgtcgccggcatccaatgcgagcgccagctgcgtatcctcggcgttgttcaccgcttcgaccacgtgcgagcccatgcggccctttgctccgaccaccgaaaccttgatcatgtcttcttccctgtctacccgtacctgcccggcaatgtacccggaacgttttccaatcggcaatcagcctatcaccgccaagccctcacgccaatatcccgtccacagaatcgagctccctctgacaagccgaaccgtgaagaaaacgccggaggcgtttttaggtgagggcgaacgacagtgagcaataattcagttggctgaaagccatcattaattgcgttcgagctggccgcgaagcggactgagggagagaccccggcgaagccgccaaccatccatcgggcatagcccgatcccgtttcacccacgccgcttggccaaggcccatccggccaacg

SEQ ID NO: 2141 - DNA, 4187 bp, Unknown
  R51_24m  MAG No. k141_8648
aaatccccttcgaggaaactcggaggggatttcctataaccgcagcaggatatggatatgtaccacgacttccggcctggatgcgctagtgttgctttccaatagataaacggactgctgcactgcgagggtatgacactgatggcaggccgggaaagaaggtcgatgatgactggttcgcaagccgcacactgtggttccgtatccgcgctttcactgggactgcccgtctccacggcgattcccgaagccaaaggcacactgccgaaagccttgttcgtgggcaaggcaccgatttcaggcaaactcaagcagcgattggtgaacgaaatcgaatccattaccatgctggcgttggtccggtcgattaacactgggcttgcggacggcaaactggttccggaagtgctggtcatcggactgaagcttacggccaaagccactggcataccgaacgaggtcatcgatttgattgccgggcagcgtaaatcgggcatcgtgttcgtgtgcgtacgcgacgtgccgttcgagggcagcacacgtgaggaatgtgcgttcgccgtgcgtcgggcgataccggggcatgccggccacacgccgatctatcgggtatatgccggcgattggcagccggcgggggaggcccagctggagctggccggctctactattgatgagctgtgggcctcgctgtgctcacagaccattctgggcacgccggagatcgaaaatctggatgcgcgcatcattcgccatactgaaattgctcggctcgaatccgaagtggacaagctcacccgcgaccatcagcgcgtcaagaatcctgttcagcgcaatgaaatctatgccaagctccacaaggccaaaacacagctcgcaaaactgcgcgaagcatagtgatatgaaaaccattggggtcccgctggcgggagctggctcgcaaagcgagactgagggtggtccaggtccgtggcctagggctacgcccaagctaattgaaatattcgtgcatcatacagcgtacagttaaaccatgttccctctgctcgaaaccctggtcgccgtatacgaggtgggccagttcacgctggctgccgacgaactgaaggtgtcgcagtcgacggtgtcgtcgcgtatcgcccaattggagcagatggtcggcgcgccgctgttcgtgcgcaatgcgaaaagcgacgtgacgcccacacaggccgggcggatgctgtaccagaccgccatcggcatcgacggattatggcgggatacgcgtgagcagatcgcccgcgtgcaggaggcgcgtgagccgctggccgtttcgttctcgcacacgaccgcggcgattctgctgccgaaggcgttgccggtgatggctcggaacatggacagtttcgacttcgccgtacacgtgatgaactcggatgcgattctcgaacgggtcagcatgaaggccgtgcagctcggcgtggtggaaaagccgatcgtgaacgattcggtggaccgcgtcaccctgtgcgaggaccggctggtgttggcgggggagcccgacggcgtgtggatggtgcgcgagcacggttccggcgtgcggtattacacggatttgtatttcaagaccgctcaggttgtgcctgcacgcacgatggaagtgtccagtaatgcggcgattgtggcggcgctgtccgccgggttcgggcagtcgttgatttcggaagccgccgtgccggcgggcgtgccggtgcagcgggagcttggcgatgagtttgtgcggcggttctatgcgctggtgccgagatccggtctgacgcacgatcagcgggagttggcggagatgattattgctgcgctgcgcgggtagtcagatagtcgactgagggaaggtcgcgaacgttgtttctctccctccgtccgcctgcggcggccacctccctcatcagagggagatcaattaggtatcgacaaaatcgatgatatgtattggttgcaatgatttgaccgatgtaaatgcttgagcttcaatagacaccgtgagagagttctgtacaaaatggtggaagcgcattaccaccgttgacatgttgttcattggcgttctgactctgctggcctcgctgttcgcctcctggctcaagcagtttcccggattcagcctgttcggcgcgcttatcatcgcgctgctcatcggtatgatcatccagttcccgatccgcagtgcctacgtcggttccaatgatggccgcaaggcaggcgtcaaggacgccgctggcctgatttccaacaagctgctgcgcctcggcatcatcctgctcggtttcaagctcaacctcgccgtgctgttcacgcagggcatcaagtgtctgccgatcgcagctgtggtcgtcacgctgaccatcatcgtgtgctatgccatcgcccgcaagctcggtgtcgacccgatgctcgccatcctgaccgccggtggcaccggcatctgcggtgcggccgccgtcatgggtctggccggttccatcaaggtgtctgaggacaagcaggacgagaaggacaacgacgtgaccatggccgtggccatcgtagccattatgggtactgtgttcgcgttgctggagatcgcgctcggcccgctggccggcatgaccaaggaccagctgggcatcaccgccggtgcttccctgcacgaaatcgcccacgcggtcgccgccggcgacgctttcggcgcggtggacatcgccaccatcatgaagctttcccgcgtgctcatgctcgtgttcgcggccatcatcatcgctatctggtgggagaagaagcactccgaggtggagaacaccggcaagaagaccgtggccttcccgtggttcatgctcggcttcatcggcgcttcgatcatcggcaccttcgtgccgctcatcgcctccatcaccccgcagctcgtggactttgcgtacatcgtgctcggcatggccatggccgcgctcggcatcaacgtgaacttcaaggccatcgcttccaagggcaagaagccgatgctcgccagcttcctgacatcgattctgctcatgtgcttcgccgcaggtgttgcgatgctgttcttctgataagcgctccaaatacaaataggcgaaggcgaacgacagtgagcaattggaatgtgtcacctaaaaatcacgtacttgcacaacggataaccccagccgaactggcaggccatcgcaatgaacttcaccacatacgggctcaggtccgtcgcgcccggcatccagccgatcagcagtgtgctgaacgtgaagttccagatccacagcagcacgaaaagcatcacggaacgggtgaagttgcttgacgatttgaacgtcacgttgcggttcatcacgaagttgtaggtcgccgaacacaccacggcgataccgttggagatctgcgagggcacgccgatcaagtgcaggatggcgaacgtcgcatactccacaatggtctgcgtggcggaaacacccatatacttgcccaacacggcgagtccattttgcttcggggttgccgtgcccacggtattttccgcagtgttcgttgtggccgaggcattcgtgacgtccgcgccctgattgtgcttcacatccgctccattgttcgccatgcccatatgcctcccggatgtacctgtgacgttcgacctcgcaatgataccgctgaccgcgtcgggaatcgtcgtggcggtcagacgagaaaaccgcaggccgcagcaacgaccggcacacccagcgacagcaccagataggccgttgccgtggggtagcggcgtttgtggaagagcgtcaccatttcgttgatcgcggtcgagaacgtggagaatccgccgaggaaaccggtggccagcaccagccgccacggttcatcaagtgtcccgcccagtgccagcgccgcaaccagaccggtcaggaatccggcgatgagattgatggtgaatgtggacagcgggaatgcgcgttgccaatacgttttgatggtcgcgtcaagcagatagcggcaggaggcgcctacgccgccgcacaggcagaccgagattggtaggaatacggtcatcacgccttacctcccttgctggtcgtagcggcattcgtatcagcggacgcttcggcggatgcgttcgaggagccggccagatgcgttcctgcccacacgccggcagacgcacaaaccag

SEQ ID NO: 2142 - DNA, 19270 bp, Unknown
  R51_24m  MAG No. k141_8780
acgccgatcagggcgccgcgcatcatggagcgcacgccgcgggcggcatgcagcatgctcgacgaatactggtcgttgcgcgtgatctgatagttgttccaatccaccgggagtttctttgcggcgtccatggtcttctccacgtcaacgcccttggacagcacgaaggtggcgtcctggtatatttccttgccgtccttgtactggtacagatcgcgtgtggtatccagatcggtgtagatggtgttggcggtgagttccgctcggctggatacctttctggcgctgtcgcccttgaatatgcccacgatggtggtcttgacggtcgccgtcgaatgtgattcgttgtcggcgtcgtaggcgttggccttgagcgtgagcgtgtctccgactttgagcccgttggctttggcgagatcctcatggatcatcgacgtgtacttgtcggaggccttcagatgccgtccttcggccatgccgagcgtgcgcgacgtgaacacgttgagtttcgacgaatcattcgtgcctatgacgttggcggcgttgccgaattgctgctccttggtcgcatcgtaatcatcgccgccggggaccttcgccacattcgcccccacgagatcagcggtggcgttctgacggaccatatacgaatcgaccccgggcagttgggcgatcctgcgcacgtcggcgggacgcaccatgccacctccgcgaggcgtgagcatgctgccctgcaggttgctggccagcacgaacccgccgaccgcttccttctcgattcgtccggcggcctgttgagctgcccgagaaaccgcgatcgtggatagcatgctcgccgttatgatggtcaatactataaggagcactatggttcgtactcgttttctgagcacatagcgcaccgaccgtgcaacgaacgtcatcaatacctcctgtgggccttgggcttttcgcccaaaatgcgaaacatgccgcgtttcgccggttagttagccgcgacaatacatgatgcacctcaagatacgggaagagatacgccttgggcgaaaaacggaacagcggcgaatgtcgtttattctggattttggtccatctcgggccgcgtcgatgcgtcggcccgagaggaatcagcgctcgcgcctcaccttcgaggcggcgaacacgaggagcggcagagcggcgaacgcatagttctcgcattggatgtacaggtatgcgaccaggacgagccagcagatgacggtcttgtgccagacgccggattcgcccggacccgcgccggcaacgccatcaccactattgcccccggcaacatcagcaacgtcggcaacgtcggtgacgtcggtgacacaaacaccgtgcgccagcccgtcggacgatgcgccatccgcaccgccacggcataccgtcctcccgcgcgtcatgcagaccatcgaggctccgaccagcatggccagcccgatcagcccgtattcggcgatgacgctggtatacgcgcacatcgtccacaccgtgtccgcgttcacgccggccgcgaatcccgtggccgcgccgccgttcataccaagaccgtccagcagccgtccggctttggccgcgccggcccacaccgcattgatgatgttgcccgcgccataaccggtgagcagcgtccacggatgggtgagcaatccgcatatcggatcgaggctttggtagatccgcgcgaagaacgagccgtctccctcggccccgttctccgcgatggcggagagtctggaatccgccagcacacccagcaggcccagtgcgcatgcgccgagaatctgcagcatgccccggacgcggcgtgcgccgtcatgccaatcggtgcgcgccacaagggcgatcagcaacgccacgacggaatcgatgacgattctggtgccggcttgcatgagcaccgcgccgacggcatacgtgacgatgaggtcacgcagccgtttggcgtagatgcggtcgcgcccgcgcatgagccacatgagcggaagcagtatgccgaacaggtgcatgccgatatagctgggctcggcgaacaggaactgcggacggccgccgccccacaccgagttgtcgctgatgtattgccggtacatgaggtgcgagaaatagtcggtcaacggtttggcgcgcagacggatggacagccattgcacgacgcccactccgaaggaaacccagtatgatgcgatgagaatccgcaatggcgtacgccacggaatgcgtttgatgtcgaacgcaagggcgatcgcacccaaagtggcgagcacgcccagcaatccggtgatgctcatgaacgcggcgttgaggtggatgccgaacttcagccatccagggatggacaggattatacagaccaccggtaggaggaacattggcaggtaccggttggctgcgatgcgcagttgccgccaattgcataggcagtacacggcgaacagcgccggactgattggcgaccagaacggcgcgtacaggccaagcgtggtgccgtccaccggaagaaaagcgacggccagcaacagccaaatgacgttgcgttcctgcgatgtcagaaatcgcaggaacgaccggtattgcggtcggccatgatggttgcccgcgtcgatggtgtcgttgcgtacgcatgcctggttcatgtgattctccctccccgtcaaccttactcgttcatcacgatgcgcggacggggcatgctttccccgccgaacgtgcaatggcccgaacattgacaaggccgcaccgaatgcccccatcattggcacattgtgcaatctcgtcgcggctggctgacgaaataatgctggccgaccggttacattggttcggtacagtgacggcattattggccactggatcaagcgatttgcggcagaacgacgaaagcgacacttgggcgaaaagaggcaggcatgactacgaatcgaccgctcattgcggtgactccgctgatggattacgggcgcgatagtctgtggatgctgcccggatatatggaggcgataatgcgggccggcggtacgcccgtcatgttgccgctgaccgatgacgccgacattcttgcgcaatgcgccgaacggtttgacgcgtttctgtttacgggtgggccggatgtgggaccgatggttggtgcagtggcctccgccaccggccgtagcgaggtgctctctcctgagcgcgaccgaatggaatcgattctgctgccagctgtaatggcttgggacaagccgattctgggcatctgccgtggcattcagttcatcaatgcagcgctgcgcggcacgttgtggcaggatctgccaagccagcatccgagcgatatcgaacaccatatgaatccgccgtacgatgcgttcggacataacgtttccttggtgcccggcactcccctggcttcattgttctcggggcagactgagattgcggtgaatagctatcaccatcaggcggttcgtgatgtggcacccggtctcgaagtcatggccgtcgcgcccgatggcgtgatcgaggccctgtaccggccggcaagccacttcctgtgggccgtgcagtggcatcccgagtttctttacaaggtagacccacggtcgcaggcgatttttgatgcgtttgtggagagttgctaacagcggattttttgcgtgaccacgaaagcataatcgagattgccacctcatgccaacggttccgcaccaggcagcggcgcgtctgtgttatctggaaacatggctgcatcttgctggaaaacatcacctgaagtattctaaggtcattggatgttatttttttatcacataaaatatcatttttttatacagcatgtgataaaaatactgataccagcatcattgacttgttgtggaacggtaccccaaatgcgaactatcattcagagaccaatagggacacactagctaggtatatgactgtgggaggtttcccctcgtatgcaatgccctccatacctattgcagagagcgatttacgtttttccgtaaaaacggatatcgataatgttttgggcgataccatacttcccggagagcgattggataaagcaatagctgatgccatactcaaagagttacttgcagtccctggcgggattttgaatgtaaaaagaatatccgacactattcattcgaatccctccaccattgagcgatacatcagtattttcatgcgccgattcctaatctccgccttaccgaacctacgctcagcacctggtaagcaactgtttacccgcgcaaaaatacatccagtagacacgtcattcagcgttgaaacaatacgacaatccggcagagattttcataatgatcgcgttctgtttggcgagctttttgaatcattcgccgtcaatcaaatcattccggaaatacaatggtccgatatacaccccgacgctttctactggcgggaaactggcaataagcccaaagaggttgatctcgtgctgctacacgataatcaacttgtcgctttggaaatgaagtccaacaataccgtggaccgcaaagatttttctggtattgcagcattgcgcgacagcgacaagcgcttccaccgaggctacgtcttatacacaggagacaaggtgcagcagttcactaacaacatatgggctctgccaatttcatcattgtgggacagtgacggattccagacagctacttcggatgctgaacattactcattatcggttccatcagttttacctattcggccgtccgacaccgatgtggcagctcatgccaatgcccctactgatgccaacctgtttttaagctactgacatgcagacaacgaccacctcaagggggcaatacttcaattcgtgaatgatattatcgacgaatacaattacgagaccagcaatacactcgggttattcgtcgacaagacctctataaactggggtgaagattggcgtcaggcacttgatcgaggcattggtaatgcaaatatcattcttccaataattactcccagatatgtgcgcagtgaggcctgtcgtaaagaactgctggatttcaatactcgggtcacggaacatggaccgaatcgtatacttccattgatgttgcaaagcatagatggcatgactggaattagcgatcgtgatcctgtttgggacatcgcgcataatcgacagtatctaccagtgggcgatttgcgtttaatgtctgctgaagatcgtcaaaagagaatccttgaaatcgtgaaagaacttcgcgcagtaatagaggatattactgcccgatcacaatctgatggcacatcagagtcagttgtgagcaagtttaagggagacaacacaccggatttattgagtgcctggaatgagatagaaaaacttacaccacaagttaatgtgggcgcgcaagaatttgccgtatcatttcaaaatatctcaaagacattaagtacccatcccgctcctgcgaacggcaatgcgtctgtctattcctcatgggcgatacaactatcagaacaactacaacctgacattgattcgctcaacaaggcatcggattaatgcgaatcatctaaaccacctaaaaaggggctgctccgggtttgaaccgcaccccgattgttggactgaggaaattcagattcgatgatcggaggtgcggttctttcgtatgcgtgaggatcggaggaaacgttacgacgacgggttccggcacgaggcgctggggctcatcaaggccggcgcgggcaagcatttccttgcccgccggcttgcgatgcccgtgcagaccgcggaaaaatggatcatgaaatacaggtccaacggagaggacgcggtcatgggcgcgaagggcaaacgcagctacgactgggggacgaaggtcgcggccgcccgcgaccacgtcgacaacgacatgaccaagacggaggtcatggccaaatacgcaatcgcgagcgtcgcacccctggagcgctggtgccgcgaataccgtaccggcgggcccgaggccctgcgcccgaggcccaaggacaggccaaggggcgcgagatccggtccgaagcccaagccgacgcgcgagcaggagctcgccgaggaggtcgcctacctcagggcgaaggtcgcgtacctggaaaaagtgcgcgccccacgggcgtggaagtcgcgaggcgcgagcgaagcgccatcgtgcgatcgctcgcagggcggggacaccggctcgaccacttgctgagggccagcgggttggctcggtccacgtactaccgtcacctgtctcatccggagcatgtgacgcgagccgacctcgaaccgctgatcgcggcggtctggggcaggaccgccaacgggtgcgggcaccggcagatccacatgtgcctggtccacgagttcgggcggagggtgtcggccaagaccgtgctcagggtcatgcgccgcatggggctcaagtgccggatacgggcggcgaacccctggaggaagtacagctcgtacaggggcgaggacggcgaacgggtgccgaacctgctcaagcgcgacttccgggccgacaggccgttcgccaagctcggcaccgacgtcaccgagttcaaggtcgcaggcgccaaggcctatctcgcgccggtctatgacatggccagcaaggagatcatggcctgggacgtcagccggcatcccgacatggaacagcagaagcgtctgctcgccatgctcgcgcccaagctgcccgccggcgcaagccccgtattgcactcggacatgggatggcagtaccggcacccgtggtggcgcgaacggctcggggaactgggcatacgacagtcgatgagccgcaagggcaactgcctggacaacgccgccaccgaacaggtgttcggccatctcaaggacgagttctaccgcgaccgcgaattcgactcgtacgagcggttcaaggccgagctcgacgactacatcatccactggaacaccaaacgacgccagatacgactcggtggacacaccccggaggaattccggagagcgtccaccgtggtctgagcctgtatcctaataaacagcgtccaacaatcggggcgcagttcatctgtgggccctctcttttttgactgacgcttttggtcatgcactattcgccgtaatacacgagcacttcgtagtaggaagggatcacttggtaaaacgactcatgataggctccttcgccttgcaataggttcttacagtaagggataatgtacggtaaagaaatttttcaatattgttttagaatttttccactcatgagcgaggcggccgcgccggccgggaatgcaccgaccggactgcgaccgccttcatggataagggctgattagtgtcgagcaaaacgcacgacctgagggccggcgacgtctgtcgcgggaatctccgcggtcagcatatcgccgtccgcctccacgacaacgttgccaccgccaagaatggttgcggaatccacatcgaccgcgcccgcatctatgcgcagcggaaccctgcccgcagcatcgacgacggcatagacgctcttgccgtctccggtccaacgaacccatggctcgccgtccccctctccggaaggcgaggcttccggcaccggttcgacatcatggatactcggcgagttcacgtccatccagtcggccatgccctcgaggcactgacgctgcagttcggggatgcgtccggcggcgtcggggccgatgtcgagcagcaggttgccacccatggagaccacgtcggcgagcaacttcaccgcctccggaccggtcatgtaggagtcggcgtcctccatctggttgtagccgaaggagtagccgatgcctcgggtcatctcccacatgcccttgcccatgagctccttgccctgttcgtattcgacggtgcggaagtcccaatgggtcaggccccagcggtcgttgaccacaccatccggcaccacgtcgtagtaatgctcgaacagtcgggccacgctgaaatcgttgtcctcctccgagatcttcggcacgtcgatatctccccacaggatggacggctggtatttgtcgatgaggtccatcacatgcgagtacatatagcgggcgtagtcctcgctctgcggcccgtattccccgtcgccgagaatcggcatgttgggctccttgtgccagtcgaggcccgaggagtagtacacgccgaacttcagtcccttgtcgcgcatggcgtcggcgaattccttgaccagatcgcgatgcggaccacggtccacggtattccacccatcgttgtcgggggccttccacagcgtgatgccttcatgatgcttcgtggtcggcacgaagtaccgggcaccggcgcgtgcgaacaggtcggccatgtccgcggggtcgaacgcctcggccttccacatgtcgatgaaggcctcatacggcatgtcaccgtagacttccttctgatgctcggccgccggcgagcccttgatgctcatcgtgttccaataccattccgcatacgggcagtgggtgttccagtacaccggatcgtcaaaggtgccaagcgcaccgatcggctccgcccatgccggcaccgaatacgaaccccagtgggcgaagatgccgagaccggcgcccttgaaccattcgggtgtatcgtgcacgaacttctcatacatcttgggacgctgcggattggccatgaacaacaccatgttgaaactcctttgttcgttgtctgtgtgtctgattggttgctggttgttggttgctggttgttggttgctggttgttggttgctggttgttgattgtcgtcgtccgattccagtacggctccgtcgccgcgggaatcacaccgtgagcttcttgtccaccttgagggtgatcagctcgatgaccaccatcacgaagtagagcgcaccaccgacgatgatggcgaatccggccgaggaattgccgaagatgcttgccgtcagcgcgaagaagtacggggagatcagacagccgatgttgatgccgataatcacgatggacgtggtcaggttcatcgagtgcgcgggcgagtagtccacgaatcgtgcggtcagcgcggggttgatgatgccccacgcgaagccggcaatcagcaccagggcgaacatcagcggcacgttcttcgtcagcgcagtggcgatgaaacagatgccgatgaccacttcggagatggtcaccgtcaggcgcttggtgaccttggcgaccttgtcgaacaacacgccggagaggatggtggcgacgacgaggaagctgaagatcaatgtggcgagcgatgctgaaccgatgccttcatcgaccacgtagctggcgagcttgatggacatgacgttgtagagcatggagaccaccaggaagataaacgccagccacagcacctgccagttcgtcgtctgcttctgcgaggcgctcttgtcgacgacgtggccctcatcgtcgacgagcgcgctgcgaatgctgaagttatcgaactccttcggaatgaacatgcccacgagcaccatggggacgaacaacaggaagaagatgaggtacgtggattgccagttgatggtgatcagcagactggcgacgaacagcagcacgacatcgccaagattgccgaccgcctgtctccatccaagcagcttgcgttgcatatcgccgtcatacaggtcggtgatgtacgacacactcaaggtgacgaacagcgccgacccgaagccgaagaacatacgcgatatgagaatcggccaatagtacgggaagaacgccggaatcacacctgtgacggcggatatgaagaatcccgccatcgcgattttcttcctgccgatggcattggcgaatatgccggtcaatgccgtgccgaccatcgagccgatcgtcggcaccgtggtcagcagttcgacgttcgccgcggaatagtcggagaacgcctccttcatcgctggtatggtgccgctgactgcattactggcggacatcagcaacgacatcgacaagacgccgaccaccaaggtcttggatttcaacgctttgccaacatctaatgccattgttagactcctttctttctattttctattcagcggaagacggcgtcgtctttcgccatacaacgcgcaatcgttatcgattacgcgggcagcgggaattcactcctctatgggcgtatagagtcggttagaacgtggacgaaggacaaggaccgagtcactatggttgttgcccgtggcaacaaccaccggtgcacgtctgcggtgacgttcaccatcgcctcagttctttaatgtaatggaagtcgactgtattataaacaccggaataagaaatatgcaaacccgtgttagaaatttttgacctttccactgtgatggatggacgtttttccaaaatctcaaggacctccctcaataaagggaggtcagaaaggcttacttatcagcgaggttgctgtgatcctcgttggtgttccacaggtagttggcgagcacggccataccccaagcgccaccttcggagtggtgaagatgccgccgtggcccacgagagagtcgacctgcacgtgctcctgcttggtcatcacgtccatgccaatcttgaccggggagcgaagcaaaccctcgaatcatccgaagaagcgccccgctaagcccagccttaccgccgaggagccggccccaaggaccgccgagcacgcacttcggcgggaatcagccccatgccgtgctgggtggtcaggaaggtcggctcgccgccctcccccagcaagcgcagcgtctcgcgcatggcggccacgccgagcccctcgaaatcgggatgcacggtggtcagcggtgggtacatgttatccacgccagacatgtcgtcgaatccgaccacgctgacgtcttgcggaatccgaagcccatgctcatgcaacgcgcgcatgacgccgacggcctgattgtcgttcgcggcgacgaccgcggtgggtaacgccatgccccgacgcccatactcatcaatgagatgattcatgtgcgcatatgcctcagaggcatcccacgtatggcagcgcacgatctgtgaatcgatggatcgggaggcggcgagcttgcgccacgcatccagtcgggtgtgggcgtcgcgccattcgttgggaccggcaaaatacagagccgatttgtgcccgtattcgcccagcaaggccaccactttggccattgcaccccactggtcgataccgaccagtgcagtgcgacgcttgttttcggtggagataaggcccaatccctcacgcacggtcatttggccgtgggtggcggtgacgatgacgcgtggctgagtgactcgcgcacggcaggcggcggcgaacatcacgtcggtcggggtcaggaagatgaaggcgtcgacgttctgctcgttgaaggtgtcgcacaggttgtcgaagtcggactgcatgcacaaggcctcgtggaccatcatcacgctcatgaacagaccgtgttcgcgggccatggattcgatggatgagatggaggaaatcgggccgaagaatttgaggcctccggcgatcagccctatggtgcgcgaacggcgggaagccagtgcgcgcgcggagttggaggggcggtagccgagttggtcaatggcggcctggactcgcgcacgggtggcgtcggaaacgtccggcgagtcattgatcacacgggagacggtttgatggctgactccggcgagcttggccacttcgaacatggacggacgtttgcttggcttgcggctggtcaccatgctacctaacctccccgctggcggccggcatccgtgcacggccaggcttgtaccctaatcaatactgactttagcgcgtccacaacagttttgcgttagcgctcacactatcgtgtcgcacgcggctcaggtcaggtgccatgagacacgatggagcggagtcggcccgtgttcggcgatggcggcacggtgtgcggcggaaccatagcccttgttatgagcccattcgtaggcggcgtaacgtgggttgctttgcgcgaggtcgaccatcagccggtctcgggtcactttggcgatgaccgccgcggtggcgacggtggcgcaatgctggtcgcctttgactttggtcgttatatcggctggaatcggcacgtccggcgcgtcgaacgtgttgagcgccttggtgatgtaatcgctcggcccgtcgagaattccggcgactttgggcagggcgcgaacgctttccccacaatttccaatggattcccctacggagtctcccggacgaccttccacaatctcccccgcagccttttttgccgtcaatccccctccaagccgtaagccaagttcgcgttcgacttggctgagcgcgcgcagggcggccacgccgagcgcataggtgatgccccattcgtcgatctcggtgttgctggcctggcctacggcgtaggccgcgcaccagtcgcgcagttcgtcgaaaatcgcctcgcgcctatgttcggtgagcattttggagtcggccacgccgtccggcacgccgaggtaggtccgcccggacagttcgacggcatcatcgccatccaacggctccaaatcacgggcccagatggcggcgcacccgaccatcaccgggccggcgagcgcgccgcggccgacttcatcgaatccagtaataaggtcatagccctgggccgcaaggctgcgttccaagtcaagtgtcggggtaatcatgcgcggctcccatcgtctcacaatggttaggattcagacggtccaggttcaaatggttcaggattcagacggcccggaactcaatcagttcaaagactcacacggttcaaaaaagactcaggaattcgagccggaagcgtcagacacgtccttgaagacttcgtggtggtcatcaatcgcaccaagccggtcaagcggccagtatttcgcgattccgactccgaccacatcggagatgggaaccaagccgcgatcgccgtcatcctgatgatagcgggagtcggcggaattggcgcgattgtcgcccatgacgaacacgtggtcctcggtcacggtcaccgagaacgggaaggcgctcgggtccacgccggggcgaatgtaggaggtctcattgatggccacgccgttgatggtcaccggctggcccgcgcccttgcattcgaccacgtcaccgggcaggccgatcagtcgcttgatgaggtacccgccaccgggagcgctgctctgctcctcgttcaaccagttgttgggatctttgaataccacgacgtcgccgcgctgcagatcgaagatcttgggggtgagcttgctggtcaccacgcgatcgccgggcaccatggtgtccatcatcgagcgcgaaggaatctcgtaaaagccgacggcgaaaatgcgaatcagcagcacgataagcacgggaacgccgcaccacaggaaaaagtcgcgtagggtgaagtggtcatcatccatcgatgatgctgccgcggcattcgcgccagcggaagaagcggcgtgcgccgggcgcgccggtgccgggggaaccggggacggggcgatgccgtggtcggcgacttggaacgtacgggaatcgcgggcatcggcctcgtcatcatacgaggtctgattgctctccggattgtcggaaatcgggaattcgccgttatcctgatcgtcctgcataccatctcctcgcgattcatgctgccggatatgaggggtgccggcgcccgtccatcatacgtggaaaatacggaaacagcccgaaaccgaaacggttccgggctgaatttcacggtttattcgcgcacctgcatcatcaggcccacgattgcacccgcgaatcgactcacttagcggagttgtcgcggcgctcggcaatacgagcggccttaccgcgcagagcgcgcaggtagtacagcttggcgcggcgcacacggcccttacgcacgagcttgatggagtcgatggacggggagtgcaccgggaagcgacgctccacaccagtgccgaagctgatcttgcggaccacgaaggtctcacgcacgccagcgcccttacgagcgatcaccacgccggtgaaggtctggatacgggagttgttgccttcctggatcttcacgttcacgtcgacggtgtcgccgggacggaaggccgggatttcctcagccggcttcatgtgcttggcgtcaaaagcctcaacagcgttaaccattgttttccttcagtgctgccgcatatcagccacagatctggggccatccacgcgattgcgcatcacgtgcgttggcctgttctcgttatccctcgggtttgcccttgggaagcctgccgatccgccgaaagtcaggccttgcggccgttcggactggacccatggagacgtgggcttatgcggcggcccacttctcgacacagcaatcgtcaattgtacggattattgcggacagaacggctgtcggatggcattccaacaccaaggcactgcgacgtagttgacagacctgcaggcgggctttatcttgggagcgtcggtaggcgaggctaccgcagggatatgggttgctgccgctaacagtggagacactgcacgcaggtcagcagttcttgtcggatcaaggcatgaactaacgcaattccaccgccctgcgatgctgaagcttgaacgatggctcgaatcggcggattcgaatactttccgcccctcctgctggtcgcatggataccgacgatggtattgatctggcgtttcagcgcacggcttgaaggaggtgagagtccgatggacggtgattattccagtagttccgccgccggcaacagtcatagttgcggtggtgatgaccatgttttcttgtattccgttatccggaagtcgggctctcgcctgtagtgttccttggctccccggataacccttgcataattcgtctttcctatgcatagggaggtcttttcatgaccatgttttcattcaatcgcgtcggcgcgcgtccaaatgcgtcggcccgcaacccttccaccgccgcgtccgaccgccagccattcgccgtgcgcctggcctccgacgtactggtcgcggccggtattctggcgctgttcggtctgatcgcttggattctgccggcgatcggcgaaccgatcggcccgaaaggcgtgccgtcacaagtcagtacgcatctcgccgacctgccgtattacgcgctgcgctcggtgttccgcatgctcgtggcactgttcttctcactggtgttcacgttcatctacggcacggcggccgcgcgctgccgccgcctgagccgcgtgctgattcctctgttggatattctgcagtcggtaccgattctgggctttctttcggccaccatcaccatctggatggtgctgttccccggctcgatgctgggcgtggaggccgcgtcgattttcgcaatcttcaccagtcaggcctggaacatggcgttctcgttcacccggtccctgaccagcgaaccaactgaactcgacgaggcggcccgctcactacagctcacacgctggcaacgattctggacactggacgtgccgaacgcaatgattccgctgctgtggaactgcatgatgagcgtaggcggcggatggttcttcctgaccgcctccgagatgatctcggtgaacaatcgcacctatgcgttgcccggcatcggcagcttcgtggcacaggcggcggccgaggagaatctcgcggccatctgctgggccatcgtgacgatggtgctggtggtgctgcttatcgacgtactgctgtggaagccgctgaccgcgtgggcggagaagttccgcattacgcaaagcgagtcggcggtgcgcaagaccagtgtggtgctgaccatcattcgtcagtcacatatcgatgagatggtggcctggctgttcaggcctctcggcgacctgttcgacacgctggcccgcccgttgggtcggaccggtggacgttgggcggcggacgtgaagtccgcacgcagccgcgcgcttgacgtggtattcacagtgctggtgttggcagcgtgtgcgttcggactggtgcagcttatgctggtgattcatcgcgatgcgggattcggcgagctcgggcaggcgttcgtgttgggcatggtgacgttcctgcgcgtggcgctgcttacgctcgtctgctcggtgatttgggtgccgattggcgcgatgatcggcatgaatccgcgcgtttcgcggtttatgcagccgattgtgcaggtgctggccagcttcccctcgaacttcacgttcccgttcgtcacgctctggttcgtggcatgcagcgtggatatcaactggggcagtattctgctgatggcgttgggcacacagtggtacatcctgttcaatgtgatcgccggggccagccagattcccgacgatctgcgtgagatgacgcgcagcttccagctggggcgctggcagcggtggcgcgatttgattttgccggcggtattcggctcgtgggtcacgggcggcattacggcggccggtggggcgtggaatgcctcgattgtctcggaaatcgtaagttatggacggcatacgctgaccgcctccggcttgggcgcgtatatcgccgaggccaccgaaagcggcaacaccgtgaggaccatcatcggtgtggccgtgatgagcgtgttcgtggtggccgtcaaccgcctgttctggaacccgctgcagcgcatggccgagcgccgtttcgcactgaactaaagacttaaggagaataatatgactgttgcaatggaaaccattcgttcgctgcgggcggtgaccccgcagaacaccatcatcgaagcccagcacgtcggccagcgcttcacggccgacaacggcaccgaactcaccgtgttcgacaacatctcgttcaacctgtacgagggcgagatcgtggccattctgggccgttcgggtgccggcaagtccacattcctgcgtgcgctggccggactggtcaagccgaccagcggcacggtcaagtatcgcggcgaggccctgaccggcccgaatcccggcatcgcactcgtgttccagaccttcgcgctgatgccgtggctcaccgtgcaagacaatgtggaactcggtctgaaggcgcgcggcgtaccacgtgcggaacgcaccaaactggctctggatgccatcgacatgatcggcctggacggcttcgaatcggcgtatccgaaggaactgtccggcggcatgaggcagcgcgtgggcattgcacgcgccttggtgctgcggccggacgcgctgttcatggatgagccgttctccgccctggacgtgctgaccgccgaaaacctgcgtcaggaagtgctcaagctgtggtcgagcgaacagcgcagcatcaagtcggtgcttatggtcacgcataacatcgaggaagccgtggagatggccgaccgagtggtggtgttgggctcgcacccggggcatctgattgccgatgtgcgggttgatctgcagcgcccgcgcgaccgtcacagtgtcgaattcgaggcgatggtggaccgactgtacgcgattttgaccggacaggcctcgcagcctacgcaacaagccgaggctctatcgccatcggcatcgctcacgaacgcacctgtcacggacgcatctgtcacggacgcatcagaccttcagcccgccaagaccatcgagaaaatcaaggagcatccgctgcccaacgccacgccgggcgggcttgccggtctgctggatgtggttgccgagcatcctcacggcatcgacttggcagatttggcctcggctctttcgttcgaggtggacgacctgttcccgctggtggatgccggtacgatgctgcgcgtcatcgtggtacgcgacggccatgtgcagatcaccgaggcgggcgactcctggcataaggcggacattctgcgcgccaagcaggtgttcgcctcactggcgatggaacacgcgccgctggtgcgcaacattgagcatgcactgcggaagtctgcggaaggcaagctccgcggcgagctcatgctggacctgctgcgcgcccgttacgccaacgacgaggcgcatcagcagttcgccatcgccgtggagtggggccgttacggcgaactcttcgattacgatgccgatgacgatctgctgagcttggatgaggcgaataagggcgaataagcgaatcagccacgtgagttggccagatagtgcctttatgcctgcaaacagatgccgaagcaaaatatgaccatgttcgactcatctgactgacagcaatccgtatatgcaaagtgcccggcatccgaagatgtcgggcactagtcgtgagagagactccctcagtcagctacactgacagctcctctcacccgagggggcaccagaggaacgaatcagaactcgcgacgtgggcagtcgccagactgcccaccagacagcacagccgcggtcgcgcgaatcacgaattctgaccgagcaaagcgaatcagaattcgcgacgtgggcagtcgccagactgcccaccagacagcacagccgcggtcgcgcgaatcacgaattctgaccgagcaaagcgaatcagaattcgcgatttgcgcggtagaacttgatcaggctctgggtggaggcgtcctgggcggcgagggcgtcgtcgtcctgggagatggccggggtgatctgcttggccagctgcttgccgagctcgacgccccactggtcgtaggagtcgaggccccacacggtgccttcaacgaaggtgatgtgctcgtacagggcgatcagctcgccgaccgcgaacggggtcagggccacgccgaagatggaggtggtcggacggttgccggtgaacacgcgggccgggacgatctcctccggggtgccttcggcgcgcacttcgtcggcggtcttaccgaacgccaaggccttggtctgggcgaagtagttgcccaggaacagctcgtgcacgtcctggtcgccgtccttggtcgggttcggggtgttgacgaacgcgatgaagtcggccgggatgagctgggtgccctggtgaatcagctggtagaaggcgtgctggccgttggtgcccggctcgccccagaagatctcgccggtctcggaggtgacgggggtgccgtcccaacgcacggacttgccgttggattccatggtcagctgctgcaggtaggccgggaagcggtgcaggtactggtcgtacggcagcacggcgtgggaggcgaccttgaagaagttgcggtacc

SEQ ID NO: 2143 - DNA, 12140 bp, Unknown
  R51_24m  MAG No. k141_8812
cgcgagcgacgaattctcgcgtaacgtgtgctacgatggaaggctcccttcggggagccttcgttgtgcttgcgttgttcttcggtccaacttttcgacatgcgtatacgttgttgatagcgacaattgcggaaaacgcttacagtatgatgtgcacacggacaacaagccgatgattgcaaggagcggtgacgacgatgacatccacagaacacaatacgcgagccgacatgttggcccacatgggcagccttcagcaggccgcctacgtgcgcccgatcgagtaccaggagggccgtgcccacggcctcaaggccatcgaggtgaagaacggcccgctacgcttcgtatccatggccgaccgcgccctcgacgtctgccagttcgaataccgcggcgagaacctcaccttcctgtccaagccgggcctgaacggccgcaaccagttcgacaccaacgggctggaggcgcagcgctccatcatgggcggcctgttcttcacctgcggcttcgagaacatctgcgcgccgtacgtcacgcctgagggcggcaagtacccggccggcagcttcccgatgcacggccgcatccgcaccacgccggccgagcatgtgggctccgacgcccactggaccgccgaaggcgactacgtgctcgaggtctccggcgaaatgcgcgaggccgaactgttcggcgagaatctggtgatgcgccgcaagatcaccagcgtgtacggccagccgtcgatcacggtcgaggatgaggtgaccaacgaatccttccgcgacgagccgctgatgtggatgtaccactgcaacttcggctggccgttgctcgccgaaggcgccgaagtcgtgatccccagccgcaaggccaccccgcgtgacgagaccaccgcagccgacaccacgccgtggaacgaaatccaagcacccgaggcgaaccgccccgaaagcgtgtacctgcacgagctcgccgccgacaagaacggccgcagcttcgccgccgtggtcaaccgcaagctcggacttggagtcgtcatcgacttcgacgccagcctcttcccatacttcatggaatggaagtcgatgggtgcgggcgactacgtggtcggcctcgaaccctcgaactccagcgtccacggccgcggctggcacgagcagcgcggcgacctgcacaccatcgccccgcagaccagcgaacgtaagtccctgaccttcaccgtcatcgaaggcgaggccgcgattgacgggctcatcgcccgccgcgacgccctgcttggctgaattgtgagataatatcggccgatatgtgaacggctgattagcgtggggagcatggttacccgggattcggaacagtatctgcgattcaaacgggagcacacgctgccctcgcatgaggcgattatggactggtatcgcggcaccggcatgcgtccgtatctgcaggcgcttgacgacgccggccgcaagaagttcgaggccgaagtgttctcccaagtccgcgaggaataccccacacagtcggacggcagcatcattttccccttcccgcgtttcttcttcctcgcgactcggtagaagctcgtcggattcgtgtactgggcggcgcgacctgtttcccgcgccgccagctgtgggttgacctcgctactgggcttgcggtgatgccgctggctgctgcgctgcttccgattgcgatggcatttgcatatgcggtgcgatgctggggagtgtgccgtcatgcatgcactgcttcaatatgaggtctcgctgggcgatgaggtcgtcttcgatctggtcacgcacgtcgcgcacggacgagaaatacaggtagaacgtggcgtgattgtagccggcgagttcggtgatctgacgcaccgagatcttctcgatcggcttggtttcatacagcttccagaacgcctccttaaggcgattgaccgtctgctgcgtaagttgcgggttcttcttgattgcgattcgcggtatggtgatttcgcataagacgcacaaccccatcgattcgtcggtcaaattcgtgaccttctcgatgcgatgctgtcgctggtggtcacgcaggacgtgctgttggaatcccagggaaccgcgcacgcggcgcaatccttgggactgttcggcatcgggctcggcgtggtggccgtgatcatcggcctgtggatgttgctgagacgtaagtgaacggcaacggaataggaatagtgacagcggaatagcgcgcgtgatattggtacgcgacgtatcgtaaaagcggctacaatacttacggcaaaagtctttgcaacgagaaggaagacatgactgagcggcgtcgagcacggatgaggattcgtcgtcaacgaatttacgttgtacggcgcattgtggttgcggtatgcgcattgttgtgctgcgttcttgccgtcttctcgacgattgacgcccaacgggtgtggccccgcggtgagtcggtcgcacaggggcaggcagaggttcaggggcaggcgcagaaggtgagtcaatccgcgcaacagtcggcatcgcgagtgtctgcatcggcctcatccttggaccgccagcaggtaccggtctttaaccaggcgattcaggagcagcgtgacaaggaagcgcaacgtgcgcgatggacgaatcccaccggcaagcagcctgatttgtcgcaatactccgatctcagcgtgaaagtcagtatcgccaagcaggaagtgtatgtgcaatccggcggtgagaccatctacacgatgatcgccagcaccgggctcaacgatacgaccccgcgcggcaactatgttatcgggatgagaggcgatcacttctacaatcccgcagaaggcatgggtgctgattattgggtgcgattcaacggcccgttcctcttccactcggtgccgaccggggcgaactccggcgagtatatggaagaggaaggcaacaagctcggtcagccggcctcacatggttgcgtgcgactcactgtggccgatgccgaatggttctacaaccaaattccggaaggcacgccggtcaccatcgcctgaggcttggcctgagatcgatactgaggctatcgtgctttaggcgtctgatattggtcgtcggtagtgaagcaggtgcgatagaccatggccatgatcagaccgtcggccagcaaggtcagcgcggcgatggcaccgaagaccacgaactggtatttggcggcgttcagtggatctccgccggctatcacctggcccgccatcatgcccgggatggtcacgatgccgctggaggccagcgaagcggtggtgggcagcagtcccagccgaatcgacgagatgatggatgggcgggcggactcccatgccgtcgcccccaaggccagcatcatatccacctcgtcgcggcgttcctccatgctttcatagaatcggctcagcccgacagcgagcgcggaaacggtgttgcccagcagcatgccggtcaggggcaccaccagctggggcgcataccacgggtgtgggcgcacgatgagttcggtgaccaacgccagcatgagcagcatcgtgatgaccaggctcaggaagatcggtccggcaaggcccttggggatgccgcgcgcgcgggatatcacgatctgcaccgccgcgaccagcatgaccgccatcagggcgaacaccatccacacgctgttcgaacgaatcacgtagctgatgatgaatcccatggcgcacagctgcacgagggcgcggcatgccgaccacatcagggtcctgccgatgcccatgtgcatgagttcgctgacgatggccgccacggccaccatgcccaacgccagaacaagaccccaggtgtcgatgtcgtaggcgccgttcatgggcgcacctccttatcccgcgtcagatcggtgagccgtcccgcgtcgagcatcagcgtgcgggtggcgcgtccgtccggcggacggtgtcggatgcggatgatcgccatgccgtgtgcggccgcgtccgccatgatcgcggccactttggacgcgttgtcgtcgtcgagtccggcgtccacctcatcggccagcagcaccttcgggtcggtaagcagcgtgcgggccaacgccacgcgcgccgcctgaccgcccgacaggtcgtgcggggcgcgcgccaggtcgatgtccttgcagcccatcgcgtccaacgtcgtgcggatgcgctcgtcgggcagcagctgctcggccttgccgcccttgccgcgaatcgcgagcgtccagggcaggcggatcgcctcggccacgtccttgccggtcaggatcggtttttgcggcagataggagacgtcccgccgccattgctgcgcgctgaattcgtcgctgcctacgccgtcgaggacgaacgtgccgtgcgcgtgcgggttgagtcgggcgcatgcggtcagcagactcgatttgccggagccggacggacccaccagatcgatgatgtcgccgcgttccatgctgaaggacaggttgtcgaacaccgtgcgttcgtcatccgccggcgatcgcgcggggatgacgcaggacacggatatggcttcgaagaaggatcgcatattcatccagtctagtcgggggccacgtgggaaaccccagcgttcacttcctgtatacccggtgtggcataatagccaaggcaatttttgggctttgcctaagctagtttgaatttgaaataggtgaataacgtggcacagactactaacgacatcaagaacggatccgtcctgaacctggacggccagctgtggactgtcatgaagttccagcacgtcaagccgggcaagggccccgccttcgtacgcaccaccatcaagaacgtgctctccggcaagatcgtcgacaagaccttcaacgcaggcatgaagatggaattcgagaccgtcgacaaccgcaccctccagtactcctacgaggacggcgacaacttcgtgttcatggacatgaccacctacgaccagatcatggttccgaagaccctcgtgggcgacaaggccaagttcatgctcgaaggcaccgactgcctggtctccttccacgacggcaccccgctgagcgttgacctgccgggctccgtggtcctgaccatcacccacaccgagccgggcctgcagggcaaccgctccaacgccggcaccaagccggccaccgttgagaccggagccgagattcaggtcccgctgttcatcaatgagggcgaccgcgtcaagatcaacaccgaggatggttcctacaccggccgcgagaacaactgatctccgcatcctcaacagacgaccgaccgtataaaggactaggacagcagcagtatggcacgttccaccgcgcgcaaaagggctctgaacaccctgtacgaagccgacgaaaaaagtcaggatattctcgccctgcttgacgagcgcatcgcacatcccggtgcccagaccccgcttcccgactatgccattgaaatcgtcaagggcgtggccgagcaccgtcgtcagatcgacatgaccctggacgaacactccacgggttggaaggtccgccgtatgggcgtggtcgatcgcaacattctgcgtatcgccgcttgggagattctgttcaacgatgatgtgccggacaaggtcgccatcgacgaggctctggcattggccaagaccctgtgcgatgacgattcgcccgctttcatccatggcctgctgtctgcagtgtgcaccgccaagaacgcagcaccggcaccggagtccgcggcagaagaggccgatgaggaatcatccgattccgatgccgccgcatccgatccgaccgatgagggcgatgtttccgattcgtccgattcgtccggtgcatccgacgagcccgctgccccgtccgctgagattcagccgacggtcgattagtcatttgttgttcagcctccccattcgggaggctttttcatgggcggacacttgtgtcgccacacattctcaagtcggcaccttgccgacagccccgccagcggggtgagactttgcgcccaacggcgtgtgagtctgcgctggccgttaaccttggtacgaatacccgaaaaacataagggggttttggtgagccagaacgagtccgggaccatcgcaattccgatgtatgacaaggacgatgcagtcctcgttttggaagatggacaggtatatgtgggggcgccatacggcgccctcggcgagacgaccggtgagatcgtcttcgccaccggtatgaccggataccaggagacgctcaccgatccgagctacgatcgccagatcgttgtgcagacgttcccgcacatcggcgataccggcgtcaacagcgaagaccctgagtcctcccgcatctgggttgccggatacatcgtgcgtgatccctctccgaacgtgagcaactggcgtgccgagggcagcctggacgacgacctcgccaagaacggcatcgtcggcctgagccacatcgacacccgtaagctggtgcgtcacctgcgttccgcaggcgtgatgcgcgccggcatcttctccggcgacgccctgaccgaccaggccaccggcgcgctcaagaccatcgagcagctgctcgaagacgtcaagaacacaccgcagatgcagggcctgagcctgtacgacgaagtgtccaccaagcaggcctacaccatcgagccatgcggcgagtacgaaggcaaggagccgctgtacaccgtggccgccgtggacctcggcatcaagggcatgaccccgcaccgcatggccgaacgcggctgccgcgtgcacgtggtgccctccaccatcaccttcgccgaaatcgagaacctgaacccggacggcgtcttcttctccaacggcccgggcgacccggaacaggccggccccgaaatcgagctgctgcgccaggtgctcgacgccggctacccgttcttcggcatctgcttcggcaaccagctgcttggccgcgcgctcggcttcggcacctacaagctcaagttcggccaccgcggcatcaaccagccggtcaaggatctgaccaccggcaaggtcgaggtcaccgcccacaaccacggcttcgcggtcgacgccccgatcggcaggcaggtcgacgcgccgtttgaaaacggcaagtacggcaaggtgttcgtctcccacatcgatctgaacgacgacgtggtcgaaggcctgcagtgcgtggacatccccgcattctccgtgcagtaccacccggaggccgcagcaggcccgcacgatgcggcctacctgttcgaccgtttctgcgaacttatgaagaacaactccaaggaaggtaagtgatatgccgaagcgcaccgacatcaaatccgtgatggtcatcggctccggcccgatcgtgatcggtcaggctgcggagttcgattactcgggcacccaggcatgccgcgtccttcgtgaggaaggcatccgcgtcatcctcgtcaactccaacccggccaccatcatgaccgacccggagatggccgacgccacctacatcgagccgatcgccactccgatcctcgagcagatcatcgccaaggaacgccccgacgcgcttctgcccaccctgggcggccagaccgcactcaacgccgccatggcgctgggcgaggccggcgtcctgaagaagtacaacgtcgaactgatcggtgcctccctggaagccatcgaccgtggcgaggaccgtgaactgttcaagaaggtcgtcgacgaggccggcgccgaatccgcccgctccgacatcgcccacagcatcgaggaagtcgacaagatcgccgagaagttcggctacccgctggttgtgcgcccgagcttcaccatgggcggcctgggctccggcatcgcccacaacgaggaggagctgcaccgcatcgccggcgccggcatccattactcgcccaccgacgaagtcctgatcgaagagggcatcgagggctggaaggaattcgagctcgagcttatgcgcgaccgcaacgacaacgttgtggtcgtctgcccgatcgagaacgtcgacccggtcggcgtgcacaccggtgactccatcaccgtggccccctgcttcaccctgaccgaccgcgaataccagaagctgcgtgacatcggcatcgccatcatccgcggcgtgggcgtggacaccggcggctgcaacatccagttcgccgttcatccgaagaccggccgcatcatcgtcatcgagatgaacccgcgcgtctcccgttcctccgcactggcctccaaggccaccggcttcccgatcgccaagatcgccaccaagctggccctcggctacacgctcgacgagattcgcaacgacatcacccagtccacgccggcctcattcgagccgaccatcgactatgtggtcaccaaggtgccgcgcttcgccttcgagaagttcccgggcgccgaccccaccctgaccacctccatgaagtccgtgggcgaagccatggccctggccggcaacttccaggagtccctcggcaaggccatgcgttccatcgacaagcgccacatgggcttcaactgggatggcgagaagccgtccgccgaggaagtggccgaactgcttgaggccatccacaccccgaccgaacaccgttacctgcagctcatgcgcgccatctggggaggcgccacgctggagcaggtgttcgcggccaccaagatcgacccgtggttcctgaagcagatcttcctcatcaacgagaccgccatgacggtgcgcgaggccgagaccctgaccccgaagctgctcaagaaggccaagctcgccggtatgtccgacgtgcaggtggcccacctgcgtggcttgggcgatgaaggcgagaacaccatccgcgagctgcgctggacctacggcctgcgcccggtctacaagaccgtcgacacctgcgccgccgagttcgacgccgccacgccgtactactacagctgctacgccgacgaaaccgagctgcgcccgcgcgagcgcgaggccgtgatcatcctcggctccggcccgaatcgcatcggccagggcatcgagttcgactacacgtgcgtgcacgccgtgcaggagcttggcaaggactatgacaccatcatggtcaactgcaacccggagaccgtctccaccgattacgacatgtccgaccgcctctacttcgagccgctcaccttcgaggatgtgctcgaaatctacgaggccgagaagaggatgggcccggtcaagggcgtcatcgtccagctcggcggccagaccccgctgtccttggccgcgcgtctgaaggccgccggcgtgccgattctcggcaccaccccggaatccatcgatctggccgagaaccgcgagctgttcggcgaggtgctcaagaaggcggagatgaacgccccgcgttacggcaccgccctgagcctcgaagaggccatggacgctgcccaccgcatcggatacccggtgctcgtgcgcccgagctacgtgcttggcggccgcggcatggaaatcgtctacgacgacaagcagctcaccaagtacgtggaccgcgcgcttgccgaggccaaggccgataccgtggtctccggccgcctgccctccccgctgctcatcgacaagttcctgcaggacgccatcgaaatcgacgtcgacgccctgttcgacggcgaggaactgtacatcggcggcattatggagcacgtcgaggaggccggcgtccactccggtgacgccgcctgcaccctgcctccgtccaccctgtccgacgaccagatccgccgtctgcgtgaaggcacctacgccatcgccaagggctgccatgtgcagggcctgatcaacgtgcagtacgccttcatggccaacacgctgtacgtgatcgaagccaacccgcgcgcctcccgtaccgtgccgttcgcctccaaggccaccggcgtggcgctggccaaggccgccgcccgcatcatggccggcgagaccatcgccgaccagcgcgccaacggtctgctgctgcccaagggcgacggcggcgacatccaccccggccagcaggtcgcggtcaaggaatccgtgctgccgttcaagcgcttccgcaccccggtgggcaagaccgtcgacatcctgctcggacctgagatgcgctccaccggcgaggtcatgggcttcgaccgcgacttcccgcacgccttcgccaagagccagctcgccgcctacgatggtggcctgccgacccacggcaacgtgttcatttccgtgaacgacaccgacaagcgtcagctgccgctgctcgccgtgcgcctcgaagagcttggattcaagctctgggccaccgagggcaccgcctccgtgcttcgccgttacggcatcgagtcgaacatcgtggacaagatcagcacccgcgtggacaccgatccggaagccccggtcgaggtgcatcacgccgccggctccgtgggcaagaacgtggttcagctcattgaggaaggcaagatcgacatgatcctcaacacgccgaactcgcgcggctcccgttccgacggctactccatccgtgctgccgccattgccgccgatctgccgcagtttaccaccatcaccgagttccaagccgcactgctggctatcgaggccgtgaagcataatgattatcagatcatgagcattcaggagcattcgaagcagctgttcgaattggagcgacgggagttctgatgactacacccagcagtgaggaattgcaggcacaacgttcggatttcggtctgcgactgagcaattcaatggccaaatacggaccgctgtgtgtgggcattgacccacatcgcaagctcctcaccgactggggatacaacgtcgacgccgaaggcgccgaactcttctccatgcgtatgctgcaggccgccaacgggcgcgccgcagcagtcaaattccagacgtcgatgttcgagcgttacggagccaaaggtttcgaagcgctcgagcgcgtgctctacgcggcacgacaaatgggcgtcatcaccatcgtggactgcctgcacggcggcctgtccaccacgatttccgccatcgcagacgcctatttcaagcccggtgcaccgttgctggccgacgccatcacgctgctgccgtactatggcgcgcgctcgttgaacggcttgattaccgaagcgttggaaaacggacgcggcgtgttcatcgcctccctgacttccaatccggaaggcatgagtctgcagaccgcgttgcgccagagcggcgattacaagggacgtaccgtggcctacggcatcgcctccaccgcgcagaagcataacgtggatatcgaaggcatgggctcggtgggtctgatcatcggtgccaccatcggccaatggatgcaggattccggcgtggacccctccaagttcaccggtccgattctttcccccggttacggttggcagggtgccgaggccaaggatctgaaaaccgtgttccgcggtacgcgcggcaacgtgctggttaccgtgtcccgctttatcgcctcgcatgggccggatatcgccgcactgagccaagctaccgagtcgattgcgcttgacgtacgtcagtcgctgatggaagccactgccgaaggcgcagaaaaccagtaatcagaacggaatcagatgtcgcggcatgcgtacgtatctatctcattgcatacgtcgcatcacgattcatattcttccctgttcgtcggggctgtaacagttaccggtcatctcgccggtgagccgttaccacattggattcataatcgctgcacaccacatcatctccggaggaacccatgactgaaaacacccatgccggccgtctaatcgtcctgactggccctaccgcagtaggtaaaggcactgtggaggccaagctgcgcgccgaccaccccgaagtgtgggtgtccgtttccgccaccacgcgcgctccgcgccccggcgaggttgatggcgtcaactactggttcctcgccgaagacgagttcctggcccgcgaagcggcgggggagttcctggaaaccgccgtggtgcacggcatggcccactacggtacattgctggctccggtggaggagcatctggctgccggcgtgccaacaattctggaaatcgatttgcagggcgcccgcc

SEQ ID NO: 2144 - DNA, 25445 bp, Unknown
  R51_24m  MAG No. k141_8934
cgtcaccgccaacgagttcttggctgatgtgcgtgccgtggccaagggcctgattcattacggcctgaagaagggcgatgccgtggcattcatgtgccgcacttcctacgactgggacctgaccgacgcggcgatcatggcgtgcggcggcgtgctcgccaccatctacgacaccgattccgccgagcagattcgcaatatcgtcaacaactccgatgcccgactgctgatcgtgcaggacacggacatgcgtaagaaggcggatggggccgtcgaagagtgcccgtccctggagcacatcatcaccatcgagaccggtggcttggacgaaatcaaggcctacggcaccacggtctcggacgaggagctggacgagcgcatcgattcggtcaagaagaccgacctgtgctccatcgtgtacacctccggttccacggccgcgccgaaaggcgtggagatgacccacgagcactactgccagaccgcgctgaatctgccggcctacatgcccgatctgctgcacgacaagaggaacaccatcctgctgttcctgccgcaggcccattccttcgcccgcgccatcaactacatcgtcgtctcctcgaacgtccgcatctacatcgccaccggcatcaagacgctgatcagcgatctgcaggtggccaagcccactctcatgatcgtggtgccgcgcgtgctggagaaggtgtacaacgccgcgtcccagaaggccggccacggccccaagggcgtggtgttcgcctccgccgtggtggctgcgcagaactatatgaaggaagtctccgccaacggcaaggcaggtgcactgacccgcactcgccgcgctgccttcgatccgattgtctactcttcgctgcgcgaagtgctcggcggtcgcgtcaagtggatcgtggccggcggtgccccgcttgacccggaactgctggctttcttccgtggcgcgggtgtgcctgtatacgagggctatggtctaaccgagaccaccgcaccgtgcgcgttcaacccgctgggcacgccgttccacgctggttccgtgggcatcgcattccccggattctccctgcgcatcgccgaggacggcgaaattcaggtcaagggtcgtgccgtgttcccgcgctatcacaagaacgacgaggccactgagctgtcgttcaccgaagatggctggtatgccaccggcgatctgggccgcatcgacaacgacgggttcctgtacatcaccgggcgcaagaaggacctgatcatcaccgccggcggcaagaacgtctcccccggcccgatcgaggaggtcatccagcgttgcgagatcgtctcccaggcgttggtgctgggcgacaaacgcccgtttatctccgccctggtgacgttggacgagaagtcgttgcgcccgtggctcgccgccaaggggcttgacgagaacatgtccctcgaggacgcggcaaggaacgccgccgtgcgcgccgaagtgcagcagtgggtcgatcgggccaacgagggagtctcccgcgccgaatccgtacgcaagttcatcatcctgcccgaggagttcacccaggagaacggtctgatgaccgcctccatgaaggtgattcgccccaaggtcatcaagcgctactccaccctcctcaacacccagatgtacaccaagaagaagtaaggaggactcgagtgcagcaaaagggagattccattggaatctccctttgttataaccggccgaaggccgattcctagaagccgaggcgttctagttgcttggggtcggactgccagcctttggctaccttgacgtggaggtcgagcttggctttttggccgacgatgcggttgaccggggtgcgtagcttcttcttgacgtaggtgaggttcgaggcgcccttgccgatgatgatcggcttctgtgagtcacgctccacgtaaatggacacgttgacctgcgccttgccgtcatagccctgaccggtctcgttgtcttccggatagtcgatggaatcgaccaccacggccagcgaatgcggcagctcgtcgtccagggtctcaaggaacgcaccgcgcacgagttcggcgatggtgtcttccggacgctcctcgctgatctgatcgtccgggtacatctgcgggccctcgggcgtgtgctcaatgagcacgttcttcacttcagccagattgtcgtgcttcagggcgctcaccggcacgatgtccgagaaatcggcgaaatcgttgatttcgatgagcttgttgatgagttgctgacggccaagctcgtcgatcttggtgacgatggcaatcagcgggatgcgccacttgaacgtaccgtcctcacgcttggtggcgaagtcggtacgcagtcgggaaagaatacgcttgtcgccggggccgatttcctggtcggcgggcagcaggaaggccaccacgtccacatcggccaaggattcgtcgaccacgtcgttcagacgctggccaagcaacgtacgcgggcggtggataccgggcgtgtccacgagcacgagctgcgcgtggtcggcggtcaggatgccgcgaatcgccttacgggtggtttccgggcgagaggatgcgatggcgatctgcttgccgatcaacgcgttgatcaacgtggatttgccgacgttcgggcggcccaccacggccacgaatccggagcgatacggcacgtcctgcttggtcacattctccgtttcaccggtcgcgtcgacttcggcaacgccggcaacatcggaagcatcggtgacgtcaatgtcatcgacgtcgttcgtgctgttgttctggtcggtcatatcactccttgctggcggtatcatcgccttcgacgggctcgccgtcagtttcctcatgggtcctgctattttcctcgccgccctcgacgtgcgccggttcgacgacgatggtggacaccttcttgcggcgtccggcggagtccacggcggtcagtcgcagaccgcgcgtcacggccgaagcaccgacaatcggcacgcggcccagaatcttggtcagcaggccgtacacggtatcgacatcgtcctcatcaatgtcgatctcgaagatctcctccagatcggcaatcggcgtacgggcgggcatcttccacttgttgtcgccgattttctccggctcggtacgctgggtgcggtcgtgctcgtcttccagctcgccgacgatctgttcgatggcatcctcgatagtcaccatgccggcgatgccgccatactcatcgaccaccacggccacatgttggcgggaacgctgcatctcatggaacaggtcgtccaccggcttggattcgggaacaagcagcggctgccggacgatggattcgaccgtgcgctccatggccgccgggttgaaggcggtggcgcgcacggcgtccttcaaataggccacgccgatcaggtcatccacatcctcaccgatcaccggcacgcgggagaaaccggagcgggagaacagtttcagcgcggaagacagtgtggagtcgcgctccatgcagatcatatcggtgcgcggcaccatgatctcgcgagtcaacgtatcagacagggtgagcacgttgcgcaacatttcggagacttccggatcgaagtcgttggactccaccagtcggtcgatggcggccttgccctgctcgagctgaatcttctcaagctcctcgtcgtcggacagatcggagtccttggagcggcggcccggccccttggaaccggacttgtcgccaccgatgcgtgcgaacggcgtgagcttggtggccaacgacacgatgcgcgagttggaaatcatgatgtcgaccggcttggtcatgccggcggtgcgcgggcggaccagtacggagaccacggctacgataatcgcgaacaggaatccggcgagcagttcaacccacagttccgcaccccacagggatgcgatggaagacaccagtacgccgtcgagcacattgcaggcgatgcggaagaacgcacagctgccggcggtggcgtaacggtcggcgatgagccgttgcacgcgatgaatcttgtcgatcttcttcatcttgaggaactggcttgcttcggagtcggtctgcacctcgaggatgagattgttgaggctggctcgcgttacgcgggccacggcgccttcagcggcggccatggtcagcgaaagccagacgaacagggccgccacaagtacgagaatgacggtgacggcgatcagcgtggtactggaatactccataatgttttttcggtgtccttgaatgtccttgaacggtatagaataatccgaatttggtgtgattgatttggaagtttatttggaatcgaggtcgcggccagcaccgtgcgcggcgtcgtacagggccagcgcgtcgggtgtgccggcgggcagcgtggcctgcacgttggcatcgtggcgcagggcgaagaaggtgagcagcagctgtcgctgcaggccgaacatctggcgctcctgctcgggggtcacgtggtcgtagccgagcaggtgcaggatgccgtggatggtgagcaatagcatctcctgcatggtgctgtgcccggctgcggcagcctgttgggcagcgacccacgggcagatgacgatgtcgccgagcactccttccatcacggttttgccgtcgccagggcgcagctcgtccatcgggaagctcatcacgtcggtcggaccttcgaggttcatccaacgcatgtgcagttcggcgatgggatcgggatccacgaacatgatggtcaggtcggactgggtgctcacgcgcatctggtcgagtacccaaatacccaaatcggagaagaccttggggtcgatgacccactgggtttcattggtgacgtcaacgctcatcgtctgtctcactttggttggttgaatccgcttgctggcgggcatcgaagtcggtatggttgcggcggcccttgcgttcgatgtcgcggtggtcgccggcgatggcggagtgacggtcgtaggcggccacgatctggccgaccagctggtgacgtaccacgtcctcggttttgagatgcacgaatgcgatgtcgtcgatgccgcccaggatgcgttcgatggtggccagtcccgagcgcggcacggtcaggtccacctgcgagatatcgccggtgatgaccatcgtggtgttgaagcccagacgggtcaggaacatcttcatctgctgttcggtggtgttctgagcctcgtcgaggatcacgaacgcgtcgttcagcgtacggccgcgcatgtaggcgagcggcgccacttcgatggagccgtcgtccatgtaccgcttgagctggtcggcgccgagcatgtcgccaagcgcgtcgtacagcgggcgcagatacgggtcaaccttgtcgttcagcgtgccgggcagaaagccgaggctttcgccggcctccacggccgggcgcgtgaggatgatgcggcgaatctgcttgtcctggaaggcacgcacagccttggccacggccagatacgtcttgccggtgcctgcgggaccaatgccgaaggtgatggtgtgcgattcgatggcgttcacgtaggccacttgtccggcggttttcgcacggaccggcacgccggcggcaaaggtgatgacgccgggaaccgtgggcttgcggtacgtcgggtcgtgggagccggcagaacgtgcatgggcgcgttcgtttgaggtcgattgcgccagtttgtcatgcaccgggccgtgacctggatgttcgaggcgcacgtggttcttgagcacgttctggtcgagcatgcgacgcacggtgtcggcgtccataggcgcggtgtaggcggcttggatgatggtgttgaccaaatcctcggcctgtgcggcctgggcttcggtctgcttggagcgggagacgatcgccacgcggttgccgcgcacgataatcgtcaggtccggaaaggcgcgctccacctcgcgaatgacctcgtcaaccgggccgagcacggcgacggggtcaagttggggcgggatggtgatggtacgtgtagtcgttgccacgaagcggatattcccctactactcgtcgagcttttcgccggtcatcacgtgcgcgtgcacgtggaagacggtctggccggcgtcgagaccggtgttgaacaccagtcggtaggcgccgtgaaattccttgtcggcgatgttctgcgcgatggagacgatgtgggccagctcggtcgggtcgtcggcggcaagttcggcgacgttggcgtagtgcttcttgggcaccacgagcacgtggaccttggccttggggttgatgtcgttgaatgcgtaggtcgtctcgtcctcgtagaccttgctgctgggaatctgccctgcgatgatcttgcagaacaggcaatcgtcggattcgctcatcatgctccttggtttgatgttgctacgcaccagcttagcgcgtgggcgttactcgtaacgtcccaacacccgagacaacagcgacaacgctacaggaccggccgtcgcggctctcagaatattgtgccccagtacgcagctcaccgctccggccttgacgaaatcagctacctcctgctcactgatgccgccctcaggcccgaccaccacactgacagtccgcggccggccgtcctggagcgtgcgttccaccaactgcgtaaccttctcctccacgccggaccacgtatcggtagcatcctgatgcagcacaatcaccacatcgccatgcacgcaggccctgcggcagatggccacgacctccttgctggacgcgcacgcctccagttgcggcttaaaagcgcgccgcgactgctcggtggcggcatccagtaccgaattccacttcttgtccgtacggccgaccttccacttggcaatggatcggtccgcctgccatggcaccacttggtcgacgccaatctgcgtagccatatcgatggcctgctcatcatggccggttttcgccaatgcctgaatcagcgccaaacgggtgagcggctcgggttcgcgccccacttccacaacttcagcaagtccggcttcaggatcggccatcactgcctggattctcaagccgttgccgtcggaaagttgcaggctgtcccccgccttgagtcgcatggcctgcacagcatggcgcttgatgtgcgcgggcagggttagcttccagccggcgtgaagttcgtcgctgttcaccgggacatcgtcgacctgcgggtcgaaaagaaaaagggcatcagtcatgacttcaaggctacacgcgacacgccgggcacacgcgcgaattgcatccctgtaatttcatgctaagctatttactcgttgtccaaacgacacctgcccgggtggcggaatggtagacgcgctagcttgaggtgctagtgcctattttatacgggcgtacgggttcaagtcccgtctcgggcacagataaaccccttgcattgcaaggggtttttcgttatctgcacacacgaaaggccaccaatgcagttcatcacgctggacaccgttgacgacccgcgcgtcgaagcgtatgtgagcctcaccgaaatgcagttgcgcaatcgcttggaaccagccaagggcgtgttcatcgccgagtcccccaaggttatcgaccgcgcgctggccgctgaccgcgaaccgctgtcactgctggtcgaggaaccttggctggagggcatgaaagacaccttcgacttcatcgacgggcgctggggcacggacattcccgtctacgtggcctcacctgagcagctcaagcgactgaccggctatcgtctgcatcgcggcgccctatgcgcgatgcgacgctggccgctgccctccgtagccgaggtctgcaggagcgcccgccgcgtggcagtaatggaaaacatcgtggaccacaccaatgtgggcgcactgatgcgttcggcagccgcgctcgatgtggatgccgtgctggtcacgccctcctgcggtgatccgctgtaccgacgagccgctcgtgtgtcgatgggcaccgtattccagattccgtggacccgtatcaccgggttcaacgacgacggtaccgaaaacaagcattactggccgttccagggcatcgacgagttgaagtcgctgggcttcaccaccgtggccatggcattggaggatcgttcgatttcgttggacgaactgacacgccgtctgcacgcgcctgacgaagatccgacgcatatcgacaagctcgcgctgatcttcggcaccgagggcgacggcctgtcccaccatacgattgcccgcgccgatttgaccgtgaagattccgatgagccacggcgtggatagtctgaacgtggcggcatccagcgcagtggcgttctacgcgacacgctaaggaatcgcacgcgctcctaaaaggccgaatccttaacaaatctacgaaactgttcatcgcaagttcacggcacgcggggggcgaaagccttgcatgttcgaatttttctgcaattattaactatgtaaaccgaatgcaaggaagcatccggcccagcagtgcggtgtcgaaagacgctcagtaacagagaggacagttacgatggccaagaatcccaagattctgtcgattgtgcttgcaggtggtgaggggacccgcctgatgccgttaacccgcgatcgcgcgaagcccgccgttcccttcggtggtgtgtatcgtctgatcgatttcccgttgagcaatctggtgaactccgggtaccgtcaggtcgtggtgctcacccagtacaagtctcactcgcttgaccgccacatctcccaggtctggcgtttctccccgctgcttggctcgtacgtctcccctgtgcccgcgcagcagcgtctcggcaagcactggtacctcggctccgccgacgccatctaccagaccatcaacatcatcgaggacgtccagccggacatcgtggtgatcgtgggcgccgatcacgtctaccgcatggacttcgagcagatggtacagcagcacatcgagtccggcgccgagttcaccgtggccggtatccgccagcccatcgaggaatcgaaccagttcggtgtaattgaggtcgatcccgatcacccgaacatgatcaggaacttccaggagaagccggccaccaccaccggtctgccggacaatccgaaccagattctggcttccatgggtaactacgttgccaacaccaaggccctgttcgaggctctggctctcgatgagaaggctgccgacaccaagcatgacatgggcggcgacatcgccccgtacttcgcttcccgcaacgaggccggcgtctacgacttcaactcgaacgagattccgggttccacggtcactgatcacgcttactggcgcgacgtcggtacgattaagcagttctacgatgcgcacatggatctgatcgcctatgtgcccgagttcaacctgtacaaccaggattggccgatttacacgatgtccggcaacctgccgccggccaagttcgtgcacgccggccgcgaccgtctgggccacgccaccgattcgatcgtctcccccggtgtgatcgtctccggcggtgaagtgcaccactccgtgctctcccccaatgtgcgtatccactcgtgggcacagatcgtcgattccgtgctgttcgacggtgtaatcatcaaccgccgcgcccgcgtgtacaaggcgattctcgacaagaacgtggtcctgaccgaaaactccactgtcggcatcgataccgagcacgatctggcccgtggcttcaccgtcacgccggacggcattacggttgtcccgaagaacaccatcgtcgatgactgattgaccagtccagacttggaaaagccccgcatcatgcggggcttttctcgtatagagctccctcatcagagggagcttactaagcgctatcagtactttggcatgttgtcgaagttgaagccaagggcggcgagctggtcgcggccttcgggcgtgatacgctccatggtccagcgcgggtcccacgtccagtcgatgcggaactcctcgaccagaccggccagcgtggatgcgcattcgtcctcgataaggtcggtcagcgggcaggccggcgtggtcagcgtcatcgtaataatggcgcggcctagctcatcgatctcaatgccgtagaccagacccaaatcgatcacgtcgatgccaagctccggatcaatcacctgatgcagtgcctcgcgcacgtcttcggcagtggcgcggccgatatcgtcaatcgccttgatcggaatctcgctgccatcggactgttcgtcatcccggcaaccgcatttgccatggtgaccgccacacgcacaggtgtcatcgccggacgcagcagagtgctcgatcgggcgtccgttcgggaagcccttggccaaggccgggttggccatcacgcggcgagcggcctcctcgtcctgcaggacgccgttgacggcatcgaaaacggacggctgtggttcgggaaccaaattatcgttggacatatttcctcagttctttgcagcgagggctttggcgatggagtccttcagcccttcccagcctagcagagcgcatttgatgcgcatagggtatttcgacacgccttggaataccacggcgtcgccgagcttttcttccaggttctcgtcgtccagaccggcaccgcgcgattccatcagcttgtggaatgtctgttccagatccatggcctcgtccacggttttgccgtccaccagatcgaccatcaccgacaggctggcctgcgaaatggagcagccgtggccgtcccacaccaatcgcttgatggtgtgcggttcgtcatcggagacttcgacatggatggtcgcctcgtcgccgcaggtcgggttgaactggtgcgattcaccgggcgtgcagtattcgtggctggcttgcacggtgacattggccgccgcgtccgcggactgttcgaccgccgcgttgggcgcaaaggattccttgccatgcggatgttttgacgcctcgaggatgacctcttggtacatctgttcgaggtcatccccgctcataccgaattcgttcatggtgttctgttttactccactccaaagaacttacggatgcctttggccgcttcgaccaatgcttgggcatcttcgaccgaattgtagacaccggaggaggcacggttggatgcgtataggccgaagtggcggtgcaccggctgggcgcagtggtgtcccacgcgaatcgcgatgccctgggcgtcgatgaactggcccacatcgtgcgggtgcacgccggccacgtcgaacgccacggtgccgatgcggtccacgttttcgcgcggtccgaggatacgaatgccatcgatgtcgccgagcttcagcagttcggcggcgatggtcttctcatgggcctcgatgttctcgagcccgatgttcatcatccattcggcggcgacgcctgcggccaccacttgggcgaccggctgggtgccggcctcgaagcgggccggaggggccatgtattgggcctcgtggtccatgtaggcgagttcgaccatggagccgccgaagttggccggcggcagggcttcgagcagttcgcgcttaccgtacaggaaaccgacgccggtaggaccgtacatcttgtgcgcgctccaggcagcgaagtccacatcaagcgcatggaaatcgactttgaggtgcggtacggactggcaagcgtccaagatgaagatcgaacctacttcatgcgcacgcttgatgataggggcgatgttggtgatggcacccgtggtgttgcccacgtgggtgacggccacgaccttggtgcgttcggtgatgacttcgtcgaggttgtccgtacgcacacggccgtcctcggtcaggtcgatccacttgaaggtggcaccggtacggtaggccagctcctggaatggcaacagcactgaatgatgttccgcacgcgagacgacgatctcatcgcccggcttcagggcaaaacgcttggcggcttctcccccacgacccagcgacgcattgccgaatgcggtggcgagcaggttcagtccggccgtggcaccaccggtgacgacgatctcttcttcgccttccgctgcattcgcgccgaccagcttggcgaccttggcacgggcctcttcgaaagccatggtactacgggccgccagctcgtgggcaccgcggtgcacgccggcgttgatcgtacggtagaagttcgcctcggcgtcgatcaccgcattcggcttctgcgaggtggccgcagaatccaggtacacgagcgggtgcccgtgaatctcctgattcagaatcgggaactcgccccgaatctccttaaaatcaaccattatgttcccctacttacgtaacaattgtacgaaacaagtgggagtcggacatggcctgttcgcgaccgtaacgacttggcctgagcggcccggagcgtgtcgagaatagggcatgtcaggctcccacggtcacggactcaggccagcgcggactcggagtcggcgccttcgggcaggtactggtcgtagccgttctcttcgagttcgtcggccagctcagggccgccggtcttgacgaagtggccgtcggcgaacacgtgcacgatgtccggcttgatgtacttcaagatacgggtgtagtgcgtgaccatgaggatgccgaactggttggcttccttggcacggttcacgccttcggacacgatgcgcagggcgtccacgtccaagccggagtcggtttcgtcaaggatggcgaacttcggcttcagcagttcgagctgcagcacttcggcgcgcttcttttcaccgccggagaagccttcgttcacggaacgggaggcgaacttcgggtccatcttgaggcgcttcatggctgcggacaggtccttggcccactggcgaataccgggagcctcgccgtcgatttcggtcttggcggtgcgcaagaagttggtcatggacacgcccggtacttcgactgggtattgcatggccaggaacaggccggccttggcgcgctcgtccggagtcatcttgaggatgtccttgccgtcgaggagggcctcgccggagtcgaccacgtacttggggtggccggccaacgtgtaggcgagagtggacttgccggaaccgttggggcccatgatagcgtgggtttcgccggagtggacggtcagggtggcacccttcaggatcggcttgatgccttccttggtttcgacgtggacgtgcaggtccttgatttcgagtgttgacattgttgtgctcctaaaaatgctgttcttacttgtcttcgaggacctgtgccatggcgtcgttttcgccacgggccagtcggcggtcaatcacggtcatcagatgttcggagatggcgggaatgccgatctcctcgacgagttcgccgaagaagccgcgcacaacgagcttgcgggcgtcggtttcggggatgccgcgggattcgaggtagaacagttcctcgtcgtcgaagcggcccaccgaagaggcgtgaccggcaccgatgatgttgccgttttcgatttcgaggttcggctcggaatcggcgatggcacccggggtcaggaccaggttgcggttgagctcgtaggagtcggtgccgggggcggtgggctggatgagcgcgttgcccacccaagtggagtgcgcgcccttgccgtcaagcgcgcccttgtagaccacgcgggacttgcagtcggggtggttgtgtaccaccatcgtgcggtgttcgatgtgctcgccggggtccacgaagtagatgccgagcatgttgaggtcgccttgttcgccgccgaagtcctgatccatgcggatgcggacgatgtcgccgcccaaggtcacgacggagtggcgcagggatgcgccttcgccgacgtggatgcggtggttggccacatgcttggcggttttggcccattcctgaacgaacgtggtggagacgtgcgagtccttgccggtggtgatttccacgccttcggccaatcgtgcgtcaccgtcgtgttccacgacgacgtccgcatgagacttgtcggcggcggcgatcaccagatggaaggcgtcgaggtcctcccccgcgccgtgcaccttgacgagcacgggctgggcgatctcaccggacagttccagaatggttgcggtgtggccggattcccattcgactgcggagacgcggtcgttgggcttggacacagtgccggacaggccctcaccgagcttgatctggctgagcttcacgccttcggccaacggcgagccgtcaatcatggagacttcgatctgcgtttcgccggaaggcttgaacacggtgaagaactcgttgatgcgctcgataggcgtgtagcgccattcgtcctgcttgcggctgggctccgggtagtcgcctgcgttgaacgaacgcacggcatggtccacggaggacggcatggcggccggaatcgcgtacgggtcgttggggtcggcgaccggaatcttgatttccttgacgggtgttgtgttgtcggtcatcggaatcagcccaccgatccttccatctgaagttccacaagtctgttgagttcaagcgcgtattccatcggcagctcgcggctgatcggttcgacgaagccgcgcacgatcatgcctcgcgcctcttcctccgtaagtcctcggctcatcaggtagaagagctggtcttcggagatcttggaaacggtggcttcgtgggccatcgagacgtcgtcttcgcgaacgtcgacgtgcgggtaggtatcggagcgggagaagtcgtcgaccagcagggcatcgcacacggtcgagttggacgaaccgtacgcgcccttgacgattttgaccagaccgcggtaggcggagcggccgccgccgcgcgagatggacttggcgacgatggtggagctggtgtgcggggcgaggtgaatcatcttcgcgcccgtgtcctggtactggcccttgccggcgaagccgagggacatggtggatgccttggcatacggttcggcgaggatgcaggccgggtacttcatggtggccttggaaccgatgttgccatccacccactccatcgtgccgccctcacgcacgtaggcacgctgggtgacgaggttgtagacgttgttcgaccagttctgcacggtggtgtagcgcacgcgggcgtgcttttcgacgatgatctcgacgatggcggcgtgcagcgagtcctcggaccagatcggggcggtgcagccttccacgtagtgcacgtaggagccttcgtccgcgatgatcagcgtacgttcgaactgacccatggccggggtgttgatgcggaagtatgcctgcaacgggatgtccacgtgcacgcccttcggcacgtatacgaacgagccgccggaccatgccgcggtgttgagggcgccgaacttgttgtcttccggaggcacgacggtgccgaagtacttcttgacaagttcagggtattcgcgcacagcggtgtccgtgtcgacgaagatcacaccctgcttcttcaggtcctcacgaatggagttgtagattacctcggactcgtactgggcagccacgccggagacgaggcggttcttctccgcctccgggatgccaaggcgatcgtaggtgttgcggatgtcgtccggcagctcctcccacgacttcgcctgcttctcgatcggcttgacgtagtacttgaagtcgtcggcgttgaagccggagagatccacaccccaatcgggcatgggcttttcgaggaacgccttgaatccacgcagacgcatgtcgagcatccactgcggctcgcctttgtcggcgctgatcgcgcgtacgacgttctcatcaatgcctcgttttgcggcttcgccggcggcatcagaatcatgccaaccatagttgtagtcgccgaactggctgatgatctcgtcatccttcttgatcttgtcctcgttgacgcgggtacgatcagccacatactggctcatctccacgtcagcggcggcgtttggtgctgtgttttcggtcaccatcctgccttccttgtatcacacttaatcctatgaaaacctagcagaacccaagtgcaaacactagctgccctgacgcatattggctgtgggcttgattacatgcgggcgccatcgggccatgcggcatcacggatggcgccaaacggcgaaggcgtggcggcgaagcatcctgagatgccgtgccgtcacgccttcatcgtgcgcggaccgaccgcgcgggatccacggtcagcgggccgcctgatggccgagcgccgccttgaccagaccggcgaacagcgggtgcggcttggtcgggcgagacttgaactccgggtgagcctgggtggccacatagaacgggtgcacgtcctgcggcagttccacgaactcggtgagctcgccgtccgggctctggccggagatgcgcaggccgccttcacgcagacgatccttgtaggccacgttgacttcgtaacggtggcggtggcgctcggtgacatgcgtggtgccgtacagttcggcgaccagcgagccttcctccagctcggccgggtaggagccaagacgcatggtgtggcccatgtcgcccttgccggccacgatgtccttctgctcttccatggtggcgatcaccgggttggcgcaatcgggctcgaactcggaagagttcgcgtcttcaatgcccagcacgtggcgggagtattcgatgaccatggactgcagaccaaggcacaggccaagggcgggcagcttggtttcacgggcgaacttcagggcgccgatcttgccgtcgatgccgcgaatgccaaagccgccggggatcacgatgccgtcgacgttgtcgagagcggcggccgcgccttcggtggtttcgcaacggtcggcagcaacccatttgacgttgaccttggcccagttggcaaagccgccggccttgatggcctcggtgacagacaggtaggcgtccggcagatcgatgtacttgccgacgatggcgatgttgacctcgtgcttggggtggtggacgcgctcaagcaggtctgcccattcatcccaatcgacatcgtggaacggcaggccgagctcacgcaccacgtaagcatcaaggccctcttcgaacaggatcttcggtacatcgtagatgctcggcgcatccacgcagttgaccacaccttcggcatcgacgtcgcacatcagggagatcttgtctttgatggactggttgagcgggcggtcggaacgcagcacgagggcgtccggggagatgccgagttgacgcagcatcatcacggagtgctgggtgggcttggtcttgagctcgtgggcggcggaaatgtacggcaccagggaaacgtgcacgaacatgcagttgtccgggccgagatcgcgacgcacttcgcgggcggcctcaaggaagggctgggactcgatgtcgccgacggtaccaccgatttcggtgatgatcacatccacgtcatcggaagcctgggcgcgcatacgagacttgatttcgttggtgatgtgcgggatgacctgcacgcactggccgaggtattcgccggcgcgctccttgcgcagcacttcctgatagatctgaccggtggtgacgttggccttctggctcaggaagacgtcgaggaaacgctcgtagtggccgatgtcgagatcggtttcggcaccgtcttcggtcacgtagacctcaccatgctggaacgggttcatggtgcccgggtcgacgttgatgtacggatcgagcttttgctgcagaacatggataccgcggctgcgcagcaaacgaccgagcgaagatgcggtcaggcccttgccgagagaggagacaacgccgccagtgacgaaaatatgcttggtgacgtgttcttgagaattaccatgtgttcttctaaccatggaatttcactctatcatccgtgtatgacccggcgtgttcatgacgtggccggtgtagtcgtgcgtaggcagcccatctcgttctgccttggccagcatatggtcgaatacacggcgtacttcgggtccataaggcgcgcccggacgaggattcgggtccgattcgtcggaacaggaatcccgggcgcaacgtcgactgctacccgggattggctggagggcttggttctattcgctcagcaagtgcgccacagcatcgagcgcgagcttgtagccgtagaaacccatgccggtgatggtgccggtggccacagggctgattacggaacgcttgcggaactcgtcgcgggcggacgggttggaaatatggacttccataagcggcaggttctcatcaatgaccatgtgcgcggcgtcggcgagagcatacgaatagtgcgtgaaggcggcgggattcatgaccaccggggttttctcgtcggcggcttggtgcatccagtgcaccatttcggcttcgtcgtcggtctggcgcacctcgacttcgaggccgaggtccttgccccattcggcgcagagcttgcgcagggtgtcgaggtcttgacgaccgtagacgtcgggctggcggacgccgagacgtccgaggttagggccattgacaacaatgactttggtcattgggactccttttgtttgtgcttctctccctccgccccttcggggcacctccctcatcagagggaggtagaaggtaaatccgactccggggcacctccgttagaggggagccaagtactttttctgaggggatggcgaacggcacggcctacggccgttcaattactgctggatacgacggaatgcttcttctacggcttcggcgggcgggttgtcgaggtgtacgacgtgaccaatctcgtcgaggaccacgaaacgcagttcgttgccacgggctttcttgtcgcgatgcatcaatgcgagcacgtcgtcgaacgagctgccattccacgacgtcggcagacccagcgaagcgagcaacgaacggtgatagtcaaccagatcctgatcgatgtaaccgatcagatgggccagctcggcggcatacaccataccgacggccaccgcattgccatgcctccagcggaagtgctcgagcttttcgatggcatggcccatcgtgtgcccgtagttgaggaattcacgcagacccttctccttcaaatcggaggagacgtagtaggccttgacctttaccgtgcgctcaatgagctcggcaaccacgtcttcgagcggcgagccgaggaatgtagagccgtcgaaagcgcgcagttcagctgcgtggtcttcgaggatatgcaggatctcggggtcgcggatgaaaccggatttggcgacttcaccgagaccctcgatgaagatgtcattgggcagcgtagccagcgtcttggtgtcggccagcacaccggcaggcgtgtagaacgagccgacgaggttcttgccctgcggggtgttgatgccggttttgccaccggtggaggcatcgaccatggccagcagcgaggtcgggcagtttacatagcgcacgccgcgcatccacgtggcagccacaaaaccggccaaatcggttgcggcaccgcctccaagccccaccacggcatcggatcgggtgaaaccttcgttgccaaggcgttcccaaatgccgttggccacggtaatggtcttgccgggttcggcatccggaatcacgatgtcggaaacctcatagccgccctgacgcaacagggcgcgggcacgatcggagtgtcgctgcaccggctgggtatggataagcgcgattttggagggcttgggtcccagcacgtcgaccagatgattcatggcaccttcgccaatgaccacatcatacggctcaattgccgatccggtaacatgcactgctcgctcagataccatatcaatcactttcttcgctgcgccctgaggcgtaagcccccgggtatggacatgaacgttggcgacctcgcggaataccgggtcacgctgcttgaacagtttcttccaacgggagttggcattgccattgagcatgggccggcctcccccgcggttcgcgcgttccatggcctccgccggatcggcgtcaagatagaccacacgaccgccatggtcgatgtatgaggcgagggcatgctgggtggatggcgtcatgggagcgccaccgcccagcgaaaagataccgtcgaaatcctcaagcatatcggcgatgagatcggcctcgacctcgcggaatgccggctcaccgtattcatcgaagtagacgggaatcttcatgcccacttcacgttcgatctccacatcggcatcggcgaacggcagacgcaacatatgcgccacttccttaccgacacgtgttttgccggctcccatcatgccgatgatgacggcgcgggggcgtgcggtcataatctacgaatcctctcgacgattggtgggtacagttgctgatggttccgcggcagtcgtctcggaaccatactccacttcgttcagcgcatgtgctccggccacgaggcgagatacgactcaaggttgcgccgtgtttcggcaacactgtctccaccgaacttatccagcgcgtacttcgccaaagtcagacgcaccatggcctcggccaccacggatgccgcaggcacggcggtgctgtcggaacgctggttgatggcttgtgcggattcgccggtcagcacgtcgaccgtacgcagggccttggggatggacggaatcggcttcatggcaccgcgtacgcgaatcacctggccattggacataccgccttcaatgccgcctgcgcggttggacagacggtcgatgcggccgtcggcgttgaccacgatctcatcgtgcgcctgcgaaccggggcgggaggcttccaggaagccgtcgccgatctccacacccttgaacgcctgaatgcccataatcgcggaggccagagccgcgtccagacgacggtcggattccacgtaggtgccgatgccggcaggcacgccgtaagccagcacttcaatcacgccgcccaacgtgtcggcggccttcttggcctcgttgatgcgttcgatgatgcgggcctcggcctctttatccaacgtacgcacgggagaggcatccaacgcttccagatcgtcaggtgtgggcaacggcaaatcagggttggtctgcacgccaccgagcgccaccacgtgggctacggtgcgaatgccgaacgcctgatccaggaactgcttggccacctcgcccaaggccacacgggaggcggtctcacgggcgctggagcgctccagtaccgggcgggcgtcgtcaaaaccatacttgcgcatgccggtcagatcggcgtggcccgggcgcgggcggctcagcggcgcattgcggccttcgcgcggcaggtcatggtcgagtgcatcggcgctcatgacctcggtccacttcggccattcggtgttggcgatttcgatggccaccggcgagccgagggtcaggccgtggcgtacaccggtcagcagacggaccttgtcttgctcgaacttcatgcgggcaccacggccatatccaagtcgacggcgtgccagtgcggaaacgatatcgtccgtgctaatgcgcacgccggccggcaacccttcaatcatggccaccaatgcttctccgtgagactcccctgccgtctgccaacgcagcataacttccctcgtttcatgtgtgtacgtctatgtgtacgtctgactaggggttaatgttaagccatgccatacctgttcacgctacccggtctgctatgtgggcttgcactgtccattgaggatgttcgtcatcggcgggtgccgatcgcatgggtggccgtgggcgcgttaatccagttggccgccgatttcgcgcatggagtggtggcgaacgacctgttcgtgctgttgcaggcgctgttgttcaccgtgctatgttgcctgatccagttcgcgttggcgttgctggtgccgcggtcattgggattcggcgatgtgaccgccttgatacctatgggattgtctgtcggactgcttggcctgttgcctgtggtggtctggtggctggcgatgggcgttgccggcatcacatggattgccttgtggacgcgattcgacccgcaacgcacatcgccgacacatgcaggcaaggtgccgtatgtgccggtgatattggtgggcgcgattgtggcggtggttgttggggcttaatcccgtatcactcccctcagtccactttgcggacagctcccctcggcgaggggagccaatgaggcgactactggttttcggcttgccacttgcgtagttcggccacattctggtcatgttcatcggcggttacggcgaacttggtttcgccggtgtccagattgaccgtgcagaagtacagccaattgccgctttcggggtgcagtgccgcttgaatggcgctatcgccgggattgctgatcggcgtaggcggcaggccggagatcttgtacgtgttgtacgggttggactcgtcttgggtcatctcggtggtcacctgcgcgggcttgacgttattgccataggccacggtggaatccatgcccaacgacatgccctgctccaaacggttctcgatgactcgcgtcactttgccgtagtaatcggctttgttgacctcggcctcggcgatagaggcgatgatcatcacccgttcgcggtcactgccggtcggcacgcccaattcatccaacttggcgatacgcttatcgaccatggccttgaggatttccgaagcgctcttcatgctcttgacgttgtaggttcccggctccagccatccctcaaagctaccgcccgcttcattgggcagaatatccttacccttgttcttgataatcgtgtcgaattcgctttgggcaacgccggaaagcttcgcggcgtcggcgaacacatcggtagcacgttcaccgggatgaacctcaaggaagcccgccgcctggttggtgtcggagagaacggcgatcacatcggatgcggccatatgcttcttcaatgtgaacgttcccggatagagtgtcgcgctattggcgttgaccacgctggtgaacgcggcagtagacttgatgacttcggccttgagcagattatcggcgatctccgccgcgccttggccctcgctcacggtgaattcgacctcgccatagcccggtccccgatagtccgcgatggccgtcgactggttgctccggctgtcgcgccatgcgatgagcttggttacgccgaaatagccgccgccgataagcagggcgacgatggcgatagcgatgataatgccactgacgcgcttgcgcttgcgctgtgcacgtcgcttgcgcatctccttgcgggatttcggcggttctggcggctcggtcccgcgcattggttctgacccctgttcgacccaatgcgtgttgtcatcaaagaactcgttaaaatcatcggtcataaccgatacctcactgctcccgggtacggtcgagtgccgtctgcaaaatcaccactgccgactgctggtcaaccaccggcctgtgcttgttcgaagctttatgggcctcgaacagttgacgatgcgcactgactgttgtcaatctctcatctatcaatgacacctgtggaatctgatactccgtagaatcactgtcttcactctctgcttgcagcctcttctccagattggccgcccacctgcgcgcttttttggcgcttttgccttctgtaccgtccatctgcaggggcagtccgacgattacatggtccacatgttcgtcttcgatgacgttcaggacctcgtcaatagcaaagaaatagtcgccggcaacatgaatgttgccagcagggtgtgcaaaggtaagctccgggtcggacagtgccagtccgacccgggcattacccaaatcaacgcctaaccacaccactggcggaatcaggctttctgcgcctcgtgctcgagcgcttcgagggcctcgtcgatcttggaggcatcgacaccgccaccctgggcgaagtccggcttgccgccgccaccgccgccgaggaccttggctgcgccacgcaccagatcaccggccttgatgccgaccttgcgggcggcctcgttggtggccacggcgaccatcggcttgtcatcctcgttcacgccggcgagggccaccaccacgggggcgtcttcaccgagctgggcgcgcacgtcgagtacggtcttgcgcagggcgtcgaccgcgccgaagtggcccacgttcttgacggccaccttgaccggggccgcggagttcttggtgtcagcaaccagcgccggaaccgaggcggccagctgggactcgtacatggaggccaagcgacgatcggattccttgagcttggcgagcagggcgttcacacgctcggcgagctcgtccgggcgagcgttgagcttgtcggacagctgggagaccaacgcgtgctcacgagcgttgaagtcataggcaccctggcccacgacggcgtcgacacgacgcacgccggagccgatggaggcttcggacaggatgttgaccatgccgatcttgccgacgtggtccacgtgggtaccaccacacagctcgcggctccagccgtcttcgccgatggagaccacgcgtacgatgtcgccgtacttctcgccgaacaggtgcatggcaccgagggcgatggcgtcgtcgaacttcatttccttggtggtcacggcgaggttgtcgcgcagcttgtcgttgacgcgctcctcgactgcggagatcacggacttggccggggccttggaccactggaagtcgaagcgcagacggttcggggcgtcctcggagccgcgctgggtggcctgcgggccgagctcctcacgcagcgccttgtgcaccatgtgcgtggcggtgtgcgagcgggcgatggcgccacggcgggccaggtcgatgttggcgttgacttcggcgccgacgaccagcgtgccttcggtcagacggcactggtggacgatgaggtccttaatgggcttctgcacgtcgtcgacttcgagcactgcaccgtcgtcggacaggatctcgccctgatcggcaagctggccgccggcctccgcatagaacggggtacggtcgagaatgacttcgacgttggccgggccggtgacggcgggcacagagcccttgccttcctgcatgatgccgatgaccttggcacgggcggacatgtccgtgtagccgaggaagtcgatcggcttggcgagcgtcttcttgaagtcgtcatagaccgacaggtccacgttgtgacgcttcttgagggcgtcggcgcgggcacgggacttctgctctgccataagctcgcggaacttggcctcgtccaccttcacgccctgatcggcggccatttcgagggtcagctcaatcgggaagccgtaagtgtcgtgcagagtgaacgcatcagagccggagaccaccgggtcggcggtcttcttggccttc

SEQ ID NO: 2145 - DNA, 6673 bp, Unknown
  R51_24m  MAG No. k141_9023
cggcgaaatcgtgctcgatcatcagaacgacgaccagttctacgatttcgactccaagtacatggatgcctccgccagccacgtggaagtgccggccaatctgccggtcagcgtgcttgaggacgtgcgtgacgtggcccggcgtgcgttcaaggccgtggatggtgccggcttgagccgtgtggacaccttcgtaacgcctgatggcacggtgatggtcaacgaaatcaacaccatgcccggcttcacgccgatttctatgtatcccaaggcttgggatgccaccggagtgagctacaccgaactcatcacgcgattgattgagggcgtgctgaggtaagtgtggtgcggaatcggccgccaaggaagaaggcgcgctgaacgtcatcgccttgccgcatgattggtccaactatggcgaggtcatcgagggcttcaagaagaagtacccggagatcaagatcaccgagctgaacccgaacgcctcctccaaggaggagatcgacgccgccaagaccaacaagggtaccgacgccgcccccgatgtcttcgacgtcggccaggccatcgccgccacctccaccgactatttcgccccgtacaaggtgcgggcctggaacaagatccctgatgctgccaagaacgtcgacggcgcctactacgccgactacaccggcatcatgtccgtgggctggaacgccgacaagtacggcgatgtcgcctccctgaacgacctgctcgatccgaagttcgccggcaccgtgtccctgaacggcaagcctaccgaggccggcgcggccttcaacggctatctgatggtcaaccagctcgccggcggtgacatcaacaacctgcagcccggtctcgacttcttcaagaagctcaaggaagccggcaacctgaacaccatcgatgtgaccaacggcaccatcgactccggccagaccggcgtggtcttcgactggacctacaaccaggcctcctacaagaaggaactcaagtccaagggcgtgaactggaagtacaagaccttccccaaagcccaggtcgtcagctactacaaccaggccatcaacaaggacgcgccgcaccccgccgccgcacgcctgtgggaggaatacctgtacaccgccgaaacccagaacctgtggttcaagggcggcgccaacccggtgctgctcgactccatgaaggccgacggcaccgtcgaccaggccaccctgaaggacgccatcaccatcgaaggccagccggtcacctacagcaacgatgactccacccgcatcaccgagtggcttcaaaacaactgggacaagacgatcggcaactgagagtccacgatgaccgccgcaatcgcacccatcgcaccgaacggacccgccgcctccaaggccgcgggtccgtccgccgcatcgacccccgcttcgtccgcactggcgaagcaccgtcaggagcttggcacgctcgccaccacgctcccgttcttcgcctacaccgcctgcttcctgctggcacccaccgtgatcgtgatcatcggcgcgttccaggatcgcagcggcggtttcacgcttgcgaacttccacaagatgttcgaagccaacaccatcgccgcgttcggcacgtcaatcctggtgtccgtggcctcatccctgatcggtgccgtggtgggcgcgctcgcctcctacgcgctggtgatcggcgccaagccgaacggaccgctgcgccgtatggtcgccgccatctcatcggtgctcgcccagttcggcggcgtgatgctcgcgttcgcgttcatcgccactcttggcatcaacggcatcggcaccatgctcatcaaaaccctgactggctataccgtgaacccgaattggctcagctccctgccggggctggtgaccgtctactgctacttccagattccgctgatgatcatcatcttcctgcctgcggtcgattccattcgtccacagtggcgcgaagcctgcgagtcgctcggcggcaacaccgtccaatactggacgcgcgtggcctgcccgatcctcgcaccccgcttcatctcggcgttcctgctgttgttcgcctccgcgttctccgcatacgcgaccgccgcagccctgttctcgcagcgctcgattctggtgccgttgatgatccaaggtgccatgcgcaatgagatggaccccaaccagcagggcttcgcgcaggtgctggcattcgcaatgatcatcgtcgtggccatcgtcatgctgctgagccacgccgtggaaaagagggccggacgttggcaatgaccgaaacttccacaaccaagccgccgcagctgcgtgccgcccgcgtgcgcaaacagagcatcatcaaattcgtgatcctgttcgtcaccctggcgttcctgttcgtgccgctgctggccatgttcatcttcaccctgcgtcacccgttgtccggtcgctggtcggccgcgccgtggacggcgattttcaccggcaacggcgaatcgttgggcgccgatctgagcgtgctatggcagggcgtcggcatctcgctgtcgttgagcgccgtcaccgtcgtgatcatgctcatcctgctggtgcccaccatggtcatcgtgcatattcgctccaaagccttggagcgtgcaatcgaatgggtggccacgctgccgctgaccattccggccatcgtgctggtggtgggtcttgggccgatctaccgttggctttccgccgacgtgttgagcaccaacccgatctggctgtgcttcgcctatgtgattctcgtgatgccgttcgccttccgcgcgatcgccgtgggcctcaactccatcgacgtcaagacgttggtcgaagcctcccgatcgctcggcgcctcctggcccaaagtgttcttcaaggtgatcatcccgaacctgtggcagtcgatcctctcggcatccttcatctccatcgccgtggtactcggtgaatacaccgtcgcctcgctgctcggccgtatgaacctgcaggtcgcgctctaccagctcggccaatccaatgcccaaatttccaccgccatgtcgctgctggctctgctcttcggcgtggtgctcctcgttgcgctcgacctgatctccgacgcaatgcgtaagtcaagggaaggtaagtgacccgatgaacaacgattcaactcccacccgtcaggaaaccggtaccgcagtggacgccgccccggcgtccccggccatcccggcagccgtgtcctccactgccgaggacgccttcaagaacgatcccaccgctaccctcgagggcgtgcgcggcaaggacgtgaccaaggccgccaaggccctgctcaaagacaccgccaagcgcggcggtggttccattcagatgcagaacgtcgtcaagatctatcccggctccaccgttcacgcgctcgacgacttcaacctggacatcaagcccggcgaaatggtcgtgctgctcggtggatccggttgcggcaagtccaccgcgctgcgatcgcttgccggtctcgaagacatccaaggcggacgcatcatggtcggcggacaggacgtcaccggtgtgccggtgaacaagcgcgagatggccatggtgttccaggcgtactcgctgttcccgcacatgaccgccctggagaacgtggaattcggcctcgaagtgcgcggcatgggcaaggccgaacgccgcaagatcgccatggaacagctggagctcgtggggcttgccgatcaggccaagaagtacacgcagcagatgtccggcggccagcagcagcgcgtggccctggcccgggcgctggccatcaagccgcgcgtgctgctgctcgacgagccgttgtccgcgctcgacgccaaagtgcgcgtccagctgcgtgaccagattcgccgcatccaactcaccaccggcaccacaaccgtcttcgtgacccacgatcaggaagaggcgctggccgtggccgaccgcatcggcgtgatgaacaagggcaagatcgagcagatcgccgccccgcaggacctgtaccagcgccctgccaccgagtacgtggccacgttcattggactcaccaaccgcctgctcggcgcatccaatggcgacgaggccgtggtcttcggccagcgcgtgccgctgctcgccggctccgccaagggcgattccgtggccgtgctcgtgcgcccggagaacctgatgctggccttggctggcagcagcgattcgcacgtcggcgaacgcgcccgcgtggaggtcattcacttccttggctctttggttcgtgtggacacggtcatcacctccggcgaataccagcgctggaacaaaggtgaacagctcaaggccaccgtgcagctgcccgccagcgagctgccggccggtctggcggtgggcgatgacgtgattgtcgccccgcgtccggtcgccgcgctcgcctgctgaatggcgttgcgatgatcgtgcggttctgttctgttttgtgactgtacgatcgtcgaatggcttatcggcaatgatatgtgtgggacggcggcgatttttgggcgattatcgcgtgccgtcccacgccggtgcgggacggcatgaacgtcaaacgatgtacattcgtgccgtcccacagattgtattgaggaatcgttgcaatgacgccatttcttcgtgcggcgtcatcagtcatatgtggagtggtgtgggccgccgcgaaaaaatcgggcaaaatcgcgtgccgtcccacaacaatcccgcagagtagaggactctctcggcatggggattgattgacgtagatcattccttgcccattgatgattttccccattcccaatgcaatcgaaacgccgtgccgtattcttgaagagtattgcacgtgtgatcggtccgtttgcggccagtgactatgggggataagtatgagcggaccaatgccgtcggcgcagcagccgcaacaaaccccacgcgattggtggttcacggcccatcgccggttttcgacaatcggctcggcgctcgccattatgatggtgttctggatcgggctgaatattctggccactgaagcactacgaacgctgcttggcgccgatgtgcccgcttgggctgtgctgctcgcctcctccgggccgctgtatgtggtggccatgccgctgagtatgttggccttcactcgcgtaccggttattcgcacccggcagtaccccatgaaggcgggggagttcattcggattttcgtcatgtgcattccggtaatgctcttgggcaatatgatcggcaatatattgtctgccggagccactgatggtcaggccaccaatcgcatcaacgacatgattcttggcagcgactggcgggtgaacgcattgttcataggcctgttggcaccggtttgtgaagaatggatttttcgcaaggagattatctcccgcctgcgccggtacggagaaaagaccgcaatcatgttctccgcattggcgttcgcgctattccatatgaacgtgttccagttcttctacgcctttggcctaggactgatgttcggatatgtatacacacgcacctcccgcctgcggtattcagtggctatgcacatgctgatcaacctgaacggggcagtgctcgccccattggtgatacaacagatcgatccccgcatcctcgacggcacaatcagcgaggccgaaatcatgcgtatggctgaaaccggtaacatgggcggcatgggcatcatgatgttgtacggcacagtgatgttgggcctctgcattgccggtatcgtgctgcttatcaccaagcgcaagagctgggagttctatcttgcgccagaggagttgccggcggggcttaaaatacgcaccgcctatgccaatcccggcgttattgcgtacctactgctgactgtgatgcttaccggttggatgctgttcgcatgactgtcatagccggacccagagaggcgagtcgggagatatcatagattgtctgacgagccgccatcttcgacaaggtattcggtgcccgaaccggcgatggctcgcgccgccatatctttgatggtggaaggtagcacaccctcgcgcgcgaacaccagcacttggccggtcatgccgtaaggagaaaaaccggtgaacttgaccagcggtggctggccctccagtgccacgtcggcggtggctttggttacgcggtcgagaatatccctgctgatcgcggacggatcgccggaggccttggccgtgaattcgagcgtggccatgccttcgctggccggcgtgagcttggtcaaggcggccgtattgagcaccgaattgggaatgaccatcatgtccccggagcgggtgcgcaccacggtctgtcgccaggtgatgtcatgcacggtacctgtgacgccttgaatggtcaccagatcgccgggttggattacgcggcccagcatcaggccgaagccgccgatgatgttggcgatcgtatccttcagacccagcgagatcgccacgcctccgacgccgagggcggtgaccagggtggtcggattgatgccgaacaccggttgcagcaccatcgccgtaccggtgacccagatggtcacgcgcgtgagattcacgaaaatcgaggcgctgggaatctgcgaactatccagaaccctgcgcagcacgcggctgatgacgcggtcggccgcgaacacgacggcc

SEQ ID NO: 2146 - DNA, 8590 bp, Unknown
  R51_24m  MAG No. k141_9220
aggaagtcgggggccacatcgtttgcacggtggactatcggatcaattctgatcagatcagctcgaggtcgacatcgaggctgatcggcttgtccgccgggatatggtactgggggtgcaccggcgacatccaggaatcatcgccgccaacgcccatctgtgcggcaaggacgcgcaggaacatgtgcttcggcttcggcagctcgtcctggtgctgagcctcctcaagcatgaagctggagtacggcaacaggcttaccgcgaacggcgcggcaccatcggcgcggctgacgcgcatgccgtggccgtgatcgtcggtaatctcggcccaacgcacatcctcatggttgcccgtctcctgcggcatgaggtacggcgcatgatccgcgaaagcgttggtgctccacacgccgagcttggcgtgtttgcggtccaggtacgtctcctccgggccggtgccgaagaacctcaggttcgtgtactgcacaggcagcgtccattcgatgccgaacgccgggatggtgggcaggtcaccctgctctccggggtattcgacgtgcaggttcacgcggccatcggtgtgggccgtgtaggagacggtcaccttggtgcgctgcgcggtggcgagctcatacgtgtacgtgcccttgagcgtgctgtcgtcgatctgctcgagcacgttgtccacgcagcgggcgtagcggccggcgcccagccactggacgcgctcgaaaccgtgaccggcgccgcgatcgttgtcggtcagcggacggaaggtggtgattgcgggacggcgcagcacgaactcgttgccggcgaaggtgtaggagaccatgccgccctgggtgcgcgacagcaggacctcgcgtccggcgcctcgcacgccggcgttccaacggcccacggtgatggtcccatcggccggcttcgtgtcgggcgtcgcggtggcgtccgcgggcaccacggtctgtccgaaggcgagctcgtagccgctctcggcccaatcggtcgccttggcgagacgctgcgaaacctgcagcaccagttcgcgggcgtcggcgcggtacgccgccaccggccatgcgacatcgaacgtgcgggtctcaccggcgggcacgtcgaaacgtcgggtggactgccagaccggcttgccgtcggcgagaacgctcaggacgaacacgtagtcgccggtggcggtgaacaggttgtcgttcttgacggacaccgaatccttcgtcacgtcgatgtggacgttcgagtacagctgcttgacttcctgggccttgggggacggcttgcggtcggcgaacagcaggccgtcgccggagaactcgtagtcggacggacggtcgccgaagtctccgccgtagcgcaggctcctggtgccgtcgggctgggtggcgtagatggcctggtcgatgaagtcccagatgaagccgccctgatacttcgggtagcgttcgagcgccgtgtattcgtccatgttgcccacggagttgcccatggcgtgcatgtattcgcaggagaggtacggcttcttcgggtcgtccttcaggtacttctcgatctcgtcggcatgcgagtacatacgggtttcgatgtcggtgacgtcatcgtagtcacggttgtgggtcacgccctcgtagtgcaccggacggttcgggtcgatgtcgtgcacgtgcttgtacatggcgcggaacacgtcacccacgtaggattcgttgcccagtgaccagatcagcacgctcgggtggttgtagtcgcgacgcatcatgctgttgacgcggtcgacgcaggcgccttcccattcgcgattgctgcccggcacgatggtgtcctcggtgaggacgtctccgggcagggaccagctgccgtgggcttcgaggttggtctcgtcgatcaggtagatgccgtactcgtcgcacagttcgtaccagcgttcctggttcgggtagtgcgaggtgcggatggagttgatgttgtggcgcttgcagaagaccacatcatcgatcatgtcctgctcggtgatggcgcggccgcgttcggcgtcgaactcgtggcggtcggcgcccttgaacacgatgcgcttgccgttgatggtcaggatgccgtcctcgatgcggaagcggcggaaaccgaccttctgggacgtgcattcgatgacgtctcccgtctggtcgatgacgtcgacgtcaagctcgtacagcgtcgggctttcggcgctccagggttcgatgccctgcagcggcccgctggagatcgcggtctgcgcctccgcgtcgcccgtcgtctgccacaccgtgttgccgtcggcgtccttcagggtcgcgcggaccgtggccgcgtcggccgcgttgagcacggtcagcgcggcatcgagggaagcggtgccggcctcgggatcccaatcggcttcgatctgcgtgttctcgatgtgcacatgcgggcgggcggcgagttcgacggagcggaacaggccgtgcagacgccagaagtcctgatcctcaagccaggaggcgctggagtattcgtagcaggcgacggccacgacgttctccccgtcgtgcagcagcccggtgatgtcgaactcattgggcgtgaagccgtcctcgccatagccgacgaacgcgccgttgacccacacgtagatcgccgtggccatgccgtggaacacgatcgacaccgatccgccggcctgcttggcgtttgctacgggggcggagacggtgaacttcctgcggtagagcgcgacgtgattgttctccgggatgttcggttccaacgggttctcgtggccgtcccacggatactggacgttcacgtacttgtggttcatcagaccggccgtctgcaggtggtccggaacctggatacgctcgaacgaggagtcgtcgaacgactcggccgtcgcgggttcctcttcgaggttgatgtcggcggcctgaacgacctcgacccgccactcgccgtcaaggctctgcttgagatcggaccattgtccgctctgggggtcgcgggcgtaccacttgtggctggaatgggccggagtccggttcacctcgaacaccgtcgggtcggtcagccaagcctgcgatgcgcgatcgacatgtgtgacgtctgtcatgctctcctgctttctgtcattacctcgttgtgaatgatattatggaggaggccggggcctcctttaccgaaaagaataaacagtttttatataaaacgcaaatcctgtttaccgcttccaaatcactggcactgcttgccgtcgacgctacgccgcgtccatgcaatgtctcggttcagcccatgttatcccatccttgcgacacgctgtttatctccttgtttactaatgctttttactttcggtgataaaacttgtatgcttactttacaaaatcaatgagtgattccatgctctgggttcttaaggagaagattaatgagcaacgaaaatgccgcggacggtgacgtccgcaggaagagtgggttaggccagcgcatcgcctacgcgttcggcaacctcggtcaggccgccttctacaacgcgatgagcacgtacttcatcgtgtatgtcaccagctgcctgttctcgggcgttgacaaggcgcttgcggccaagctgatcggcgtcatcaccagcctcgtggtgatcatccgcatcgccgagatcttcgtcgatccgttgctgggcaacctcgtggacaacaccaccaccaagtggggccgtttccgcccgtggcagttcttcggcggactggtctcctccgtgctgcttgccgtggttttcagcggcatgtttggcctggtgaacgttaactccacgttgttcatcgtcgtgttcgtcatcacgttcatcgtgcttgacgtgttctactccctgcgtgacatctcctactggggcatgatcccggcattgtcctccgactcccacgaacgttccacctacactgccctcggctccttcaccggctccatcggcggcaacgccatcaccatcctcgtgattccggtcgtcacctatttcagctgggtgttcaccggcgagaacgccgagcaccagtcgggttggaccgctttcggcatcatcgtcgcggtgctcggcatcatgaccgcctggaccgtcgccttcggcaccagggaaaaccaaagcgcccttcgcgccaacgccgaagacaacggtggtccgttgcaggcgttcaaggccgtgttccagaacgaccagctgctgtgggtcgccctgtcctacctgctgtacgccatcgcgaacgtgaccaccaccggtgtgcttctcttcctgttcaagttcgtccttgacaatcaggccgctttctccgcgaccggtgtcatcgccatgatcgcgggcctggtcatgtccccgctgtacccgattctgaacaggtacattccgcgccgctacctgtacatcggcggcatggtctccatgatcgtggcttatgtgatgctcgccctgttctccagcaacatcgtcctggtcttcatcgcgctggtgctcttctacgttcccggcacgctcatcatgatgacggtcatcctctccctgaccgactccatcgagtacggccagctgaagaacggcaagcgcaacgaggccgttacgctttccatccgcccgatgctcgataagatcggcggcgctctgtcgaacggcatcgtcggcttcatcgcccttgcggccggcatgacgggtgacgcaaccgccgccgatatgaccccgacgaatatccacgtcttcaagatctgcgcgttctatgccccgctcatcctgatcgtgctcagcctggtggtgttcgtctccaaggtcaagatcaccgagaagatgcacgcgcagatcgttgacgagctcgaagccaagctcgcttccggcgagatcgtcgacgatgaggcgcagcccgtggcggccgttgaagccgccgcagccgtcggcgatgagacgcagacagtcaagaactgatctcccgttcccatccctcccataaggcccgtccgcctgaaccgcaagatgcggtccgtggcggacgggcctgttcgttcctgcggtcggcggtcatgaacataccccacgccggttccggcagcggggccggcaccggcggtgtgtcacctgtcggcaagtgattatttaatagatagatgggtccatgctctgggttcttaaggaggagattaatgagcgacgaaaatatcgtggtcggcgacgtccgcaagaagggcgggttaggccagcgcatcgcctacgcgttcggcaacttggggcaggccgccttctacaacgcgatgagcacgtacttcatcgtgtatgtcaccagctgcctgttctcggacgttgacgaggcgcttagggacaagctgatcggcgtcatcaccagcctcgtggtgatcatccgcatcgccgagatcttcgtcgatccgctgctgggcaacctggtcgataacaccaacaccaagtggggccgtttccgcccgtggcagttcttcggcggtctgatctctgcagtgctgcttgccgtggttttcagcggcatgtttggcctggtgaacgttaactccacgttgttcatcgtactgttcgtcatcacgttcatcgtgcttgacgtgttctactccctgcgtgacatctcctactggggcatgatcccggcgttgtcctccgactcccacgagcgttccacctacaccgccctcggctccttcaccggctccatcggttatcagggcatcaccgtcgtggtcatcccgatcgtcacctacttcacttggatgtttacgggcaacaaaggtgagggacaggctggatggacctccttcggcgtcatcgtcgcgctcctcggcctgattaccgcttggaccgtcgccttcggcaccaaagaaagcaccagcgcgctgcgcgccaaggcccagaagaacggcaacccgtttgaggcgttcaaggcgctgttccagaacgaccagctgctgtgggtcgccttgtcctacctgctgtacaccatagccaacggagccaccggcggcgtgcttctcttcctgtttaagttcatccttgacaacccggccgcattctccctgaccggcatcatcggcttggtggcgggtcttgtcatgaccccgctttacccaatcctgaacaagcgcatcccgcgtcgtgtcctgtacttcttcggtatgtccttcctgattgtggcgtacatcttgctgagcatctccacctattcccggagcatgaccttggtgttcgtcgcgctcgtgctcttcggcattccgggtacgttcatccaaatgaccgccatcctctctctgaccgactccatcgagtacggccagctgaagaacggcaggcgcaacgaggccgtcaccttgtcggtgcgtcctatgctcgataaaatcgccggtgccatgtccaacggcatcaccggtttcattgccgtcgccgctggcatgaccggtagcgctaccgccaagaacatgacctcagccaacattcacaccttccaggtgtacgccttctacgtgccgcttgtcttgattgtgctcagccttctggtgttcatggtcaaggtcaagctcgatgagaagatgcatgcgcagatcgttgacgagctcgaagccaagctcgctgccggcgagatcgtcgatgatgaggcgcagaccgtggaggccgccgaagcggccgaagccgtcggcgatgagacgcaggcagccaagaactgatctcccgctcccatccctcccataaggcccgtccgtctgaaccgcaagatgcggtccatggcggacgggcctgttcgtttgcgacaggctcgacgagaccttcctcgccaacctccagctcacctcatcgccatctctgaaaaacacagccaaaaacccaaccagtgtaaacacaccctagtgtcaatacgtgtttatcttggtaaaaatgtgctagaatacatttttaccaagataaaaatgtattttgatgcatttttaccaagataatggtttaagaggggcgcgatgcgacgggaaatgatgcaacgactggtcgcttggaaaaacgcgcccgggcgaaaaccattgctgctgtatggtgctagacaaaccggtaagacatacttgctgaatgagtttgctcgccaggagtttccggatgattatgtgcggttcgatttggagcgggatagtcgtgcgcgccaagtattcgagcatgagcttgattcgactgtattgctcaggcggctatcgcaggtggcgggaagacctattgatcctgagcatacattgttgattctggatgaggcacaggcttctaatcgtgctttggcgtcactgaagtattttcaggaagaattgccgcagctgcatgttattgcagcgggcagcttgcttggggtggcggtgaatcaacaaggcttcactatgccggtgggcaaagtgcagaccatgacattgcatccgatgaattttgatgagtttctagaggctgtgggagaggatgcttatcttgatgaaattcgtgacagctatacgcagtcgtcaccattctatgcgcatgacgatatgcttctgcggttctggcaatacctggtgattggcggaatgccggaggcagttgctttttttgcggaaaatcagtcctttgataaagttcgcgctctgcagatggatattttggatttgtatgcggcggatatggcgaagtatgcgacgccgatcgaaactgcgcgaatccgtgatacgtggaatagtgtgccatctcagttggccaaggaaaaccacaaattccaatacaagctagtgcattcgggtggacgtgcttctgtgtactcgccgtctattgcatggctggttgcagcgggattggtggaacggtgcatgagagtatcaagcggacaattacctttggcgatgcatgaagatgcttcatcgttcaagatctatatggccgacactggtttattggttgcgtgttccggactggattcgtcgatggtgctggatgcggagcgtcgtcggagaattgatctgggtgacatcgttgaaaactacgttgcgcaagcgctgagtgctaatggtgttccactgcggtattggaccagtaacggtaccgcggaagtcgatttcgtcattcagccccatgatgcagttgcgggcgtgcccgtcgaggtcaagtcatcggataacactcgttcgcgaagccttgcttcataccggagtaaatatgcgccagacgatgcgattcgactctccaccaagaacttcggtactgataatggcgtccgtagtgtcccactgtatgcagctttttgtgtggaagtctagaaactagacaccttgcggtgtaaaacagggaataggaagaatgtcgtgacgagactggtgttggaagcttgataatgagagtgtgtgcttcatcacccatacgttttatgtactcttagcaaagagaaagcgccgaaccgcgaaagcgcctgtcggcgcaagggccgctcgcggcggcaaaaaatggagcccggggcttaagcacggtccgacgcggatacttagtatagcttgcgatggggctcgccgcgccgggggaggtgtggtg

SEQ ID NO: 2147 - DNA, 17298 bp, Unknown
  R51_24m  MAG No. k141_9249
cccggagattctgttccagggaactccgtttgccatcaaccgcattattctgatccgcatcgtggccaccttcgtgctgctggtggtgcttgggcttaccgcaaagcgcgccaagctcatccccggccgttggcagggcgtggtggaatacggtcttgacttcgtgcgtgacaaggtcgtctatgacgtgatgggcgaggttcgcggcaagcgctacgtgccgatgatcaccaccatcttcttcacgattttcatcttcaacctgtgtggcatcatcccgggtatgaacatggcggccaccgccactgtggtcatgccgctggtgttcgccatctggaccatggtccagtattggatcgccgccgcacgttcgcaaggtcttggccattatctgcgtcacgagctgttcacccccggtgtgccgtggccggtctacatcctgttgaccccgattaacatccttgagttgctggtcatccgtccggcctccctgaccatccgtctgttcgccaacatgatttccggccacctgatggtcgccacctgcctggcattcgcacagtactggatcgtcgatgcagccaacaagctgcaaggcatcccagtcggcgcgatgtggttcgtcagcggtcttgccatgacgtgcttcgaggcgttcgtcgccttcctgcaggcttacgtcttcgccattctttccaccgtgtacatcaacctaagcttcccggaggagtgaggttcaaccccctctttcggaacccggcctcgcctaggtaggcaggaccgaacgaaataagatttataacgtcgccaagtacgttagaaaggaaacacaatggatatcatcaccctcgcagcggtcgccggcaacctgtccgtcatcggttacggtctcggtgcggttggccctggcatcggtctgggcatcctcttcggcaaggccatggaatccaccgctcgtcagcctgagatgtccggcaagattcagaccatcatgttcatcggcctggctctgatcgaggtgctggcactgatcggcttcgttaccgccctgatgttccactgatcgaacgttttctcagtcgaatacagaaggcaaaacgaatccaccagtgaaaggaggacttcataatgacgctcgcagaaggcggaattgatctgttcattcccgagacctatgacattgtgtggtccctgatcattcttgtcatcgttgcggtgttcttctacaagttcttcatgccgaagttcaatgcgatcttcgacgagcgcgccgccaagattcagggcaacatcgccaaggcggagcaggctaagaaggacgccgacgaggccaaggccaagtatgaggcccagctgagcaccgcccgtgtggacgccgccaagattcgcgacgacgcccgtgcggaagcgtcccacatcatcgccgacgctcgttcccgcgccgagtccgatgcggctcaaatcaccgcatccgcacagcgctcgatcgaatcccagcagcagcaggccatcgtctcgctcaagggcgaggtcggtgctcttgccaccgcgcttgccggcaagattctcggtgccaagctggaagacagcgacgtgcagtcctcgatgatcgattcgatgatcgacgacctgggcgccaagaagtgaccgtgaccatccgtaaccagaaagggaggtgaccatgcgaggagaggcatcacgtattgcagaccgcgagtcgcgtgattcgctggccccgaaactgcgcgacacccgtgaggacgcgtggcggatcggcaacgaactgttcacgatcaccaaggtgctcgatgacagcattcagctggaacgcgcactgaccgacccgtcccgcccggtcgccgacaaggtggccgtcctgaagggactgctcggtgacaacgcgcatcctatgaccatggagatcatgaccgacttggtctcccgccgttggagccgtgcgcgcgacatcgccaacgcggtggaggacttcggcgtggacgccatgatgtactacgctgacgccaccgacgccacgctgcaggtatccatcgagctgtccgagctgcattccgcactgctgaacctgccggtcgtccgctccaagctgtacgactaccaggccaccagcgaggcccgtgtgaagctgttccgcgaggtgttctccggcaagaccctgaacaaggtcaccatgaggctcgccgaacacgccacctgcaacctgcgccgccgccgctacttggagaccatccagtggctgatcaacaagttctcccgccacatgggcgagtcgatggtcaccgtgaccaccgccaccccgctgaagaaggagcagattgagcgactggtcgaggtctactccgccaaggtgggccgccaggtgcacatcaactcggtggtcgatccgaccgtactgggtggcatgcgcattcaggtgggcgacgaagtcacggacaacaccgtggtcgcacagctgcagaacctgcatcgcaaggtgcagacggaggcgactccggcctgaccggccgagccaatccgtccaacaccacacacaagcaaagacttgactgaacaataaccaatagaaggagtgatcatggcagaactgaccatcgatcccgcctcgattcgcaaggccctcgacgacttcgtgtcgtcgtacaagccgagcgacacccccacccaggaagtgggctatgtcgccacggccggtgacggcattgcgcacgtgacgggattgcctggttgcatggccaatgagctgctgacgttcgaagacggcacgctcggcctggcgttcaaccttgacgcccgtgagatcggcgtggtggtcctcggcgatttcgcaggaattgaggaaggccaggaagtgcgacgcaccggcgaagtgctctccgtgcccgtcggcgacggctatctcggccgtgtcgtggacccgctgggcaagccgatcgacggcctcggcgagatccagggcattgagggtcgtcgtatcctcgaagcccaggcccccgacgtgatgcaccgccacccggtcgacgagccgctgtccaccggcctcaaggccatcgacgcgatgaccccgatcggccgcggccagcgccagctcatcatcggcgaccgccagaccggtaagaccgccatcgcgatcgataccatcatcaaccagaaggccaactgggaatccggcgacccgaagaagcaggtccgctgcatctacgtggccatcggccagaagggctccaccatcgcctcggtgaagcagagcctggaagacgccggcgccatggagtacaccaccatcgtggcctccccggcagccgattccgctggcttcaagtacatcgccccgtacaccggctcggccatcggccagcactggatgtacaacggcaagcatgtgctcatcgtcttcgatgacttgtccaagcaggcagaggcctatcgttcgatttccctgctgctgcgccgcccgccggggcgtgaagcctacccgggtgatgtgttctacctgcactcccgcctgctcgaacgttgcgccaaggtctccgatgatctcggcggcggttcgatgacgggtctgccgatcgtcgagaccaaggcgaacgatgtgtccgcctacatcccgaccaacgtgatctccatcactgacggccagatcttcctgcagtccgatctgttcaacgccaaccagcgccccgccgtggacgtcggtatctccgtctctcgagtcggtggcgccgcacagaccaaggctctgaagaaggtctccggtacgctgaagatctccctggcacagtaccgttcgctggaatccttcgccatgttcgcctccgatctggatgcggcttccaaggcccagctgacccgtggtgcccacctgaccgagctgttgaagcagccgcagttccacccgtactcgccggaacaggaagtcgtgtccgtatggaccggcacccacggcaagctcgacgacctcgacctgaaggacgtccttccgttcgagcagggactgctggactacatcgaccacaacaccgatatcctcaagaccattcgcgagaccgaggaattcaccgccgacaccgaggctgccctcgataaggccgtggacgagttccgttcgacgttcgtctcttccgccggcaagccgctggtcgagaagaagccggacgttgacaaggccgcgccggttgatcaggaaaagatcgtggcgggagaaaagtaagccatgggctcgcaactcgcattgaaatcacgcatccactccaccgagtcgttggcgaagatcttcaacgctcaggagatgatcgcgtcttcgcatatcgccaaggcccgtgatgtggccctgaacgcgaagccgtacaccgatgcgattttcgatgccgtgcaagcgttggtggcccacacccatatcacgcatccgatcgcggtgaaggacgagaagaacccgcgcgtggctgttctcgccctcacctcggatcgtggtatggccggcccgtacacctcttcgattatccgtgaaacggagtcgctgctgtcccgcctcgatgcggcaggcaagcagccggagctgttcgtgtacgggcgtcgcggttcgacgtactacaagtaccgtaatcgtgacatcgcggcgacgtgggaaggcgacaccgaccagcccggcgtggaaattgctgaaacgatctccaacactttgatggacgcctacatgaagccggctgagaaaggtggagtttccgaactctacatcgtctacaccgagttcatcaacatggtggtgcaaaaggtgcgcgtgctgcgcatgctgccggtcgaaatcgtgaaaaacgagaccaaggtgcccgatcctgatgaagaggcaccggctactgcggatgtcgctccgctgtacactttcgagcccagcctcgaaaaggtactggacgcgattctgccgaagtacattcagtcccgcatccacgagtgcctgctgaccgcggccgcgtcggaaaccgcaagccgccagaacgccatgcacacggcaaccgacaacgcacgaaacctgatcgacgaccttacgcgcaagctcaacgcttcccgccaggcctcgatcacccaggaacttaccgaaatcatcggcagcgctgacgcgctgaccaagaaggaagagtaggaacgcatatggctgacaaccagaccactgcggccgagcctaccaacggtcgcgtcacccgcgtccagggctcggttatcgacgttgaattcccggtgggtcatctgcccgacatctacaacgccctgaaagtaacgatcgtcaacaccggcgccaaggaagaaggcgaggcgaaggagaccgagatcaccctcgaggtcgaacagcacctcggtgattccacggtccgttgcgtcgctctgaagcccaccgacggcctggtccgtggtgcctccgtctccgacaccggcgccccgatctccgtgccggtcggcgacgtgaccaagggccacgtcttcgacgtgtccggtaacatcctcaacaagaagccggatgagaccatcaccgtctccgagcgttggcctatccaccgcaacccgccggccttcgatcagctggagtccaagacccagatgttcgaaacgggcatcaaggtcatcgacctgctgaccccgtacgtgcagggcggcaagatcggtctgttcggtggtgcaggtgtgggcaagaccgtgctgattcaggaaatgattcagcgcgtggctcagaaccacggtggcgtgtccgtgttcgcgggcgtcggcgagcgtacccgtgagggtaacgatctgatcggcgaaatggccgaggccggcgtgcttgagaagaccgcactggtcttcggccagatggatgagcagccgggtacccgtctgcgtgtcccgctgaccgcactgaccatggcagagtacttccgtgacgtgcagaaccaggacgtgctgctgttcatcgacaacatcttccgcttcacccaggccggttccgaggtgtccaccctgctgggtcgtatgccttccgccgtgggttaccagccgaacctggccgatgagatgggttccctccaggagcgcatcacctcgacccgtggtcactcgatcacctcgctgcaggccatctacgtgccggccgatgattacaccgacccggccccggccacgaccttcgcccacttggatgcaaccaccgagctgtctcgtgacattgcctccaagggtatctacccggctgtggacccgctgagctccacctcgcgaatcctcgatccgcgttacgtgggccaggctcactacgactgcgccaaccgcgtcaaggcgattctgcagcgtaacaaggagctgcaggacatcatcgccttgatcggtatcgacgagctcggcgaagaggacaagaccaccgtgaaccgcgctcgtaagatcgagcagttcctcggccagaacttctacgttgccgagaagttcaccggtcgccccggctcctacgtgccggccgacgagaccatcgaagccttcacccgcatctgcgacggcgtgtacgacgacgtcccggagcaggcgttctccggtatcggcggcatcgatgatctcgaagagaagtggcacaacatgcagaaggaactgggtgcgtgatggctgcggaaaaaaccacgatgaaggtcaacatcgtcgccgctgaccaccctgtgtggcacggcgaggcgacgagcgtgaccattcccgcctctgagggcggcatgggcatcctgcccgaccatgagcctgtgctcacggtgatcaagcagggtacgctcaccgtggttgagcccgatggcgatcgccacatgttcgaggtgaccgacggattcatctccttcgactcgaacaaactcaccgtggcggtcgagcgcggccacgacgtccagtactccggcaccgccgagtgatctgaaccaactcctcaaggggctctctggttttccagagagccccttttgctatgtatgccatgtgttgcgctacagtggtggcctatgcgagttattgttgccgactgttcggccgagtattcgggccgcctcaacgcctcactgcccctggccaagcgtgtattgctgatcaaggctgattccagcctgttgattttctccgaattgggctcctacaagccgctgaactggatgaccgcgccctgcacgattcgtgagatcgacccagccgccaaatccgcgcaacattcccgggaaagtgtcgctggtggggctgtggatggtgattccgcgacgcattccccggaaagtgtcgccgctggtgagccggaaaaggtgctacgtgtcagcgccgacaagggctctgacattcttgaagtgacgctgcaacacatctattccgaccaaacctatgatctgggcgaagatccgggtctcatcaaggatggcgtggaagaccatctgcaatgctatctggccgagcagatcgagcgtatcggcaagggagccaagctggtgcgtcgcgaataccctaccgccattggtccggtggatatcatggccgtgaatgccgagggcgagcatgtggctgtggaaatcaaacgtcacggcggcattgatggcgtcgagcagctgactcgctactgcgaactgctcaatcgcgatccgctgctggccccggtgcatggcatcttcgccgcacaaaccatcacgccgcaagcccaggtcttggccaaggaccgcggcttcacctgcctcatcctcgattacgacgatatgaaaggcaccgaggacgacagtctcaggctgttctgattgttcttggcttccctcttgaaggggggtttcgaacgtacatagagagactgaggggaggcctcacggtatattccgtgaggcctcccctcagtcagtttcgctgccagctcccctcttggggagagccatcgagattgtttagtacgcggcgagaatatcgattacgaagaccaacgtggagttggcgggaatcgaaccttgctccttatctccataggcctgatccggcggaatcaccagcagaacctgagagccgacggtctggccgaccagacccttctgccagccctcgataacctgatgctggccgctggaatcgctgaacagatcggcgtcgattgtggaatcgcgatcccaggacgaatcgaactgcttgccatccgtaagccaaccggtgtacttgaccaccacggtgttcttgtcggtcagcttggcgccgttacccttgatcagcgtctgcgagatcagcgaatcaaccgaaccctgaccgttcatgtcaatggacggcttgccattcttggctcgcgtcaccttcggcagattggccggcacatccttgacttcctcgccagtggccttcttcaggtccttggacttggatacaaacgtcatcgccaaaatgtaagagtatccggacgaatcctgagcgttgacgccaaagccgatcgtggtgttgatcttggcgcccttgatctggttgtagtaggtcgaggagagggtcttggaatccaccttcagcgagcaatccggcgtgttcttggtccaggtgtccatgagctcggtgccgtctttaacgttgagcgcgatgccttgggcgcagacgcggtcgccctcctcgattacgtcgccatcgcccttttgcagcaccacataggagccgtcggacacggtcatcggcgtattaaaggagatggtcggcttctcgccgagcttgcccttggcggtcacgccggcaatttgccccttcttgtcagaagagtcggaagaggatttcgagtccgagctcgaactggagcaggcagccagcgatacgcacatcgccagcgagcaggcaaaagcaacggccttgccgagaggggataacatagatttaacagacttacgcatgacacaccaccctactggtgaaccttgattttctgcgctcctaggcaataaacaggtgaagattgtagaatggttaagttatgagtgctgaagaacagactacaagaccggataagggcgccaagcgtccatcccgtcatgccaagatcatgcgtggagtggtgacgcctatcttcggtctattggccgtggcggctgtggtgttggggtacatgaatgccacgatatggaagccctccactgaaatcaccgcttccgcaaccatgagcggctcccggtatgccgtcactgatccgaatgtgctgaccttgttggatcagaacgccacgataaccgtggactcgggatcctctcaggacgaggcgtgcgtggcgttgggtccgtccaaggatgttgccggatgggtcgcgtccgagaagtcctatacccgtatcaccggattggcgtcatggagcgagctgagcacccagaagggaagcagcacgagtcagggagcgcctgccagtgccgatgacgcggtggcgttcaaggattccgatatgtggactgccgtgaaatgcggcaccgggtccgtttcgctggagagcaagaagaccggcgcctcgacggtggccattgtggatttgggtgaaaatgccaccaacgccaaggtgcagctgcactgggtgcgctccgaagtgccggactttgcgatgccgttctatctgtccggtggattgctggccgtgctggccgtattgtgcgcctccgtgttcgccatgccgccgcataagcgccgcaagcgcatggtggaaggcacggcaagcgccgtaattgaggaagaggcacccgccagcatcgcagtgtccgggaagccggatggtgcaagtcgacgtaatcgtcgccgccacgccacaaatcggcgttcgggccgtgcgtcctcgcaatctgaagccaccgaaacaccggttatcatcgacccaagttcacgtaacctggtcgccgaccagcagactggtgccgagagcggcgctgagaccggcttcagcgccggcgataacgaatcgacttcggtaatcacccctgacgaactgcaggcctacttctcccgcttggcccaagaggtcaataccggagacgactcggccgatgacggacaggaggaaagctgatgaacaagcgatggaacaaactgtgtgtggccgccctcgcctgcgtggcgttggtcgtgccgttgaccgcctgtgaaggccggctgccgacgccggctgctgatacctccaccaaggttgcgccggatttgaccgaggcacaggagaagaagattcgcctgaagattctcaagacgatcgatgaagccgatcaggccaagaatcccgatggatatgcggccgttatgggcgggccccagctggacattcgcatcagccagaccacgatcaaccagcgcggcggcggtatgtccaaatacgcgaccattcccaaggacatcgcccagacggtgattcccatggacgacggatggcctcgctcggtgttcaccatcacgaccaccaccgaagatcagcagtccaagcgtttgctggtcttcgatcaggaatccgcccagcagaattacaagctgatggccatggctcgactgtttgagggggccaagctgccgaagttcgagattccgactattggctcgcagatgggcactgcaaaggatgagaagctggtggccactcccgccgatgccttgacccaatacgccgatgtgctgcagaacggctccaagagccaatacgcttccaagttcgcagacgatttgctgcgccaggaactggccaataccacggccaaggtgcaggaaggtatgcaacgcaacaacggtacgcaggagcagaaattcaccgttgtgcctgaacagatgtgggtgatgcgtgctgcagacggtgccggtgatttggtggttggccgtattaacggcgaatggactcgcaaggcgggggatggccgcgaatcgcagccggcttccgacgacgagaaggcgctgttcaatagcgacaagtacaccagcaccatgaaggtcacgtatgtgaacgtggtggccttgtacattccgttggcaagctccggtgagcaaatcaccgccgtgggtgccgaccgtcagccggtaaaggtcgaagcgctgtagttgttgccgccgcccaccgcgcggttaacgccccaccacgatatgattcatccaccacgatgtcggtaagttttacctttcgcacaatggtgccgttttgagtcacatcgtggtgggcgttttgctacgtggtgggaatttcaccgcgtagtggaagaatccctacgtggtgggaatcggcattacaatcaatgtcagcaaatgtgattgttgttgtacgcgaatcgcgtggaatcgggaggcattatggcagagcagcagttcaatccgggagtctcattggcgggcgccgtcgatttggaggcgctgaagcatcaggtcaaggccgagcccggccaggcgggtggcgctcctgccgctggtgggtacgtgatcgacaccaccgaaaacaccttccaggcaatggtgcagacttctgcgaccttcccgatcctgctgctcctgtggataccgaccgatgaccgcctgttcccgatggcccgtgcgttgggcgacgcggtgaacgccctgaacggccagattcagctctcccgtatcgatatctcgtccaatccttcgattgcccaagcgttgcaggtgcagggcgcgcccgcactgttcgcgttgattgccggccgtccgatgccactgttgcagggccttccgggtgacgacgagctcaagcaacttaccgacgaggtgattccgaagatcattcaggccgccgcgcagtctggtgtgaacggtaccgcgccgtactcgggtgatcctgattccgatgccgccaagagcgctggtgccaccggtgccggcgtgggtgctgagcaggtgccgccggagcatgccgaagcccatcgtttggccgaggagggcgattacgccggtgccgccgccgaatacgagcgcgtgctcgaatccgacccgtccgatgcactggccgcccgcgaacgtgcgaaggcgctgttgctggcccgctccgggtccgctgatgtacgtgacgtgcgtgccgctgccgccgcagcgccggacgatgtggaagcgcagttggctgtggctgatatcgacatgatcggtggccagattcaagacgctttcgaccgtttgctggactttttggccgccgggcacaaggccgatatcgagcaggttcgcaagcgtctgctcgaatacttcgccatccccgaacccaccgacccgcgtctggctcgcgtccgccgtcgcctagccaccctcatgtactgattggttttggctcccctctttgaggggagctgtcaggcgtagatgactgagaggagcgcgcgagcgtacttggctgcttcccctaaaccatccgattcttcccgaaatactgctggaaccttggcccctccagcgccagctcctcctcgaaatcgtccgcccacttacagaacggacggttggcgagaccatcgttattgaatcgcgcctgatcggtgatttcggtgatgcagaatttcggaatcgtcagattggtaaccggcccggatcgttcggcctcggctacgatcagtggcgcgttcggcccgccgaacacgtccacgctccagccgtcttccgcaatccacacggaataccggttcttgatgattaccgagccgccgcgcttgatgagttcggcggcgatgcgcgtgtcaatctcgcgctcgacctcgtagcgcgtgccacccacggacggacctttgacggtgacatacgcttccgagaaccggtcgcggtactcgtccagcacggccaccggatttacgtcgggcgtcatgtcgacgtgaaccttgtgcgagaccagccgcacgcgcaaggcataattgtcggcatgcacgtagtagctctgaataatgagggtcggggcgtcgccgtcgtcgtattccgccggcagctcgcggcagaagaagcggcgttcgtattcgaagtcatctgtaggttccgacataaccccattgtagggccgatgatggcgattttctcgttattttggcgacgtatgtgcctcatgcagcgtgatgtggtgtacagtaaagaagttactcgggtttgtagctcagtggatagagcgtctgtctccggaacagaaggtcgtgggttcgatccccatcaagcccaccagcatggctttcggctagccgccggaagccttttgcatattcggcgcgtgatattaagcgcgtgcaaagctggtgctggtgctggtgctggtgctggtgctggggtcggggtcggtgatgccggctcgcttgggtcgtggaaaaaccgcccggtttggcgagaacggtagtcgaatcgtctggaatcgtctggaatagcaaggaatagtctgttgatggccgtatgccgggcatcatgcgcgctaaacgcgacttcgctcagtagactgctacgtaatcggcattgccaatcgttgctgatcgtgcgattggtcgtagccggtggtgatgtgtaccggcgccggccgcagcaggtgggcgcccccaagatgagaaggagcacaatatgagcgaaaagatggaagccgtagccacttccgaggcgccggccgcgctgggcgcatacagccaggcggtgaaggccaatggcttcgtgttcgtatccggccagctgggcattgatccggccaccggcgaactggcgggcgagaccgctggagagcaggctgcacaggcgctgaagaatattaagcacattctcgacactgccggtaccggcattgagcatgtgtgccgcgccaccatctacctgaagaacgtcgaggacttcaaggaagtggacgcacgttacgctgaggcgttcatcggctccgtcaagcccgcccgcgtggcctttggcaacaacatgattcccaagggcgcgctcgtggagatcgacgccatcgcggtggagtgattcgaacgtttccccggcggcccgtctgcgcgcatggtgtgtgcagacgggccgccgcgtattgtgcgacgcattcccgggaatgtcgcgctaggcggggtgtgaggggtggttccgcggcacattcccgggaatgttgcgctggaatcgttgggcggtggtccgtgccacaatagagaccatggcatccaaaggaaaaccgtcgccgcgttcggccgtaagcccgctgagtgatgagcaggtcaagcgtctggccgcccgccacacgcttgtggactcgacacagtattacccgaccggccctcgcacgcccaatcagccggaaatcgacgcccagaatcccaaggccaccaaacgactgctgggaggggtgtccattgtgttccgcgccagctgcaagaccaaggcctggggcctggaacaggtgccggaaaccggaccgttcatcaccgccgccagtcatatcaccatgttcgatgtgttcgtgccgatgatgagcctgttccacatgggccgccgcccccgttacatggccaaggccgagatggcgaagtggccattgatcggcaagtggttccggttggtcggcatgcagccggtgcagcgtcattcgggcaaggccaagcagatcgaagagacctcgattgatattctgacgtccggccgcccgctgacggtctggccggaaggcaccgtgacccgcgacccgaaaaagtgggtgatgagcattaaggagggcgtgggatacatcgcccttgaatcctcgcgcagactggggcatcaggtgccgctgtacccggcggtgacgtggggtgccgcctccatcaaccactggtggccatggccgcgcaaaaacgtggtgatgtgctatgaccatgcgctcgattactccgatctgcttgccgacatggactcatggggtgaagagccgcctgccgaggccgtgaacgagctgatgtggcgcgtgctcaaacgcatgaacacagtactggaggaaattcgtggcgagcagttccccgctgaaggctactgggactaccgcagcatgagtcgcaagccttggcctgaagccggcggcccgttcccggctgagaagtagccgcaccggttcccgtacggggagcctaggcgagtagcatggcacaagattgtgccgatgaagttgcgcgacaagcgaaggtaggaatttgatatgggtaaaaatataacggttctcggcgcaggagcatggggtaccgctttcggccaagtgctggcggacgccggcaacacggtgaccatgtgggccaaggagcagcggattgtcgaggacattcgcgatcgccaccacaacgccgtgcgcctgccgtccgtcgaaaagttgccggacaacatgaccgccaccggggatcgcgccgaagccgtcaagaacgcggacatcgtggttgtggccatcgccgcgcagttcgcgcgagtggcactcgtcgaattcaagggactgattcccgatcacgccatcgtcgtcagcctgatgaagggcatcgagcgtggcaccaacaagcgtatggacgaagtcgtccgcgaatcccttgacctgccggccgaccggttcgccgccatttccggaccgaacctgtccaaggaaatcgccgatcgtcatcctgccgccaccgtggtggcttgtacgaacctcgataatgccacgaaggtggccgaggcatgtaccacctcctatttcaagccgttcgtgaccaccgacgtcatcggcctggaaatgtgcggcagcctgaagaacgtgaccgcgctggccgtgggcatggcccgtggtgccggctacggtgagaacaccgcagccatgatcgaaactcgtggactggccgaactgaccgcgctgggcgcagccgctggcgccgatcccaagaccttcttcggcttggccggtgtgggtgatctcatcgccacctgtggctctccgctgtctcgtaactatacgttcggcgcgaatctcggcaagggattgacggtcgaggaggccaccaaggtcagcaacggtgtggccgaaggcgtgcccaccacggatgcggtggtggctcttggcgagcagcttgatgtgccgaccccattggcgtatcagatgagccgcgtgctgaacgaaggcatttcctgctcggagatgcttgccggactgttcgggcacgaggttaccagcgaataacgagagaagcgacgtatacgtggcgtatacgtcgtacgtgcaaagtcgtgtggcgtatacgtcgttgacgtgcgcgagtagactggtgtgcgtctcttgtgcgcggcggtccgagcgcggttcggtccggttggcggtgcaaagcataggcttgaaaacggttgtagtttcaataaaaggatggttatggccaagaagcgtgttgtggtgctctatggtgggcgtgcagacgagcattcgatttcctgcatctccactgccggtgtgctgggggccatggacactgaacggttcgagccgattccggtcggcatcaccaaggacggcaagtggatcatcaacggcgaagatcctcgtggctggaatctggatggcggcgagctgccgaccgtaaagatcaccccgggatcgcgcccggtgatgcttgacccctctcgcggccaggacggtttcttcatcggcgagacccgccacatcaattccgccgattccggcttcggcaccagcttcgtcagcatgtccgacccggaaatgcaccatgcgctgacctcccttggccatgtggacgcggtactgccggtgctgcacggcccctatggcgaggacggcacggttcaaggcctgctggaaatgatgggtgtgccgtacgtggggtgcggagtgtttgcttccgccgcctgcatggataagcattacaccaaggtggtgctgggtgccgccggcattcccaccgcgcccggtgtgacggtcgatgcgcgcaacttcaccgccgccgatgtgcttgccaagatcgaggacgccggtcttacctatccgctgttcatcaagccttcgcgcgcaggctccagcttcggtgtgaccaaggtcgagaaagccgatgaccgcgagacccagcaggatcgtctggccgccgccatcgccaccgccggcgagcacgattggaaggtgctcgtcgaacaggggattgatggtcgcgaaatcgaatgtgccgtgctgtgcccgaaggccggtgacgagcccgaggccagctggcccggcgaaatcgtgctcgatcatcagaacgacgaccagttctacgatttcgactccaagtacatggatgcctccgccagccacgtggaagtgccggccaatctgccggtcagcgtgcttgaggacgtgcgtgacgtggcccg

SEQ ID NO: 2148 - DNA, 13061 bp, Unknown
  R51_24m  MAG No. k141_9364
cagcttggacgtgacgatgatgtcttcgcgcggcacgccggattcgcggatggcgcgacccaccacaccctcgttctcatagttgaacgcggagtcgatgaggcggtaaccctgatggatggcggacttgatggcgtccacgccggctaggccgttgaccttgtacgtaccgaagccggtggcgggcagttcgaggccgtcgttggccttgcggatcggagtgactggtggttcaagcatgatagtttccctgcttctcccgtgatggaatgtcggttccatcataaagccaaccaatccgccgcgggcgtactatttgacttctctcaattctggcggtcggcgagtggagaatcggaacatgagcgcggcaagaatcacgccaagcacggccatgccggtgaacaccatcatgctgcgcgggaacgcggccgtatacgaaccggccgcgtccgccccatcgttcgcggcgatggccaccacctacacattgccggacagcgcaacgaacaccacatccataatcatggtgccggcgaagccgctaaggatgaacttgggcgggaagtggttcttcagcatgccgccgaataccgggccgatggccggtgcggcacaggtgaccaggccgactatgccgagcatcacgccacgctgttcaagtggcgccttctccagaatgatgttggtgataagcggcagggagatgccggtaccgagcgacatgaccagtcgggcggcgagcagcatcgggaagttgaccgcgagtcagcgtatcgacgccgaggaatgctgacgtcgcccacgcgcgcggtgccggtatcttgcccattcgctcacgttgggtttcgccatttccggaagaaaaacaacagtgcggtgattcccataacgagaatcaccgcactgtactgtttgcgattatttgcgattatttacgcgttgctatctgcgtcgcgcgcgttatctacgcaccgccatctgcgtcagcgcagagccaggttggccgcgccgatcagaccggcatcctggcccgcagtggccgcgacgatcttggcatggccgcggtaggcgctgccttccaggaaacgctggtagttgtagcgggccggctccagcaggatgtcgcccacggccaccacgccgccgccgatcacgaacaggtccgggtcaagcacggcggaaacggcggccatggtgcggcccagccattcgccgatcttgccgaacgcatacaggccaagtacgtcaccttcctgagccgcttgggacaccatcggcccctccagtttggtgatgtcgccgccgcacagttccagaagacgcttggcgtcctgaggacgacggcgcacggcggacttggcgaagttctccagcgaggttcccgaagtgtaacgttcggcgcagccgcgcaggccgcagccgcagtggtcgccgtccgggaccatcggcaggtggccgagctcggcggccatgccgaaggagccgcggtagagctggccgttgatcacgatggcaccgccgaggccggtgcccacggtcagcgcgaccatgttggagctaccctggccggcgccgtgcacgaattcgccccatccggcgcagttggcgtcgttttcgacgatgaccggcacggcatggtcgatcagcgcgccgacgtgctcggacagatcgtagttgatccatgccggaatgttggcggagaaggtgagcgtcttgcgatccgcgctcacattgccggcggcggagatgccgacggcctcgatatcggtgtgcccggcggccacagcctcgcggtacacctcggcgatgtgctggttgatggcgtcggcgtccatcggcgtggggacgcgccagcgctggatgatgctgtcattttcatcgcagacggcggcggcgatcttggttcctccgatatcaatggcgagcgtggtcatggcttactccttgaagactttcgtaacatgcgagatagcgaaaatagtagcgagccgccatgacctcccaccgcggtttttccgtggttcgtcatgcgtcgcgaacattccaccgatgcgcttcctcatgcatttcacccgttgcaaacgggcgccccttaacgccggcatcggtgcggacggcgtgtcgaatcggatgcaatcactttcaccgtccttgcggatggcatcgaagaacggcaggaaacaaaaaaactcccgacatgcatcgggagtttggtggcgaccccggccggacttgaaccggtgacctccgccgtgacagggcggcgctctaaccaactgagctacggggccgtgcgtgcctcgctgaggcacaagaggatatgttacagcatcatcggattacgacacgccgtctgatacatcgttccttccaccggcgaaccgaccgcaggtgtggtggacggtatgcggaccatatcgttcgaccgcgcacgaccgcactccccataagacagtagccgtcatgcgtcaacgcacgttgtgcgacaacgcggcacgacgcacggccaccgaggccagcaaaccgatgaacagcatgatgccggcgaccagaagcgtccactggccgccttcgacgaaccctgaagtcatcgcatcggcaatcttcggcgcctcgtcgccgaatcgggccgccggtccatcaccgctgcggaacacgccgatcactccacccgccgaaccactgaccgcttgggccagaccgtcgccgaccttggcgggcagcccgagggattcgagccgcgccggcaatgttccgttgacggccatggccaacgacgcgccggagatggccgaaccgacggcggtgccgagctgtcgaaccgtggactgggtggccgacccttcgccggactgcatgaccggcacttcggagagcaccacgctggtcagctgcgcggaggcgaagcccagacccagaccgtacgcggccatgggaacaagctgccaccacaccgacaatcccacaggcataaggaccgcgaccaaggcgacggcgatgatctcgatcacaagaccgagttgaatcacgccggccggggtgagcttggcggccatgacatgggcctgcgcacctgcgacgatggaccccaggcccatcacggccagcatcgcaccggcctgcagcgtgttgagcccgcgggcgttgatgaggtacagcggcagcatgaacaccagcgcgaattcgccggcggcgatggccgcagccgccagattaccccacgagaacgtcctgatgcgaaacagggtcatgtccagcatgaccggccgaccggctttgccccgcgcggattcgaagacgatgaagacggccatcagaagcgcgccggcgatcaggcagatcggcaccggcgacaaccagtcacgattccagctcaacccgcccagcttcaactgcgttgaggtctgcttccaccagccgtaggtctcgccttcaataagaccgaacaccagcagggccgaggtcagggcagacagcaccacgcccggaatatccacaccgacacgacgggatcggacatcctgcgcggcatccgcggcaccggcgaccgaggcgttcccaccggtttgcggcaccaggaagatggccgacacaaagaccgcgatgcccagcggcaagttcaccaggaaaatccaacgccatcccaaagtctcggtgaacacgccaccgagcagcggaccaagcgcggcggccgaactcatcaccgcgccccagacaccgaacgccgcggcgcggtacttgccacggaacagggcggacaccgtggacagggtgttcggcatgatcatcgcgcctccgatgccctgcagcacacgggcggcaagcagcatccccgcaccctgcgaggcggcggcgagcgccgaactcgccacgaagatcacggtaccggcttgaaacaccagtttgcgccctctggcgtcgcccaacttgccgaaaggcagcaacaacgcggcaagcacgatgttgtagagcgaggtgacccactgggcgtcggtcaggttaatgccgatgtcgtcgatgatggtggggatggagacgttgacgatcgagctgtcgagcacgatcatggccaaccccagggccatcacccacagcgcgccccacggcggcgcctgggtgggcagcggcgacgaggccgtcggattcgttgaagagatcgaagacgcatcggcctgagtctgatgctgagatcgggatgcatgatccataacggggtttcctctcattgccatgattgcggcgaccgacacgcctatgcgccattcacggtacatccgcggcctagaccgtctcgccggatttcgcgggacattccgggcgttcagccatgggcgtaacctcggcggatcactgaagagaggagcaccaaagacggccgcactattccagatgcgtcatttcgaaatgaaagcccggcagaacgccggaatcgcaacgatcgacaaatcgccagacgatacagggccgggctctcgctcaggaaacagggcatgcccagcgcccatttaccggcgtcggcaatgacggcatcgccgccaccttccacgtctcctcccgatgaccgaatcgctaattcccgcccgccagaaccccattgcatcgtgtagacgggatatgggataatccacaaggtgcttttgcgtaggaccaaggcaccggcgatgacacgggacaaccacaacagcgaatgacgcacaacgggccgtccgggacacccccgtaaacggtcgcgtcgttttccattggtgtcattacggggtccgggtcccgcaaaacgttggaaaatcagcatttcttgaacggtaaggtaacatatggctgagtttatccaccagatagttcgtagtcactgagccttgctattccaacgtttttcccgcatgtcccgtgacacaacagcatgtcactcatcggctacgaatcggcttgtgtcaaagttgcgtcatccgacgctaatccgagacccagcattgctagaatcgatgtaagtgatgccgacgcgacggcattccacatcacggaagattcattcactttcgatgaggcaaggaggcgagacatgacgaagctcgaacgcaaccagatcgatttctccacgtttatgctgtatcggctcgccgagcattggggcaagtccgtgcccgacacctatcgcattctcgataaggccaacgctatcgacggctaccttgtcccctgctacgacatgctgcacacactcggcagcgaatacctcgtcaacgacctgacggactacgtgcgcgagcggggaatctgcatatgaggctgtaccacggttccgacgtcacaatcgaaaagcccgacgccatccacttacgcaagaaccttgatttcggctcggggttctacgccaccagttatccgaagcaggcggaacgctgggccttgcgacgttcattgcgctcgcatggcaaagcgctggtcaacgtgtacgaattcgacgaaacggcgaatctccatattctgcgtttcaacgagaacgacgccgaatgggttcgattcgtatgcaactgtcgtcggggcgggcagcctcccctgggaactgacctcatcatcggaggcgttgcggatgacaaggtctacgcggccatagacatgtacatgcgtgagctatgggacatggaacgcaccctgcaggcccttgccttctacgaacgaaacgaccagtaccgcttcctcacaccccggtcgatcgcagccctgcgatacgtcgagacctacgaggtgaaacaatgacgatcacgccacaaaccctgacgaagctcgaaacgctacgcaaggagcatctcgaatccgatctcatcgcgctgatagccgaccaatacgacatgacagccgccgatgcgatgaaactctattattccagccaactcagccaacaggtggccgacggctcctacggcatcgaacaactcgacgcgcgctacctactcgacgaccttcaacgatacgagccgcaactcttcagaaccgtcaacgcgactgaatagggcacggctgccgagttccgacacgagcaccctcgcatcccatcacattccgtagcgacgcggtgtggacgacaaggcaacagctcgtcccgttactcggacgcggcatcacgacgatcagcaaaacacatcggcaatgccaagcgtgaggaattggacggaatcgcccccagcggcacaacccacgagctacatctcgcctactcccctgcgtcgggatcgtatttgagaatgtcgcccggctcgcattccaaggcctggcagatattggccaacgtggtaaaccgaatcgcgttgaccttgttgtttttgatcttggataaattgacgttagtgataccgacctgctcggcgagatcgcccagtgagatgtgccgcttcgccatcatcacatccagttccagaacaattttgcccatatcaaccttccctgaatcgcgcaatcatcagagcaggccgtcgacgtcatgctcaagctcggcgccgtatgcgaagaattgcgccaggcacagcacgacgagaccgaaggcgatcggctgcatattcacgaagaattccaccttgcggctccccaccacgagatcgacgacaaccatgaaaatggcgttgatgatgggggcgatgatggatagttcgccgatgcggcggacgcgttgcacgttggccttggtgaagggagattcggtttcgctggtactgaagatcagatggatgtttctgaacaccacagccatcatcccaagcatcgccaccatggcgattgcggcgacagcgaaaccacgggcgagcacagtggcatccgatgccacaggcagcagattcgggtccccaacgataaacagattcccggaatccaagccttcctgaacccaccgcaccagcggagcaccggcaacgaccagggcgaccagcatgcccgcatacaccgccgttgcgatccagagcatcacttccacaatcttcgcgatgaccttgaccgccgcgttaagcttcattgccttcatcgttatcacttcctttgacaataatgaaaatatttattatttgataattttttatcgttttacgataattattttatatcagacgaatactttctatgcaacgctcaaagcatcggcgtgttccgcgatcgaaagcacctgcgccatgcgctacaaaccgatcaccgcaatatgcaacctgccccgcacctcgtcaatccactgttgcggcatgacgatgggatatgggataatccacaaggtgcttttgcgtaggaccaaggcgccggcgatgacacgggacaaccacaacagcgaatgacgcacaacgggccgtccgggacacccccgtaaacggttgcgtcgttttccattggtgtcattgcggggtccaggtcccgcaaaacgttggaaaatcagcgtttcttgaacgataaggtaacatatggcagaattcgtatttcagatgatcaaggcccgcaagtcttacggcgaccgcgtgattctcgatgacgtgaccctgagcttcctgcccggcgcgaagatcggcgtcgtgggcccgaacggcatgggtaagtccaccctgctcaagatcatggccggcctggagaccgtgagcaacggcgaggccacgctgaccccgggcttcacggtcggcatcctgcagcaggagccgccgctggatgacaccaagaccgtgggcgagaacatcaagatggcgttcggcccgattgccgagaaggtcgcccggttcaatgcgatcggtgaagaaatggccaacccggacgccgacttcgacgcgctgatggaagagatgggcaagctgcagaccgagatcgacgccgccgacggctgggacctcgactcccagcttgagcaggcgatggacgccctgcagtgccccgatccggacaccccggtcaacgtgtgctccggtggcgagcgccgccgtgtggccctgtgcaagctgctgcttgaggcccctgatctgctgctgctcgacgagcccaccaaccacctggacgccgagtccatcctgtggctggaacagttcctgcaccagtacaagggcgccgtcattgccgtcacccacgatcgttacttcatggacaatgtggccgaatggatctgcgaggtcgaccgcggccacctgtacccgtacaagggcaactactccacctacttggagaccaaggccaagcgtctggagatccagggagccaaggacgccaagctcgccaaacgcctgaagaacgagctcgactgggtgcgctcctcccccaaggcccgtcaggccaagaacaaggcccgtctggaacgttacgaccagatggagaacgaggcgcgcaacaacaagaagctcgacttctccgagattcagattccggccggcccgcgcctgggctccaccgtgcttgaagccaaccacatccataaggctttcggcgagcgcgtactcatcgacgacctgtccttcacgctgccgcgcaacggcatcgtcggcgtgatcggcccgaacggcgtgggtaagtccacgctgttcaagaccatcgtgggcctggaaccgctgaccagcggcgagctgaagatcggcgacaccgtcaaaatcagctacgtggaccagaaccgtgaaggcctggacccgaacaagaacctgtgggaggccgtgtccggcggcctcgacttcatcgaggtggccggcgtggaagtgccgacccgcgcctacgtggccagcttcggcttcaagggcgccgaccagcagaagctgaccggcgtgctgtccggtggtgagcgcaaccgtctgaacctggccctgaccctgaagcagggcggcaacctgctgctgctcgacgagcccaccaacgatctggacgtcgagaccctggaatccctcgaaaacgcgctgctcgagttcccgggctgcgctgtggtgatctcccacgaccgttggttcctcgaccgcgtcgccacgcatatcctcgcgtgggaaggcgacgacgacaacccggccaagtggtactggttcgaaggcaacttccaggcctaccaggagaacaaggtggcccgactcggtgaggatgcggcccgcccgcaccgcctgcacaagaagcttgtgcgcggctgagatacgccggcattagtgccacaacgcgctttatacgtcgaaagccgtccctcaggggcggctttcccataattgcccccatgactgccccgccccgcatcccataaaatcccacagtcacctacggcaacgcaccggcaacacaccggcagtgcagcagcaacgtagcggcaacgcaccgcataaccaaccgtttaccttccaaacagtctcgttacatttcgctcccggaactcttaacccccaccggatagactgccaaccataggttggaatacgataaccgaatatcgaacacagcagaacaggaatcgaggaacgccatggctcaggcaaccaccgtaactccattggaccatctggtgaaggtgctgaagttgggcgagccttccgcttaccgcaatcacacatacatcaatggcgagagtatgtacttccccactggccgcgtctacggtggccaggtcatcgcccagtcggtgatcgccgcgtccaaaaccgtgggcccttcacgcctgccgcattcggtgcatggctatttcattgccgccggcgatattcgtcaagacctgctgtttgacgtcgagaaccttcgcgacggccgctcgttctccgctcgtcgggtcaacgtcacccaagccgaggggtcgattctcacggccatcgcctccttccaggagaccggtcaggagggtgtggaatttgccgatccgatgccggaaaacctgcccgatcccgaaacgttgacttccgccaaggaactcatgcagccgttcgccgaaaagtcgccgttcgccaatttctatgtcgagaaatcgccattcgatatccgccacgtgacgccgaccgtgatgctgcgcgcagacaaggattccgccgagcatgattccggcaagcagatggtgtggatgaaggccgatggccacgtcgatgtgccgcaggtcatgcatcgtgcgatgctggcactcggctgcgatcaggtgatgatggagccggtgctgcgccgcgccggactgtcgatttccacaccgggcatttcctatgcgtccatcgaccattcgatgtggtggtatcaggatatcgatatcaacgaatggcatttatatgtgcaggatacgcctatcgccgcgcacggacgcggactcggcatcgccaaagtgtatgcgcagaatggcgacttggtggcggccatcgctcaggaagctatggttcgcgtgccgcaggaatagcgggaatcggcttggccgatggtgtggttttttcttctctcccccagtcggctacgcctacggcccctcgccagagggggcttatcacggattatcgcttgtaggcctgggctatgtcgctacggcgcttggcttccttgattttcgggttttcggggccttcgttcggcggtaactggcacaaccattcgccgataatgccgatgatcatgtcggcgatgcacaccacggccgcgattgcgcactcggtgacggcgtgtgcatagaaatccgcctcgatatggctcaggctcatcacaatctgacctccataccagccggcaagcgttgcgcccgccaatcccagtgcctttgccagcaccagcgtatacaccgcgatagtgggattgatgaagctatgcggacgcttcttggggtcggtattcgcgtatttatgcacttgcagggccaagatcagcacgataacgcccagcacggccagcaatccggtcacaatccaaggcgcaccaatcagcgacagtcccgagctttcgccgtaggaggccagaccgatacccgccaacaggcccagcacggcaccgatcacatactgccaccatggtgttcgccgtgttttcatgtccggcctccttatcgttgcgttgctgtttgctgtttgcgaacggccctcgcgcctgggccgttcatcttgatttggttttcgtcactgccgtgcccggctgttcgaggccggataccggtccgtcaccgtctggtttctagcctaccgttcgtaactggttctgccatcagctcaactgttcgacagtatccagttgtccgatagcaatccgacctgtccggcatccggtgccatggccaaaaggaaggccaccgggtcgccgcccagagaagcattcgggtccatatccagccaaggtgccaataccgacgcatggttacgggccgacggccaaggaatgctgcagttgggctcgtcggaagtcacgccttccatgtcgacaaggtcaaggtcaactgccagatcatgaacactttcgatgctgcccaatacggcaatcaggtcggcgggcggcaacttggtttcgatttggatgaccgcgctcatcgcgtccgggccgtcgaaatggctgacatggtagagcggcgagatgccctgtacctgattgccaggaacactgtcgatggaaacgatggtttcgcggaacagccgttcggcatcctgcgaggtggaatccagcgaaataatcgccttgcgtgagacgggtgccgactccgacgctgatttttgcttgactgcatgcccgccgagcatccagtcttcgctctcgagctgcacggcgttacggtccggtgcggcggccagcaaatcggctacaggcccctcatgggctccggcaagtttggcgttcggattcagcgccgcccagggagccagcacaaacgcgcgctgccaagcacgcggatggggcaatgccagatccggatccgcgctggtgatgccatcaaagtcgataatgtccaagtccaacggcctggaatcccaatgattctcacgaattcgcccatggttcgcctcgatgctttgcaacgcggcgagcaattcgtggctgcccattgtggtttcaagctccaccacggcgttcaggaaatccggcgtaccgtcggccatgccccacgcggccgtgcggtaaagcggtgagataccagtcacctgtgtgccaggcaacgcgtcaatctcccgaacggcggctcgcaaggtggattccacctcgcccacattgccgcccaaggccaccaccgcgttatggatggcatgctcttcagcagtacgtccattatcggtggcacgcacgcgcgagatggagaccgatacatctgcaaaagccacgacgatgggtgcgtgaggcttgtgcacggtgacgtcgatggaggcgacggccggcgcatcggcaagaatctcgtccgcgatacgttgggccagacgctcgatcaggtccacatgagggccttcgatgacagccgtgatgtccttggccacacggccgtaatcgatggtgtcgttgagatcgtcggattgaccggctgcggccagatcaaggtgcagggtgacatccacgacgaaggtttgtggtcgttcgtgttcgaaggcgagcacaccgtgggtgccgttggcatgtacgccggtaagtgtgatggtgtccattggtaaggctttctgctcaaatgctcccctcagtcgccttcggcgccagctcccctcgcccgaggggagccaaggcctagaagcaaccaaaacagggagccaggggaatcatgcgtattcgcgccaggtgttgccggcgatgacggcggcgcggcttttggccacgtcgtgtacgcgcacggcccatgcgccatgttcggcggacagggcggacaaggctgcggtcacgtcatcgcgctgggccatgatcggcccatcagcaccggcagcgcccgcctcggtaagcatcgccgagatgaagcgtttgcgggactggccgatcagcaccggatatccagtggcgcggaaggtctcgagtccggtcagcagcggcaggttgtgctcgatgccgggcttggagaagcccaggcccgggtcgatgataatgcgctcaggctttacgccggcggccagcacaccgtcgacttggcgcatgagttcgtcgtgtacgtcggtcaatacacc

SEQ ID NO: 2149 - DNA, 5887 bp, Unknown
  R51_24m  MAG No. k141_9403
cacggcgtaggcggcccagcggccgtgggtgtgctggacttcgatgggcataccgaacaattccgacaagcgttcgtcggtcaggccattctccaacgaaccggtgtagacgatggtgccagcaccgggattacccattgaatccacgcccgcttcggtggcgtcctcagcaggaatcggcttgcgtcccatgatagcgatgtggtcgaaaccagccggaatctcctccaagcgatgggtgaccagcaccacggcacgctcggagctttcctcgccgattcggctcagcgtgcgcatcacctgctcacgaccacccaggtcgaggccagtagtcggctcatccatgatcagcagctcaggatcgcccatcagcgcacgggcgatcaacacgcgggtgcgttcgccttcggacagtcgccacatctccttgccttccagataggagacgcgaaaatcgcgcagcagctggcgggcgcgggcgtattcctcttgcgtgtaggtgtcgcgccagcgcccggtcacggcggacaggccggtgaccacggcgtccagcgggtcctcgaactcggggaactgccggcccaggtcggcagaggcgagaccgatgcgggtgcgcagtttgaatacgtcgtatttgccgagttgatgaccgaggatgaatacgcggccctctgaggggaaggtgcgggtagccagcatgccgaccgcggtggatttgccgatgccgttcggaccgaacagcacccaacgctcccccgcgttgatggtgaggttcacgtcggtgataatgacgcgacggttgcgccggaattcgacgttgtcgagttggaggacggtgtttgtcatgagtgaaatactagctatgattcgcggtctgacgactcccctcagtcactgcggtaacagctcccctcagagaggagagccaagaaaccggtacctgaggggagctggccggcgcagccggactgaggggggcactcgttgcagcgctacttacttcttctgctcgtcgagcacggactggtagacttccacggtcttgtcggcgatggtctcccagctgaacacgtcgcgggcgcgttcgtagccggcctgacccatcttcttggcgagttcggggtcagccatgatcttgtcgatggcggcggccatgtcgtgcacaaacttgtccggatcggtgggggtgccggtgccgtcgtgcagctggtcgatcgggaccagatagccggtttcgccgtcgaccacgacttccggaatgccgccagtggcggatgcgacgaccggcagaccgcaggccatggcctcaaggttcacgatgccgagcggctcataaatactcgggcagatgaaggcatcacagccgtgttccaaagcattcagctcaggcttcggcagcatttcttcaatccagacgatgttgccgcgttcctcatccagcttggcgaacgcgatcttgacctcttcggcgatttccggggtgtcaggagcaccggcgcacagcaccacctgaatgtccttggaaatcaggtgcagtgccttgagcaggtatggcaggcccttctggcgggtgatacggcccacgaacagcagggtgggcttcgaacggtcgatgtggtaacgctcgaacaccttccaacccggatcgtctggtgccggggtagcgaagtcggccatggtgatgccgttgtacaccacaaccaccttgttcggatcgaggttcgggtaagcagtcagaatatccttgcgcatgccaccggaaacggcgatcacacgatcggcgtgctcgtaagcatccttctcagcccaggagctcagattgtagccgccgccgagctgctcacgcttccacgggcggaacggctccagagagtgcgcggtaataaccaatggagtgccgtgcagcatcttggccatgtagcccgccaagcaggcataccaggtgtgcgcgtggatgatgtcggcgtccacatcattggcgatctgcaaatcaacgccgaaggtcttcaatgcggggttggcatcagccagctcagaaggcgtgtcatagccgacgaccttcaagctgcccttagcatcggcagcattcgggatagcaggaatgtccgcctcggtgcgcttgccatcaaacgcacgaacggttacgtcgatgcgctcggcaagcaccttggacagttcctcggcgtgtacaccggccccaccatagacatgcggcgggtattcgcgggttagaatatcaactttcatcggactgcctctccttcgtgcgtcagaaagaaactcaagcacttcttactttagggcaccgcatacaagaaaacgcacaacttccgtcgtgcgttttgcttttcaagccggatttaccgggcaaaagatcagactgccgtgccgttctgatccaaattcggattatgcttggaatcgccagccgtaaagaacaggctcagcacacccacaatgaacaccgcggaaacggtgatgatcagccacatcggatggcttggcagccacataaccacgaagaacgcgataatcgcgatggcgatcagcgtccagctgcccacgcggaaccactgacgcagcgaatgcggtgccttgaacatcttcggattcgtgtagttcgggttagtggtcagcagggtttcggtgtccgcaatcgtaccgccgctgggcttccattcggtgccgtcggtgccgtcctgcagacgctgggacttctgctgcagctgatattcgtcaatcattcccgaacggccacggccacgggtctggtcatactgcgacggcactcccctgcggcctgctttggcttgggcacggcgttctacacgattcggcattccactactcctgtttcgacggtgacactgttggctatattactcgcttatcggcggcaatttgccaccagtccatcggaacccactgtgtgtcattgtattttcagtcagtgatgcgggcagtcggtgatgcgataggtttgcgtatggaagtcgcaagtgaccgcagtgccgtccgcgaataccgaacgctgcaccagcggatcatcatccacgaactcgtgacgaaccagttcctgcatgccgacccgctcatggaatgcagcgaccgtatggcagcgttcgatgtcgttttccgtgcgagcgcgctgttcgtcgtccatgtcgccgtcaacgccgatgtatgcggcatcgcgaatcaggtatggagctccgccgttgagcaaggcgtacagcatgtaatcgtcgccgtccaccacacgctccatcatccacggctcgataacgcaatcatggtagacgaggttatacagcggcaccggcacaccttggcgcggctcgttgggtgagcgcatctggaagtcgtatggcgcgtaatggcagaatatcaggcttggcactgcccagtccgatacctcttcggacgaggagaggatgccgtgcgagagcagatattcgaagcattcggcgcggcggtcaaagcattcgcggcgggtcatgcggtgttcggggttcgagcattcgtcgccttcgttgcaggtgaagacatccaagtatgcacagtcgagtttgatgccgtgtgcggcgatttcggcgaaattgcggcgcacgtagtccggtgcgagctcggcgcacaggtaggtctggcggccgcccgcccagcgtgcgtgttcgggcatcgtaccgtctgccagccgaatcgcattgttggcatcaaaggtttgcgcggtgaagtagtaatcgcgatactggtcatgcgtgccgaaaatatcgccttgctcatggcaggcgtcgaccagcgacttcatgccttcccagccgcctgcctcctgacaagccggcagatagtcggggtgtgcgttgtcgtatccgggctgtgcccaaccatccaagtgcatgtacagtcggcctgcacccatgctgtgcaatgttcgcatttgcttttcgcgctgtgcgaaggtgaccagtgactcgtttttctcggggtggtccttatcgtagtagtacgagtcgggctgtactttggttttgatgccgatgtgcacccatgaacgaccaatcaggtcacgcacggagggattgcgcgccgccttttcgacgagcgtacgcaagcgacctcgttcattgacgtacgaacgataggccttgcacaccgccgtgtgatcggcgtggtcgaggaactggtagcgtaccacgcggcgataattcattgtgccgaggcttggctcaaaccaagtattgatatgggtgtacgggccatcgctgggatggtcgatgccgtaaccggcattccatggagtttcgcagatggcgatatacccgtgtccgtctgcgcggagctgcgcgaaccacggcatgtaaccgccagccgtttcgaagcggccgtcgaaggcgatatctttggtgctcacggcggtaggccatgtgttggggatcatcacaccttgctcatgggtgatgagtgtcgtgtcatggtcgtcggcgcaatcgaagtccatggctgcgggccacgtcacattggtgatgttcaggccttgctcattgagcggaatccattcgaagagcacatcgcctgaggcacgctccacccatacataggtttcaaaggagtatgcgctgtgcccaaagccggtgaagatgctgcgaatgccggttcccgtgccggtttcacgctgctcatgggtgatggaagtggcatccgcgaacgcgaaggtgccttgcgcgcattgcagggtcggcttgaaatcagcgcaggtattccattcggcaccgtcgcgcgtaaaagcgaactgcattgttcgttcatcgaatcgcacggtagtgccggatacggtgaattccatagttaatgtgctcctgtatgttctcgattgctcccgcttacgggagctcgctcatataacaagattaggggtggtctgctgtttgagaccacccccagtcggctttgccgacagcccccgccagcggggggctagcgctgtctgtttattacttactgcttactgcttcttggtcagtgcggtgaacactgggccgccgccgtagtcgaatgcgacgccggagactgcggaggtgctggctgcggtggcattctggttccacaacgggatagccggaaggtcctgcagcagaatctcctcaccttgctgataatacttgtcggcttcctcggtggacggggcggaaagagccttgtccatcatggcatcgaactcggggttcttgtagttgccgctgttgccgcccttgccgtcggccgaactggaatcgtacagctgtaccagatagttgtccgcggatggataatcagggccccaaccgctgcggtatgcggaggtcatcttgcctgaatccacattggacaggaattcgtcggaagtggacatcgggatgctcttggcatcgatatccagcgtgttcttgatgtagttgcagattgcctcaacccagttcttcgcagtgccatcagcattgtatgcaatgccgaactcaccgctccacggggagatggcgttggccttggcccacagttccttggccttggacgggttgtacttcagtacttcatttcccttgagttccttggagtaggcgctgattggggctgcaaggaagtcgacggcgggcgtggcggtgccgtggaagatcttctcggcgacggtcttgcggtcgatggacatggaaatggcctgacgacgcaggttgccttcctcgttctggccgaagtgttccagccattcaggaatggtgaaggtgagcgtattgccaccgggctcgttgtatgccttcagcgacttgtcggattggaaggaggtaagtgcggtgtcaggaatcgtgttcgtgaagtccaggttgccaccgcgtaggtcggcgtatgccgaatc

SEQ ID NO: 2150 - DNA, 4488 bp, Unknown
  R51_24m  MAG No. k141_9422
gaaggacagcaggtcacgttggctggtttggtcaccaatgtggaccggcgcgtatccaagaagggcaacccctgggccatcgtgaccatcgaagacatggaaagctccatccaatgcatgttcttcggcaaggtctatgaagcggccgccgccgaactcgccgtggacgccatcgtacagattcgtggccaagtggagttgcgcgacgaaaccgtttctctgagagccacggaaatgcagattccgaccttggaagccgaggatgaacgtccgttggtcatcacgctgccgccggtggcgttggagcgccaacgcatgatgcaactcggtcaggtgctcgctaatcatcctggttactgcgaagtacatcttgcggtgctggatgagaagggtaacgctcaggtgctcacgtttggcgatcgtttccgcgtcaagcgggatacttcgttgtttgctgagatcaagattctgtttggccccagctgcttgcctgccgcctgattggcgggtttcgcccctggcctctccctcacctggctttgctggggactccttcatcagagggagctaaggcatgtgccaccatacgatgtgcgcgactattgtggaacgtatgggcatggagatggcggatactggtaacaacgatgacgagcgacaatggattgccgcgatgctggaacggctgtctcattcgcagttccgcgccaaattcgctttgaccgacaaagaacgagcctatgcccgcaccaaaggcaaggcgaccatcgatcgtcatgcgcgagaaatgttgcgagaccgcataggcgcagccgaaccgaagaacgacggcaggcagacgccatggcgcggccatccggtattcaccgctcagcatgctaccgccacatgctgccgcggatgcatcgaaaaatggcatcatctgcccaaaggccgtgaactcaccgaagcggaggtaaaccgacttgccgatttggtcatggcatggattgagcgggaccttatcaatcatccggttcggtgaagcacccagcatcctcagtatgcctgtatgccttcaatagttatgagccaacagccaacacaggcctcgaaaaccgtagacgcaaggtattggcgaatacggcagaacgccgaacgttgcctatggcgtgttcggcaataatgtgacatgatgtctattcaagaagagttgacgaagcgtcaactctaccccaaggaggcggaatatgtactacagcagcggcaattatgaggctttcgcacgcccgaagaagccggccgacgtggacaacaagcatgcatacatcatcggtaccggactggcggcattgtctgcagcctgttatctggtgcgtgatggtcagatgcctggcgagaacatccacatccttgagaaggacccggtacccggcggcgcctgtgacggtcttgatattcccggcctcggctatgtgatgcgtggcggccgcgagatggacaatcatttcgaggtcatgtgggatctgttccgctcgatcccctccatcgaaaccgagggcgtcagcgtactcgacgagtactactggctcaacaaggaggacccgaactactcgctgtgccgcgccaccaaggacctcggcaaggacgcggggctcaagggcaagttcggcctgtccgacaaggcttcgatggaaatcatgaagctgttcttcaccccggacgaagacctgtatgacaagccgatcaccgatttcttcgatgatgaggtgctgaactccaacttctggctgtactggcgcaccatgttcgccttcgagaactggcactccgcgctggaaatgaagctgtacatcaaacgctacattcatcacatcggcggactgccggacttttccgcgctgcgtttcacccgctacaaccagtacgagtcgatgattctgccgatggtcaagtatctggaatcgcatggcgtcgaattccgctacaacaccaaggttgagaacgtggaattcgcgattggcgggggagccggccccaagcgcgagcacaccggcgtaggccaggacaccatccaaaagattcaggccacctccggtttcttcaagcgcaaccctgccagcacgcccaccaagaagcttgccgtgcgcatcgacgtggatcacgagggtgataaatcctccatcgacctgaccgagaacgatctggtgttcatcaccaacggcggttgcgtggagaactccaccatgggttcccagaactcgcccgccgcatggaacccagacctgaagcccggcggcggctgggatatgtggaagcgtatcgccgaccaggacccgagctttggccatccggagaagttctgctccgatccgaatgccaccaagtggatgagcgccaccatcaccaccctggacggcgagattccgccgtacatccagaagatttgcaagcgcgacccgttctccggcaaggtcgtcaccggcggcatcgtcactgtgcaggactccaactggctcatgagttggaccctgaaccgccagcagcagttccgcgaccagcccaaggaccagctgtgcgtatgggtctacggcctgttcccggacaagcccggcaactatgtgaagaagccgatgaccgaatgcaccggtgaagagatttgcgaggagtggctttaccacatgggcgtgccgaccgacaagatcgaggcgctcgccaagcatcacgccaacaccgtgccggtcatgatgccgtacatcaccgcgttcttcatgccgcgcgcggccggcgaccgcccggacgtggtgcccgatggtgccgtgaacttcgcattccttggccagttcgccgagaccccgcgtgacacgatcttcaccaccgagtactcgatgcgcaccggtatggaagctgtctacacgttgctcggcgtggaccgcggcgtgcctgaagtgtggggcagtgtctatgacgtgcgcaacctgctcaacgccaccgtcaaattgcgtgacggtgcaccggtcaccgatatgaagctcaacttcattgaaaaggccgtggtcaagaaggtgctcaagaaactcgacggcaccgatattgccaccctgctacgcgaataccacgtaatctgacatccatccggctcccctcaaggtgaggggagccagcacgcgaagcgtgactgggggagttgctcacaacggagtgttaagagaaagacaaaacatgactgattctgatccccagttaatccgccacgccaccatcgacgatctggacgcgctggccgccatggaattcgaatgcttcccggctgccgaggccgccgaccgctcgtccctgcgcgctcgaatcgagacctatccggaatgtttctggctattgattgatggcgagatcgtcatggcgttcatcaacggttttgtgaccgatcggcgcgacttgaccgatgacatgtacgaggatgccgcgcagcacaaccctcaaggtgactggcaaatgattttcggcgtggatactgcgccgaagtatcagcatcgcggttgcgccagtacactcatgaggaaagtcattgaagacactcgtgcagccggccgtaaaggcctggtgctcacctgcaaagatcggttggtcggattctatgcgcgattcggatatgaggacgagggcatttccgattccactcacggtgacgtggtctggcaccaaatgcgcctgaccttctaatccccctttggcttccctctttgatgctgggtcgtttaaaaaacagtccggtggactgtttttttagacgaaggcgagacgatagtcgagccataagggcgcgagctttgctcgtccgtaattgcgggtgagctgtccgcgtgatcggactgaggggagttgaacgtggaatgaattgttgcgacacgccggtgaacatctgatttcgttacgtgagcccataaaaagccggcgtatcctgatgataacggcgtgattcaagctgatttcgacacgccgatagaacgccgtcgttgcaacgattctggcgtaccttttcatgcccgatttgcgcgaatccaaacatgcgtgtaagttattcacctgttgccgctcggcgcggcgggttccttcttctggttggtttcctgtcttgctggtgtggtggtggtttgagaactcaagagcgtgtttgtactacttctttatagtcaatgattgccagttcattcctcgcctgatcgcctgttgtggtggtcgggtacccgggagggtttgatgaggggtgaggttttttgagggcgtccttccttaaggacgtgctcgtctttttcttttttggaaatgatgtttgagagtcatctattcggatgcttttcatgaagttttttttgtggagggttcgattctggctcaggatgaacgctggcggcgtgcttaacacatgcaagtcgaacgggatccatcgggctttgcttggtggtgagagtggcgaacgggtgagtaatgcgtgaccgacctgcccca

SEQ ID NO: 2151 - DNA, 6663 bp, Unknown
  R51_24m  MAG No. k141_9833
ccgccatcttccacttcaagtggtcgaatcgcggaatcagccggcggatatcatgtgccgcgtcgttaccagtcaagccgggaaattcgttgcagacggtcagtcgaccagcgaattgatctggatgacatggtcgcgctgcggaccggtgccgatcgcggagatacggcagccgctcagctcttccaaacgcttgacgtaggcctggcaggtggcgggcagctcgtcgaaggagtggcagtcggagatgtcctcatcccagccgggcatggtctcgtaaatcggcttggccgcggcgaaggcggcctgatcggtcggcatatcgtcgtgacgttcgccgtccacgtcgtaggccacgcagatcggaatctccttcaggccggtgagcacgtcgagcttggtgagcacgatgtcggtcaggccgttgacctgggaggcgtaacggttgacgaccgcatcgaaccagccgcaacgacgcgggcggccggtggtcacgccgaactcgtggccctgctgacgcagccattcgccggactcgtccagcagttcggtggggaatgggccttcgcccacgcgggtgacgtaggccttggagacgccgattacgcgggtgatcttggtggggcccacgccggtgccggtgcaggcgccgccggcggtcgggttggaagaggtgacgaacgggtaggtgccgtgatccacgtcaagcatggtggcctgagcgccttcgaacagcacggtcttgccttcgtcaagcgccttgttgagaatcaggccggtgttggccacgtacggcttgaggcgttcgccgagcttcagcagctcctcggtggtctggtccacgtcgatcggacgacggttgtagagcttgaccagcatctggttcttctggtgcaggctggcctccaccttgtcgtgcagatggtcggcgttgaacaggtcatgcacgcggatgccgacacggttgatcttgtccgcgtaggctgggccgatgccacggccggtggtgccgatcttgtgcttgccaaggaagcgttcagtcaccttgtcgagtgtgcggtggtagggcgcgatgatgtgtgcggcctcgctcaccttgaggtgggagcaatcgatgccgcgggattccaagccgtcgatctcctcgaagagcacttccgggtccacgaccacgccgttgccgatcaccggggtcaggttcgggttgatgatgccggagggcagcagatgcagggcgtacgactcatcgccgaccaccacgctatggcccgcgttgttgccgccgttgaagcgcgcgacgtaatcgaccttggtgccgatcagatcggtagccttgcctttaccctcgtcgccccactgagcaccgataagaacaattccaggcataacacacctccgcattcgcacgattccgccggaaacagactaccttacaccctctactcggggcgcggccatctcacgcaatcgggcttctggtgtctttgccgcgcgttgcgcgaggcgggccgacaccaaggcgccgccacggcgaatgacagtttatttgggtgttatctgagtgctttgccggccgagccgagttgcttgcatgcctcagccacgcgggcggacatggattcctcggccttgcggccccaggaacgcggatcgtagaacttcttttcgcccacttcaccgtcgatcttgaggaccttgtcatagttctcgaacacatggtcggcaatcgggcgcgtgaacgagtattgcgtgtcggtgtcgatgttcatcttgatcacgccatggctcacggcttctgcaatctcttccggacgggagcccgaaccgccgtggaacaccaattcgaacggcttgccgttgggaaagtcgactatgccggcggcgctgggcagctcaccctcgaccaccgcgcgcgccacacgggactgaatatcaccgagcagggcgggacgcagcttgaccacgccgggcttgtaggagccgtgcacattaccgaacgtgaaggcggccatgtatcggccacgctcgcccaaaccaaggcgacgggccacttcaaggccatcggccggcgtggaatagaggcgttcgtcgattttggcggaatagccgtcttcctcgccgccgaccgcgccgatctcgatctccagcaccgtgtgcgcggcctgcgacttatcgagcagctcctcggcgatgtccagattttccttgagcgacacggtggagccgtcccacatatgcgactggaatgtgggctcctgaccatgcgccacctgatcggcctcatgtgcgagcagcggtcgcacccattcgtccagatactgcttggcgcagtgatcggtgtgcagggcgatggtgatgttcgggtacttcgcggcgacctcgtgtgcaaaagcggccaaggccagcgatccggtgacacggtcgttgacgccgatgccggaaaggtatgcggctgcgccgacggacacctggatgatgccgtcggattcggcatccgcgaaccccttcagcgcggcgttcagcgtctgcgagctggtcacgttgatggcagggtaagcgtagccgccgcgtcgtgcggcgtctagcatttcggcataacgttccggtgttgcgattgtcatggcttcattatcgctcggggtgtgcccgccagactaggttctggagccaggcgagctgtgaactatctcacgaggaacaccatgatgataatcatggcgaagccgaccaaatcggtcggggtaaagaccgcgccggcgaataggacaccggtgatagtggcggttacgggttcactggtgccgagcatggtggcgcgcattgcaccgcagcgctgggtgccgccgaggaatagccaataggcaccgaatgtgccgaacaccacggtgaataccatcagaccaatgccgaaccagtccaacgcgggggcggtggtccacggacgcacgagcggcagcagcattagaccggaaacgatgaacatgacgccgctggccatgaagttgccccatttggccattaatgcgatgggcagaatcgcaagcagtgacgtgcatacggcatcggtcaggccccacagcagaccgggcagcggcagactgagctggctgagatcgccgcctgtggcgatgagcaccgtgcccacaaaagcgagtaccacaccgatgctttcgcgtttgccgggcagccgtttgcccataatacatacgaatacgagtacaaccagcagattgagcgtctgcagcactgtggccgtgccggaattggtccagtcaatggccttcaagtaggagacctgcaccatgagcacgcagaagaacgcgcacagcaggagtctcgggtaggaacggtagtccttaagcgagttgatgaacttgtcaggcgtgaagattcctgcgcaaaccagaaagatgacaccggccaatagctcgcgcacgcaggcgatccacagcggatcggcgtgatagtcgttcatcaggagtttggagacggtggcgttgacgccccagaagacgcctccggcgagcgccagtccggcaccgacgaagatgtcgtgcggggtgtgttcgagggttggcgttggttggccattggttgcagcggtcttgggttcacacatcgcccatcacgatacgcggacgacgtgaattgttctcatatagcggtcatacggcaggaaaataagctctcaaaagagggaaaaccgttgaaatttcaaggaaaatcgatggagcggacgacgggagtcgaacccgcctctaaagcttgggaagctttcattctaccgatgaactacgtccgcatgtgcgcttccacgcacgagaggcaagtgtatcacctatgcggcaccttgcgccatgtgccggtttgagttctgtgctggactagtgaattgcgcgcgtggaatacgtggatgcggccaccggagtgccgttcatttcattggccatttgcatcaggcgtgcgatgcgctgatcagtcggcggatgcgtggagaacagtttggagaaaccgaccgcggagaacggattggcaatcatcatcgcggagatggactgggtgccggccgttttgcgcatgggcgtggtctgggcaccataggagatcttgttgagcgcggaggccagggcctcggggtcgccggtcagcagactgccgtcttcgtcggcgtcgtattcgcgagtacgggagatggccatctgaatcagtgatgcggcaatcggcgcgagaatcacgctgaggagcacgccgatcaagccgagaccgcctgaattatcgcggtcgtcgcgcgagttgccgccgccgaaatacatcagagaataaccgaggtacgtgatgacggtggccatggcagaggcgatggcggaggtcagaatgtcgcggttgtacacgtgcatcagttcatgacccagcacaccacgcagttcacgggcgttgagaatctgcaggatgccttgggtgcagcagacagccgcgtgccgttcgttgcgtccggtggcgaaggcgttcgggctcatggtgggggcgatgtagatgcgcggcatcggcttgccggccttggcactcagctcgcgcacgatctggtagatttccggggcttcctgctcgctgacctccctggctcccatggatgcgatggcgagtttgtcggagaaccagtatgagccgaacgtggtggccaacccgataatgacgtagatgcccagcgtctgctgcctgccgcccgtggcccaccatatcagcatgatgatggcccacatcaaggcgaacagcagcgtagtcttcaggccgttgaaatggccgtgcacccgtactttggcatccatgaggctcacactaaaatcactgcctgaatattggctggatgtgcgccgaggggtgaatcggatgggggttggcggtgcttacggtgcggttggcggggatcggaatagcctgtttacatgagattgacgatgcttgacagtgcggttgcttggcctgttttaccgctttaccgctttaccgattggtctgatcgggacgctttgcttgtttggcctgctttggctgcttggatcgtttggcccatcggcctgctcgactggcatgacactggcttttatataaataagaacgctggcgtataaccggcgttcttatttatcgatgtatcaatcgcgccgattgctgctggtgcagttgccggtgcgatgagctgatagtcaatcaggccagagcgagctcacgcatctggtcgggctcgatgaccttcttgtgctcgcggccctccttggcgccttcggcgcgctcgaaggcgtcgaccttcttccagccagcgaagtcaatcggcttgacgccgcggctttccagcagtcggtcgatggattcggggtcgcgatcctcggccacgcgaccaccttcggcggccttggccagatcctcaagcatgttggtcacgatggcaagtgcgtcggacttggtggagccgatcaggcccaccgggccgcgcttggcccagccagtggcgtacagacggtcgcgcacttcgccgccgtccgcttcggtggtgatgcggccgtcgccattggcgttggccaggtgagcgccgtgctcgtcgtaagtaatgccgggagcctcggccggcttgtagccgatggcgtggtagacggcctcaaccgggtagtcggtgaactcgccggtgcggctcatcttgccgtcggcactggtttcggtgcgttccacgcggatggccttgaccttgccgtcctcgccgaggatctcggtaggggcggagttgaagtgcacgtagtacttgcggtcggccgggttgccttcgaagtcgacgtcgccgtcatcttccatgtcctcggccatctcgcggatggcgaacagttcctcgaccatctggcgggtgagcttgtccttgccggccacctcgatggtctcgtcgtccaaatcgaagtcgtcctcattgatgatgagctgcacgccgggcagcttctccatctcgcgcagttcctgcacgctgaacttggcctgggccacgccacgacggatgaacaggtggagcaccttggccttgttctggccgatgccctcgtacacgttgtcgggaatgtcggttctggccttgaggtcgtcggcgtcgcgcatgagctcgcgggccacatccatggccacgttgccgccgccgatcacggcgacgttctcggccatcagcggccattcgcgggcaccggtggggtaaccgtcataccattcgacgaacttggcggcgccatacacgccgtcgaggtcggcgccgggcaggttcagcggcttgtccttgaccgcgccggtggcaaacagcacggcgtcgtagcgggcgagcaaatcatcgagggttacgtccttgccgaattccacgtcgcagtagaggtggatgtccggattgtcgagcgtcttctcgagtgcggatgcgatgaacttgatggacgggtggtcgggggccacgccgtaacgcaccagaccgaacggtaccggcagcttctcgaacaggtcgatgcgggccttggtgccgaggccgagttcttcgcccagtttcttgagctggcgcaggaagatgtcggaggaatagacgccggccgggccagcgccgattacagcaatacgaagttcagtgttcacagattcagtcacgcg

SEQ ID NO: 2152 - DNA, 5969 bp, Unknown
  R51_24m  MAG No. k141_10158
atgtcctcttcggtggcctgacgcgggttgccgggggtgcacacgtcgttgaaggcgtcgtgggccagcggttccagatcagcctcggtggcgccgacctcgctgatcgtggtcgggttcttcagatccacggtcagcttgtggacggcctgcacggcctcttcgcgcaccttctccaggtcgccggtgtaggcgtcctcgacgccgaacgcgtcggcgatgtcgcggtacttctcgcccgtgtagtccttgttgtattccatgaccggggccagcagaataccgttggccacaccgtgggccacgcccagacggccgcccagcgggtgagccatgccgtgcaccaggccgaggcccacgttggagtaggccataccggtgatgtaggaggcgtacgccatctgctcgccagccggaatgtcgccgtcggcggacttggctaggttcttggcaatcatgcgaatagtctgcatggacaggcagtcggacaggctccaggcacccggggtaatgtaaccctcgatggcgtgggtcagggcgtcaagtccggtggcaaccttcaggccgcgcggcatggagtcggtcagatccgggtccacgaaggcgacgatcgggatatcgtgcgggtcgacagccacgaacttacgcttgttggcggtatcggtgaccacgtagttgatggtcgtctcggaagcggtaccggcggtggtcggcacgccgaagatcgggacggacgggttcttggtatccgcgacgccttccagggacagcacgtcggcgaactccgggttggcggtgatgatgccgatgcccttgcaggtgtcttgcggggagccgccgcccaggccgatcaggaagtccgcaccggactcggcgaacttggcgacgccgtccttgatgcactcgaccggcgggttcggcttgacgttggagaacacctcgtacggcaggccggcctcatccagaaccttggtgaccttctcggcggtgccggtctccagcagtaccggatcagtgacgataaatgccttggtgaagccgtgctgcttggcgacggccgggatttccttgatcgcgccacgtccgaagtatgcagtctggttgaaaatcatgcggtacaccataggggactctccttttgagctcgtgtcttaactggtggtccactctgtctttgagtggtccaacggttccccagtctactccgcggatgagcattcacctgaaaacacgctgaaagaacaacactgaaaataatggcaagaaatggcggaattccgcacttgtcgaattattgtccattgaccaaaccagttccatcgcccgaaatctcaacgataagaccgtttccggagtcatctgacgctctccgggaaactcgtctctcatccgcttatttcgcgcgtagcgcaatcaatatgcgagatgcctaattccattcgtgcttcatcagccgaacgcgaactggttcgtcagatggtgtattcaacggtttcagtctcctgaagaggactaagatacctcgacagttggggtgatcatcataagagaatgaggtagctaatggcaaatggcaaggctatgacggtcggcgagatggcgtccctgtttctcaaccccaccactcccgttcgtatcgacgctttcgacggctcgcatttcggcccggcagacgcggatttgaaggtcaaaatcgccacgccgaactgcatgtaccagctgctcgcgcacccgaatgaaatcggcatcgtgcgcgcatacattctgggcgatttcgacgtggacgacattgactacgccgacccgtatccggcgatgcgcaagctggtgtcgctggccaaatacgttcgcccgctcactcccgcatccattgcccgcgtatccgccggcattctgagtcacggcttcaagaagccgccggtgcccgccaccgagggcccgagcaagttcgcccgcatcaagcgtggcctgatgccgcacaccgaaaaggccgattcggaaaccgtcagcttccactacgacatgtccaacgagttctacgccgacttcctcggcccctccatgacgtacacctgcgcggtattcgacaacgagcacatgagtcttgaagacgcacaggccaacaaactgcgcctgattctcgacaaactggacttgcaacccggccagcgcttactggacatcggctgtggctggggttcgatggtcatcaccgccgcccgtcgcggcatcaaggcgctcggcgtcaccctctccaaggaacaggccgcgtacgccaacgaatggatcgcccgtgaggggctgcaggatctggccgaagtgcgcgtacaggactaccgcgaggtgcccgagcatgacttcgacggtatctgctcgatcggcatgatggagcacgtaggcgtcaagaactaccagagctacttcgaagagatgttccgtctcctgaagccgatgggccgactgctgaaccaccagatcaccatcagccatgacaagcctcacggcaagcccggcaccgacgaattcctcgaccgttacatcttcccggacggcgacctcggcgcgcccggcttcatcgaatcgtgcatccatgacgccggcttcaacgtggtgcatcaggagaacctgcgccagcactatgcgctcaccctgcatcactggaaccagaacctctccgagcattgggacgacgcggtcaagcaggtcggctttgaacgcgccaaggtatggggtatgtacatggccgcctgcgctctgaacttcgagctcgacggcatccagatccaccagttcctggccgtcaagccggatcgcgtgggccacccggacggcaagtggtaccctctgcgccaatggtggcaggcctgactccgtttctgtgggacggcacgcggtttttaccattgttcatctgccgtcccacagaagtgtgggatagcagatacatcaatcgtttgacgtatctgctatcccgcatgacataagccgagaaccgcagaatagagccgttctttgccctcagctctgagggcgttcttcgaacgctgtgggacggcacgtcgaaaatcggcaaaatcacgtgccgtcccacacgattcccttcgcacgcgcatttcgcaggtgctttttctgcaatactgactctatgagcgccacagccccagaaacggctggggcggacgatcgcaccgaccatgacacgcgcggataagacccacgtttctttatttaaccctaacccgatgttcgcattggtgctgttggcgtgcgtagttgcggcgaggaagacagttgttggcgaacgcgagcctttgcattgaccggccagcccgccggagtaggtacgtgacggatatgcaaaagccccacacaaggcggggcttcattgtggtggctccgaacggcgtcgatccgttgacctagcgattttcagtcgctcgctctaccaactgagctacagagccatgaacagtcaaaaacccggataatccgggtttcataaccattccagcgaccccggccggacttgaaccggtgacctccgccgtgacagggcggcgctctaaccaactgagctacggggccattgttctcacttgcgtgaggcaacagatgtatatattaccgaaattcgccggtcgtgcaaatttcggcgtgttccgcgtaatttcaaggtttttgctatcaccagcacacggacacgtctgccataaacatccacaaacgacgaagggcgcgaccggaaccccggtcacgcccttatgaacagaagcacttcacggcatccaccgcaaagcaatcgtcaatctcagtcagcctgcttccaggtgtcgacgtcgatgtggtgttcggggttggcctgccaggcatcccacgcggacttgacgatgtcttccacgtcgtacttggcgtgccagcccatctcctcgttgatgcgcttcggggagccgatcaggtgcggcgggtcgccggcgcggcgggccatgacagcctcggtgaacggcagaccggtgaccttcttgacttcgtcgacgatctggcgcacggaggtgccttcaccggtgccgacgttgaaggcgtcgtacttgcgctcgtcacggtcgaggtacttgagggcggcgatgtgggcgtcggccaagtcggagacgtggatgtagtcgcgcacgcaggtgccgtccggggtcgggtagtcgtcgccgaagatggcgggggccttgccctgcttgaggcggttgaacagcatcgggatgaggttcagaatagccgggtcttcgagttcgaccgggccgcagccggccacgttgaagtagcgcagcgcgcagaagcggatgccgaacggctgctcgcaggcgcgagccatccactcgccgaacagcttggtctggccgtaggggttgatcggcagcatcgggacgacgtcctcgggcaccacatcgaccggcggcacaccgtaggtggcggcggaagaggagaagacgagcttcttggcgttcttggactgggtcatgccggtgagcacgttgagcatgccgttgatgttctgctggtagtaccacagcggcttctccacggattcgccgacctgcttgcgcgcggcgaagtggatcacggagtcgacgccttcggcgtcgaggatttcggccagacgctcgccggcacccggagcggcgatatccatgccgtacagacgggagccttcgatgcgggtgggcttgccgtagctcagatcgtcgacgacgacgaccttttcgccggcctgatgaagtgcgtgaacgacatgcgcgccgatgtagccgcagcctccggtgacgagaactgtcatagttgacctttccttatgcgggttgcaagtgtcggccgtgtggagttcagcggctgttcacttttggtccgctttgttaccttttgaaacaatttgagtatatcacacgaacataatcgcacaaaacggtggtgtcgtccggcaatatctgcattcattaggtcgatctggcgttcattaggtaggtcggcccggagccggcccgcacgaacaccgggtaaatggcttgatatggtggttggtatcgcacaccacccacctaatgaacgccaaatcgacctaacgaatgaacagcggtgcggcgcacaaggaaaatccgaggaatatatgaccgatcccgaatccacagcaatcgattccgtcaccgcgatggccgcggaccacaccgaggcaccggcgcaccccctgcacaaggtgctttccttcgtgcgccgctccggacgtttggacgatcgcctgcagcgcgcctgggacaactatgccgacacatatctgttggatattgcggccggcaacctgctggacgtgcgcgaaggcgtcacgctcgaccgcgcgttcgtggagtcctcatggggcaacgacaatccgctcattgtggaaatcggcaccgggcagggagaaaacgtggcggccgcagccgcggcccatccggagacgaacttccttgccctagaggtctatgaccccggcgtggcccacacactgctgctcgccggcaagcaggggctgaccaacattcgcgcggcccaggtcaacgcgcccgagctgttcaaggtgaccgcgcccggcaccgtggccgaggtatggaccttcttccccgatccatggcccaagaagaagcaccacaagcgccgcatcgtgcaggaggccatggccggcgacattcatcgcgcgctggtcacagacggcgtctggcgcatcgccaccgacatcgaggactacgccctgcacgtgcacgaggtgatggacggcctcgatggctggaagaacctgggcagcataaccgtcagcctcccgctggagcacgtgggcaagggcaatgccgacatggccgccgacatgccgcacgccgacttcaccgaatccgagcggttcgagggccgcgtgctcaccaacttcgaaaagaagggcctggccgccggccgcg

SEQ ID NO: 2153 - DNA, 25236 bp, Unknown
  R51_24m  MAG No. k141_10208
aaccggccccggcccgaacccgcacgggcaccgggacctccccgcatacccatgagacccacgcccgggaccattcccggccagccccgacggcgaggccgaacggcgcggcgcgtccgcgaccgtgggagcccaacgcccaggccccccggtccgccgcgcagacagctcccctccagaggggagccagaaactggcttggttatggggtcgctctacactggcttctgctatgcattacttcacccctaaacgttgcgccacgtcgaataaaatcatgtaccacgataaggcgcaggctcagcgtgccgctgatcaaagcctgatcgagcgtggagccgagctatgggtgtaccgttgcgaatattgcggatgctggcacctcacacatcgcgatccacaatccagttaccggcatgtaccgctgaaccagcaactcaagccacacagtcgtaaaaagggctacaagccacgtagacgttagcgtcagaagctccacaggcctcgccaacgccgtatctgaggcaggttacggtccaaacacgccaggtcgtaggctgctaagcgttcagggcgctcggacacactccgtccaacactcacatcaccttggtgctttcaaggttgcggataacccaatcgttgaagcgaattaccggcttgcgcaacataagtcccaacagcaatgagggaacaaggaacagtgccagtttgcccatggaaacccagtattccatgccgaatgagcccgccatggccgaatgcatcgcatccaccgcataggggaacagtagccatttagaaacgacctggaagaacgtcggcagtgtttcaatggggaatgtgccgccggaaccggctacctgcataaccagcagtactacggcaatggctttgccgatatcaccgaacgatagggccagcgtatacacaatattcgagaacaccagtgcagacaaccacccgaccatcaaaaactgaatcggatgctcacactgcacgccgagatagaacatatcgcccaggcacaccagcgtaccttgcagcaaagcaaggaaaccgaaaatcatgtatcggccgaaatattcgtggtgcaagcgtaaaccgaactgccgcgcattgccggaagactcggcacgcggcttcttcagcacatccaacgcggcggccggtccggcaatccgcccggcaatcatggcctcgcgaagacccactcccgaaccgagcggcagatcattgcccaaccctaagatacgggccttctcatggtcggaaatcgatactttcaacatggcgaccagaatgatcgcaccgacccagatagacagaatcgtgtagaacggagccatcgcggaaccatagttggcaacgggatagagcgcgatgcggtcgaccgctacgggtgccgccagcatggaagcaatggcatcgggcttcgcagaggaaatcacagacaggtcgttggtgccgccactggtgatagaggcgagttgggaagacaagttgtcgagtttcttcgccgaacgggtcaaagcgctagctgcgtcagtcaaggccgactggatatccgtcaggctgtctgaaacgccgccagaaagacctgacacgctgctgacggtcgacgcaagcccgtcgattacggaacttgcctgcgtggccacttcgtccatggacgaggtcagattgttcagttgcggtttcagcgtgctcttgtacgtgtctgaagcctgagtaatcgattgtttggcggcggcgatttgtgatttcagatctcgacgcgctgtatcggcatcggcagtaccatttgctatgtgcgtggccgcatcgcccaacgcggtggcggcttgctgcatgctctgctgcgcctttgtggcttggtctgcagccgcgttcagttgagcggcaacggtatctccgcccacgggcagtgaagccgcttgtttggcgagatctcgtaaagcggcggcatactttccaaagctgtcggcctgagcctccactttggattgcatatcggtcagcttgtttgatatctgcgaggattgtgagcccacatcggcaaaagcggcatcgatctgcttggcaatggtgtcgtaggatgaaccggcctgctgcaatgccgtaccgacgccatcggtggctccggacaatgccttgtcgaggctggagacgccgttgcgggtctgtttcaacgcctttttggttgtggccgcagctgagcctgttgatcccagcagcttatcggtggaatcaatgatgctgttggcggccccgagcagattggcataggaatccatctgcgacgcagtgccggtcaaacgagacgacatggtggcaatatgactggaggcgttgttgacgtactgctccatttgcgggctttgcgcgtaatcggccacgttggaaaccaaatccagcgccacgctcgccaaggtcttcacaaatgtctggtcgatggtcgtggccacggtggtagcaccctggtcggtgatatgcggagcgatcggattgattttctcattgagatagtattcgagcttggcgtgcttgatcttcggtgaaaacagcgtcatcatatcggagctgaagctctttggaataatcagcgcggcatagtattcgcctgagttcacgccatcgatggccttagcacgatccacaaactgccagtcaaggtcatgattggccctgagcgtattggtcacggtttcgccgacgttgatggtgatcggcatcagatcggacttatagcccttatccacgtttgccacggcgaccttcaaggccttggtgttgccgtacgggtcccagctggcggcgatgttgtaccaggcgtacagtgccggcacaatcaccaatcccatagccacgattacggcgatcacattgcgggtggcttggcgcacgtcacgtacgaatattttccagataagcttcatcgtgcgcctccttgcccagactgcccagactgcccagactgaccggactgctcgaactgtgcggtgtgcgcagtcggctcggcggcctgatcgccgaacagtgtgagtcgttcagtggtttcgccgatatccggattgctgcccatcgccgcttcgtgacgtccgtggccgtggaaacgccgccacacatatccgttgagcatcacattgcggaactcgtcggcactcatggcactgacgccaagctgcatggcgtaggtttcgcgtgcgtattcaaccacaatgagataggcgtcgataagaataatcgacagaatccaggaggtcagcatggcgattttctcttgggtgatgaacagcagtaccaggaatacgaacgggagtacggtcagcaatgtcagaccggcaacgatcatctttgggtaccgcgcgaagaaccggtgcgcgcgatgagcgatgatatcgcgcagttccttgctgtcggacaccgtgcggaatacggagttcaagctcacctgttcgttcaccatgctgttgtgctcggtgatcatcaggtcggtatctcccaaacgatggtcgaacagcgcgttcaggttcatcgcataccggcgtacgacaagtcccacgaaaagcgccgccggcagataccagaacaggtgcagcatgtcgagccagtaatggttcgcgtacaggccggcgatcgggccgcgcatcgcgttgatgccgtaggtaaagggcagccatgggtgcagttcgcggaagaagttcggcatcatttcaatcggatacaggccggaggcaccgggtatctgcacaatgaccagaattacggcgatggctttgccgatatggcggaacgccacggccagcgcgtaaataatgttgatgtagacgaacgaacagaagattccggccaagatgaacagcagcggatgctcgcattggatgccgagcaccagatcgccaatggtggcgatgatggcttgcaggaatccgatggtgaccagcagcagccagcggccaagatatgcttgcgtagcggtgatacggcgaatgcctttgcggtcgacctcaagcttgtagatggcaatcagcacgaaaccgcctacccacagtgccagattcgtgtagaacggggtgactgcggacccgtaattgtcggtggcgtacacgactttcgtggtcagggtgacgggattgcccatgaactcgccgaatcccttgtcatccagatgcagcgtatcccggattttctggtaagcggcggaactatcgagcgtggcgatatcggtgcgtacggtggcgacatcgctggccgcctggcgcagcgaatcctgcgtgctgctgatggtggttttcgtttggttcagggtatcgacaagctggtcgaacagcccgtcggcctgatccaaggtgccggacaacgaagtcaacgtgccatccagcgtgccgttcagggcggcgaaactgttcaatgatgaggtgagcgacggcattacggtgccggtcagcgagccgcgcgcggtattcagcgccgcgatgccgccggtggtggtgttggtcatggctccggaaaggttcgtggtggcgtctttgccggagttgatgaactgtgtggtgtcggtatggaaggtgttgagctgtgtctgctgtttgctgatcaatgagtcgagcgcatcgatttgtttccagatgttctggccgaccgggtcggtggtgtctttgccgatgccggctttggtcagcgcgtctttcagatcgctgattgacgtttgggtggcgttcagtggggccgaaagtgtgttggtgatggtgtcgacggagttctgcgcgctgttgaaggagccggtgatgctgccggcggcgttgttgacgtggacggccagtccggagagttgtgctgaactgctgtcgagcgcgccgaccagtgtggtggagaaggcttgtgacccggcctgtgtttccgccaacagtgtgccggactggcgggaggcattctgcgcggccgcgacggtctgcttgagtgaggcggtggtctgtttggcgtcggcgagaatcgtgtctgattgggccagcgtgtcctgtaagtcggtgagtgaatcctgaacggtgttcagcgtggacatcaccgtattgagatcatcgatcgtatcgtgctggactttgccagtggcttggccgagatcgtctccggtttcggaaatggccgaggcaacggtggtggctaccgtggtgacgaaggcggagttgatctgctcatcgatggtggtggcgccggtgtcggtgattttcggcgcgatcgcgttcttcttctcgttgacgtaatacttgatcttcggctgtttggaggttccggtcaccgattcgaccaagctggcgctgaaatccttgggcagcacgatggctgcatagtatccgccggtctccacgccgtggacggcctgttcctcattgtctacgaagcgccagccgagttcgtcgttctgcttgagtttcttgacgacctgccggcccgcatcgagatggccgaccagatcgttggtggtgccttggtcttcattggctacggccacttgcagattgccggtggctgaatagggatcccagttggcgagaatgttgaaccatgcgtacagcgagggcagcattgctacgccgagcgtcaccacaacggcaacgggattgcgtaagatacgtctgcaatcgcgtagaaagacttgccaaaccgtccgcatccagtccctcttttccggttcgtagtcattgcggccacatgcagtctattcccaccactggtgcggatactgctggtttggcgggttttcttgcaaaactggccgttggttgtccgcataatgggactgatatgtgaacgtttgttgatggtgcgacaccggcgggatggttgtgcaattttgccggtatccggtgatgaaatgttgaggtgttggaactgagtcgtcgcagtgctgagaccgagacgactcagtgacgagcctatccgaggctatctcgttggttctggtctcactgatccagacggaagccctgagcggcggccttgtcgagcagtgtctgatggctgacatcctgccgactgatcgctgaaagcgtccaccggacggtcggcttggcgcagatcgtagtaccggtgaacttcctcgtcgaaggcgggcagctggtcgagtacgccatcggcgtcagccgggtaggtgttctcgaagaactgcatcgtgcgcggcatgcgcggcttgacggtcgggttctgatcgggcttgccgatggccagacccagcaccggatacgtgtattccggcagattcagcacgtcgataaggccggggatgttgttgagcagagagccgagaatcacgcagcccagtcccagcgaataggcggcggtctccatggcgtgcagggccagcacggcgtcgttctgagcttgggtgaagcgatagctgtacttgagatggaattcgtcggaagcgggatcgatacccttgcgttcggcgatgcgtgcgttgcggtgctcgtcgatgacgaacacgtacagcaacggcgcggtggcgatatacggctgatggccgaattcggcgagcttggctttggtggccgggtcggtgatacggatggcggaccagtcgttaaggaactggctggacgcggcatgttgggcgacggtttcgagcgtggcgcgggtatcgtcgtcgatggcctcgtccttgaacttacggatggagcggcggcccagaagagcctcgattgttgcgttggtaaccatggctttattgtcgcacggcagacgccggacgccacggtggattacctcacagtgaaatgccgatattgtgtggcggaactgtgctggactgatggttcctgtcgattgactgatggttccttgacgaaattccagcgatgagtcatcagtcagccaacagaaaccatcatccaaccgggggattagcggctgggcttgcgatggcggtggtcgacgaacgccttggagccccgatccgacagctgcgaaaccactgcgccgagtgcggccgaaacggcggcgaatgccagactcattgccagactttgcggcgcgtctgccgccagtcccttgcgcagattgcgtttgcttgtgcccttgtcccatatcatctggaatgctttgccggcaaccaagcctgccagcgctgggactgccgacttgatgagcttgtcgcccagagaatcagggtcgttgagccggtcctcgcgcagcctgttgaccttctcgtcgatgcggtgcaggctgtcgaccgcgcggtcggcgctggaggggaagtcggtgttcgtttcgtcgctcatgactctcagtctaatagcatctcaatcatctcagcgcaaaagatgggcgttaatggtggagtcatgaacgagcgcagactagagtggaggcatgagcgaacagaacgtgaacggcaccgttgccgtcgagaactctcgtggcggcaatggatttttggtgttgctgcgccacggccagaccgtgtggagcgaatccgggcagcataccgggcgcacggacatcccgttgaccgcggtcggcgagcagcaggcagcggatgccggaaggcgcctgcgcgaggccttccccgaaggattcagccagagctgtgtgttttccagtccgctgaagcgggcgtgccaaaccgctgaattggctggttttgcggaccacggtgtgttggacggcatcgctgaatgggattacggccgagccgaggggcgtacgcgccagcaggtgagtgaggccagcggttttgaatgggatgtgtggcgtgacgggccgcgctcgctgacgcccacgctggagggcgactgggtcgagaccttgccttcgggcgaacaggtgccggttcatgccgggccgggcgagacgctggaagaagcggcggcacgcgccaagagcgccatcgacgagattacgccgctgctgaaagacggccataatgtgctgttggtggctcatgcgcacatcctgcgcatcctcacctcgcaatggctgggcgtggacccgcatttcgcacggttgctgcgtttggatacggcgcactactcggtgctcagcgtctataagggagataacgtcatcgaacggtggaacgcctagccccggttgcgctgcgattgcgctggcctgcccgctactgcgggcgggcctttattgtttgtggcgggaattgcggtatgtcgataaatgatttgcaaacgatagcgtcggcgtgttgttttttgatgggtataagtggcaatcgattgccatgaaagatatgttagcgctctcatgattgcgaacgcttgcattgcgataatgaggcaaaaatgactgaattgatgggatatctgttgacaatggcctgaaaatgatgatttatgacgcgccgatattgctatcgtttgcaaaaagaagcaaaccgttgcacaatagtgcatgtcgatagtcgtaaaggtgcgtgctagcgtacctgtcccgaccggggacggccgggtcgacgatgaaagagaaaggttcgatgatgaatcgtacagtcaagtcagcagtcgcgatggcggctgtcgctgcgatgtccctcggcgctttggcggcctgcggaagctcgacctccggcgatgacgccaagggcaaggtctactacctgaatttcaagccggaagcggctgatcagtggaccgctctggccaaggaatacaccaaggaaaagggcgttgaggtcaaggtgcagaccgcggcctccggtacctacgagcagaccctgaagtccgaaatcgccaaaaccgaagccccgaccttgttccaggtcaacggcccggtcggctaccagaactggaagaagtacaccgccgatatgtccaatacggatgtgtacaaggagctcaccaaccaagatgtggccctgaaggatggcgacaaggtggtcggcgtgccgtacgtgatggaaacctacggcctgatctacaacaaggacatcctcaacaagtacttcgcgctggatggcgccaaggccacgtccatggacgaaatcgacaacttcgacaccctgaaggccgtggccgacgacatgcaggcccgcaaggacgagctcggcatcaagggcgcgttcacctccgccggcttcgactccagctccgactggcgcttcaagacccacctggccaatctgccgctttactacgagttcaaggacgacaacgtcaccgagcagccggccaagatcaagggcacctacctgccgaactacaagaagatcttcgacctgtacatcaccgactccaccaccgaacccacccagctgagcgccaagaccggagatgatgcgaactccgagttcgcgctcggcgaggccgccttctaccagaacggtacctgggcctggaccgacctgcagaaggccggcatgaccgccgatcaggtaggcatgatgccgatctacatcggcgtcaagggcgaggagaagcagggtctgaccaccggttccgagaactactggtgcatcaatgacaaggcctccgacgccgacaagaaggccaccgaggacttcctcaagtgggtgatcacctctgataccggcaagaaggccctctctcaggacatgggcttcaccaccccgttcaagaccttcgatgacgtcaaaagcgacaacccgctgaccgaggccgccgtggaagaccaggagtccggcaagacccaggtttcttggaacttcaccatgatgccgtccgaggaatggaagaacaaggtcggccaggcgctgctcgagtacgcgcagggcaccggcaagtgggatgccgtcaagaccgccttcgtggacggttgggcttccgaatacgaggcctcgcactgagtctcatagagtcccatagccgataagtaacaattcgcggcgcccctgcctttccttctccaggggcgccgctttgtattgctgagtctcgcacaaaatcgtccgccgcagaaaagtgtgaggcacgcacccgctcaatcgcacgctgtggggccatgaatcggcgatttttcgccattctccacaatgtgcgattgagcgttattgtgcggttgcctcacacttttttctatggtgggctttgttgtgtgagcctacttaacgcgggaggtggaggagcggaccttcagctgggccgggaacacgatgtagggttgctcaatcggcttttcgtcaatgagatcgagcgtcatgcgggctgccacgcgggccatttccaccggatcctggcggatggtggtcaggccgatatcgccggtgtagaaactatcgtcgtagccgaccagcgagacgtcgccgggcacggagaatccattgcgctccagctggaacataagcggcaaagcgatgccatcctcctggcatgcgatggcggtgggcatctcatcttggctcatgagttggtcgaccacgtcgctgatttcataacgtccatcgtcatcgaccttgcagacgatgacctgcggctcgatgccttccctgcggcagcaggcggtgaatgagtcgaatcggctttgcacggagaagctcagcgacacctcgcgattggtgctgatataggtgatgcggcgatgtccgagattgataagatggcgggcggccagcgtggagccctgcacgtcgtcgatattgacggcggcggtaaagccgcgggcttcgggctcgactgaattgatgccgacgatcggcacgccgaccgaagccagttgcgcgatttcgttgttgtcgatatcgaaagacgccacaatcacggcatcggcgttacggcgtaccggcaacatctcgaagaattccttgcgctcctcgatgctggaaatctggaataccgaaatatcgtagccctgcgtgtgcagcacctcgttgagcccctcgatgaccgaggcggtgaaccacaggcggatatggccgctcatcagtactgcgatgcgcagggcgcggccggatttcagggccgcagccgagcgggagagtgagaaattgagtttgtcggcgatggcgagcacgcgctcgcgggtcttggccgacaccagatccggtctggtgaaggaacgtgagacggtggagatggagacgccggcctcgcgggcgacatcctgaatgctcgtagccattgcagcccccttgcgttgaatggaaaatcgcaatacacatgcacaactgactacagtgtacatgctgattgattgatttgcggcgatgacaacgattgtattacaaacgtttgcaaagtgtctatgacggcgtcagattggctttatatagccattatcttagttgaaagaagattgctggagctggagtatgctcgagattgaaacgctgaaaatgacaacgtttgacatataatgattcgacgtttactatgaacataggcttgaacgagaacaggccgtgcatgcggttctcgatcggcaggctcgcattgagttgaactccgcagccggcgcacgatgcagtgtcgcaacgcagcggactcaaggaggaggaaaagtcatgatcagcatggctggcaaggcgatacgcagatggtgggcgctgttcgcgctccccacattcgccgcattcatcatcgggttcctggtgcccttcatcatgggcatctacttaagcttctgcgaattcaccaccgttaccgacggtgaatgggtggggcttaagaactacggcaaagcgctgaaggacaaggaattcctgcacgcgctcggcttctccaccgcgttcaccatcgtgaccaccatcgtgatcaacgtgatcgccttcgccatcgcctacatgctgaccaaggcgatcaagggctccacgctgttccgctcggtattcttcatgccgaaccttatcggcggcatcatcctgggctacatctggctgctgctcctgaacggcgtactggcccactggggccgcgccctgacctataaggcgtcctacgggttctggggcttggtcatcctggtgtgctggcagcagatcggctacatgatgatcatctacatcgccggcctgcaagccctgcccaccgatgtgctggaggccgcggccgtggacggcgccaacggacggcagaccatgttccgcatcatcatcccgctgatgatgccgtccatcaccgtgtgctccttcctgaccgtgaccaacggtttcaagctctacgatcagaacctcgcattgaccaacggtgcgccgagcaacatgtctgaaggtctggcgctgaacatcacccgcaccttctacggccgtatgggctgggaaggcgtcggccaggcgaaggccgtgctgttcttcatcctggtcgctgtcatcgccctgattcagaacaagctcaccacgagcaaggaggtggcagcctgatgaacgagaacaagcctgtgaagcatggcgcattatggaccgtgctgtttgccgtcgtctccctgttctgggttttcccgatcgtcctggtgctgatcaactccttcaagcagaaggcgtacatctccaagaacgccttctccctgcctgccggcaaggcgttcgtgggacttgagaactatgtgcgcggcatcgagaccacgcagtttttcgcctccttcggctggacgctgcttatcaccgtcggctcggtggtgctgattctggtgtgcacctcgatgtgcgcatggtggatcgtgcgcgtgaacaactgggccgcgaagctgctctacaccctgttcctgttcaatatgatcgtgccgttccagatggtgatgttcaccctctccaagatcgccgacatgctgaagctcaataccccgtggggcctgtgcatcgtgtacctcggtttcggggccggtctggccgtgttcatcttcaccggcgtgatcaagggcatcccgcaggagcttgaggagtccgccatgatcgacggcgcgtcagtgccgcgcatcttcttccagatcgtggtgccgattatgaagccgtcgatcgtctcggtggccatcctcgaagccatgtggatctggaacgattacctgctgccgtacctgacgctcgacctcggcaagtacaagaccatctcggtcgccgtgcaatacctcaagggcggctacggttccgtggatatgggcgccatgatggcctgcctggtgctggcaatcatccccatcatcgtcttctacttggtatgccagaagtatatagtctctggtgtcatggcgggagccgtcaagggctgacgactcgcgtcgtcagcccatggctggaagcccagtgggcttccagcaggctccaggctgagccgcgacagcggcgaagctaatgatgagcctcgtcgtaggcgagtccgtaattgcagggccgaaggcggagccgccaagggctgagctccaccaatccggctcccctctttgaggggagccgtcggcggaagccgactgaggggagtatcctgagctccatcaagtctcccctcagtcatctgcgatgacagctcccctcagagaggggagccacaggcgacacaaggagtagttgatgaactggctggcaccggactcgaaattcatgcgcgcgtggagcaatcttgttgacggcgtatggatcaacattctgatgctggtcacttcgattccgctcatcaccatcggtgcggccctgaccgccggccatgatgcttgccgccgctccatcgagggcgagggcaaaggcgtaaccgccaactacttcaagtcattcaaagccaacttcatcaaagccacactgctgtggctgccgttcttggtggtgctgattgcactggtctggtcatggatcgtcctgcagatcacgccgctgctcatcatcaaattcgcgctgaccatcctctggcttatcggcttcgaatgggtgttcgcgcttcaggcacgcttcgagaacaccgtggccggcaccttgaagaacgccttcatcttcggcatctcccacatcgcgatgaccgtggccctggtcatcgtggatgccgtgttcgtggcgctgctggtggccagctggttctacatgcccggtggactgttcctgctggtgattcttggttacggcaccatgctgatgctccatatccccgtcaccgagcgtgttttcaatccatatctcattgactaggcgggttctctcgcgaatatgcggcgatcttcgaggtctgagcgttctctgtccacgcaagcgcggtaaagataacaaattgagactattcgctgtttgtggtgggtgatggtcaagtggtggtgacggctttgaggtcgagtctgccgcaggtcaggtagatcatggtggcgaagtagtccatgtcgcggaagcctctcgcccgtcgtttgacgttctggatgacgctgtcggcgccctcgagcacggcgttggtgtacgggtgctcgaagtatgcgacgatctcggcgaagtggcgtcggatcatgcgggcgaagtccttcatgggctcgagcctcgagtgcatcatccatgagcacaggcgatgcaggcgcacccatgcctcggacggggtgcggctgtccgtgtggatgtcctgcaggacctcgcgcatccggcaggcgcggccggtcttcaaccgttgcctcgtcaggttgcgcttggtctccacctgcagttcggtcaggctttcctcgttgcgcagccacaggtacttggtccgtttgagcagcgggttggagcggccttccgtcttcctgaccttgtcgacggcctcgttggcgtgcctggccacgtggaacttgtcgacgatccgccgcgcatggggcagatgctcacggatgcccttccggaagcccaagctcatgtcgcaggcgaccagacgcacatattccgggaccccgttgtggtccatgaaatcacgcgagaaccgttcgaccgtggtcgagtccttgcccggcgtcacgttgatgacatcgtgctccacgagatcggcgaccacggtgatgtaattgtggcccctgcggctggtctcgtcgatgccgattggcccgtacccgcacctcgtcacagcttgtataatcacgattatactaatcgtgatacaataaatcgtgatgcgatagaaatacgccggcgtatggcataaaggaggcgggcggcatggcattcatcggacgagacgatgacctcaagcaactgcaggaatgtttcactgagcgtagggcacagcttgtgttcgtctacggccgcaggcgcgtgggaaaaacagagacgcttattcaactcgcaaaagacaaggaaaccttattcttcgcggcgcagaatgccactaaagatgaacagctggcatcgttctcccgtctcatgttcgaggcgggtgccccgggcaaggattatctgagtcaatatccttcttgggaaagggcgttaaccgagttaacccggctgccagagccgagcgatggcggccgcaggcttgtgatattcgatgagtttccttatctggtcaaatctgatccgtcattgccgtcagtgctacagaatctttgggaccacacgttgcgtcatgcaaatctgatgattgtgatttgcggcagtgccatgagcttcatcgaaaaggagctgttgggagaaaaatcgccgctatatggtcgtgcgaccggcatcctgaagatgctgccgatgccatattgggatgcagcgcaattcttccccaactatagtagcgaggataaggcgctggcctacgcaatactgggcggtatcccgcgttacctagaggaatttgacccagatgagaccatagacgcaaatgtcaagcggcatattctgagacgcattgctccgctatacagcgaggttgaatttttgttgcacgaagaactgcgggaaactgcgaaatataacagcgtgatacgggcgatcgcgctcggcgcaacttcgctgaatgagatcgcgacacacacgatgatggcaaacgcaacagtatcgtcgtatctcgccaatcttatggaactggggattgtggaacgtgagttcccagtcacggcgaagcctaaggagcgggcgaaaggttcgcgtgggctgtatcagctgagcgacaatttcttccgattctggtattcgtttgtctttccgtatcgttcggaattggagcggggcgatgtggaaggcgtatacgagcgtcatatcaagccggtattacatgattttgccggcaaaccgttcgagggtctgtgccgtgaatggatgtggcgtgagagtgctgctggacggttgcccttccgtgcgcgtgcggttggccgttggtgggatcgtcaggatgagatagacgtgatggccgttgacaatgcgtctgatgctgccattgtgggcgagtgcaaattccgcaatgcgccggtggaccgttccgtgctgaatctactgcgagatcgtgctgcgcgaaccggtatcggccagcgaacatacctgctgttttcgctcggcggtttcgatcaatcactggtcgacgatgctgcggcgtctcaatccgacgttcagctcgtcggcatcgatgagctgtttcatgaataaatcccatttgcgaatagctctcactgagtgctcatcagtgagagctattcgcaaatggagccttacttcttcgcctgagtgagctggtaggcggcgaagaggatggccagccagatcacgccggcgatgacggcgatgcggtagctggtggagaagcacatcagcaccacgaccagcgccaggaacgccagcaccacccacggggtcaccttggcaaacggcagtttgaagtgaatcgcgtccagtgcctcctggccgctcagaccggccagctcggaatcctcgggagcgccgcccgcggcgaccaccttacggaacttcatttcggtgagcatgatcatcgtccagttgatgatgccggcaatggtggcaatcgacatcaggtagttgaacgcgaactcaggccacacgaacaccacgaccacggcgatggcggtgatcgcggcggacgtcagcacgccggccactggcacgccgcgcgagttgagcttgcccaagtaagcgggcgcattgccctgcttggccagcgagtacaacatgcgggagttggcgtacaggccggagttgtagacgctcatcacagcggtcaggcacacgaagttcaaaataccggcagccgcgtgaatgcccacggaatcgaagatctgcacgaacgggctggacttgccatcgatggtgttccacggcactacggccatgatcacacccagagcgccgatgtagaacacgaggattcgccaaataatatcattggtggcgcgcggaatcgtggtcttcggatcctcggtttcgccggcggtgatgccgatgagctcggtgccgccgaagctgaacatcaccacaaccagtgccatcagcaggccggtccaggaaccgtcggaattctgccccatcaggccgttcgggaagaagccgttacccacggtgaaccagttcgcgaagcttgcgcgcacgccggatgcggtgggcaggacaaagatgatgacggccaggccgccgataatcatggcgatcacggccacaatcttgatgatggcgaaccagaactcgaactcaccgaatttagagacgcccagcaggttggcggcgcagatgatcaccaagaacacggccgccgacacccatgtcggaatcgccgggaaccagtagttcacaaacgaacccaccactgatagctccaccatcgagacgaggatgtagttgaaccagtagttccagccggaaataaagccggcgcgcttggaccagtagcgggtggcatagtagctgaacgcgcccgccttcggatcctcaacggacatttcagacagtgcacgcacaatcgcgaaaatcgcgaggccgccaaccaagtaggcgagcagaatcgagggtccggccagcgcgatggattcactggaaccatagaacaggccggttccgatggcgccgcccagcgcaatcagctggatgtggcggtttttcaatgacttgcgcagcgtggccggcaccggcacgtcgtcggtttcgcgcggcttcttaggcgcatcagtagtactcattgtgctcttctctcacatttcttgggtttggcgcacgcggggcttgccgtgatgcgcaacgttcgttattctatgccgccgtatcgtctcagaaatggtcaatcgtctatttgtgcgctattgcaagcgcgggcgtgggcgcggccggtgagcaggcgaagctatagcgagcgatgcttatgaaaccgcacgcttcactgagttcactgaattcactgtgctcactgcgtggcaggcatacacatggtgaagatggtgtgggacaccgattcgggagaggccgcgagatcggtggcgagccaatattgcaaaagcccaatgctgccggacacggcgaatcgcatacgcatctgcgcctcggctgggtaacccgccgaagattgcaactgttcgcctacaccgcgctggctgtaaatcaatcccagcagctgctgctggaaaccgatatccgctttcgggctcatcagcacttggagatgattgcgattgtcggcaatgtactggcagatgcgctcaataacatgctcgatgccggcaggatctggctgggcgagtagctgttcgagtgcggtggtgacccaggccatggtttcgtcttcaatgtcgtacagcagttcctcgatgctcgcataatgcgcgtaaaacgtggaacgattcacatcggcccgctcgcacaacgctttaacggtgatggagccgagcggctgatcgcgcagcaactcgataagcgcgtcctgcatggcacgtctcgtgtagcgggtgcggcggctttccgtcaattctttggccatggccttctccccaagttccgacaacccacaatccaactgttggttgcagaaccgacacagtgttgttttacttgagtatagcaggaagttctggcggggcctatggggctaggtggctgccacgagcgcgttggaggtgtgcgatggcgtatatcgaattcgaccatgtggtcaaggaatatccttctggcagcagtgtgattcgcgcgctcgacgaggccagcttcaccgccgaacaaggcgaattaagcgtgattctggggcagtccggtgccggcaaaaccacggcattgaacattctgggcggcatggataccgccacaaccggccgcgtagtggtcggcggacgcgatattacgggtctgcggaaaaaggaactggtgacctaccggcgcaacgatatcggcttcgtcttccagttctacaatctggtgcctaaccttaccgcgctcgaaaacgtggagctcgcctcgcaaatctgccctgaccatttcgatccagaggaaacgctgcgcaaagtcggactgggggagaggatggacaacttccccgcgcaactgtccggcggcgaacaacagcgtgtatccatcgcccgcgcgattgccaaaaagccgaagctgttgttgtgcgatgagccgaccggtgcgctcgattacgagaccggcaaggaagtgctgcagttgctgcaggatatttgccaaacacaaggcatgaccgtaatgatcatcacgcataattccgcgcttgcaccgatggctcacaaagtgattcgcttccgctccggcaaggtgaccagcgaggaggtcaacgcaacgccgcggcccatcgccgatatcgaatggtaggtaattggcgatgctcactgcaagacactctgtgaaacgccccgtgaaacaagcgaggcgattcgtgaaacaacctgtgaaacagtctgtgaaacggccgaacctcgacgataacgacggtcgaggagcgggcgtttctgcggtatttgccaaagacacgttgcgttgctggctgcgcagctggaagaggttcgtctcgatcgccgtcatcacgctgcttggcgtggccgtgctgaccggcatctacgccggatgccgcgatgcttttctggcggccggtcgtttttacgatcagcagggactgcatgacctgcaggtgctatccacatacggcctgaccgatgatgatgcaacggcactgcgccgaatcgacggtgtgcaaaccgtgcagcccgaacgttctcagacggtgaccacgttggtggacggcaccaagaaaaccgtgaccatgcaggaaatcggtaccgaagggcttgatcagccgtacatacggcagggcaaactgccgaacaaggccggcgaagtggcggttacgcagcaattcctgaacgatagcggactcaagattggcggcaccattactgtgacgccacaagacacctcttcatccgtcatatcggtagcggccacggagactgacgattccaataatgccgatacggtaggtgtcgccgccaatgcctcggcatccgatgcgaagtccgacgccaatacggacgccgacgccgagcaatccccgcagttccccacgaaactcaccatcaccggcgtcgtactcgacccgcgcgacctcagcaatccagacggctattcgggcatgacctccttccggtccacctcatccgaggactatacgttctttgcacccagcgacggcgtgaccggcaatatatacactgcgatatcggttgccgtcactggtgcgtccgattttgacacgttttccgatgcctacgatgaagccatcaaaaccgtggccgaccgtatcgaacatcagatacaggccacacgccagaaagcccgtcgtcaacagatcgtctccagcgcgcagcgcaaactggatgatgccaaagacgaggccaacgagcagctggacgaagcccagaagcagatcgacgacaactgggccgagctggaagccaacaaaacgacattgcaagatagccgtaccgaattggagaacaacaggacaaccattaccgatggcgaacggcagctcgccgatggacgtgcgcagattgcatcggcccgtcaacagatcgcgcaaggtcgccagcagatagccgaagcgcgcacccagctcgaatcgggcaaagcgcagctcacctcggctcgcaaacagctcgatgcggcgcaaacggaactgactgccaatcgcacgaaaatcgaacagggcattacccaaatcgaccaaggcgtggcacaaattgatcagatgctgtccatgattcaacaggccgacaatctactggcgcaacttgacccgaatatcgacttcaactcacccacatggcaggccatcaagcaactgctcgcgcgccttggcattaccctgcctgaagtgccgtcaatcagtgagctgcggcaacagctggccgccaagcaaacggaactgcaaacgcagcgagacagtctgacccagcagaaagccgatttgcagcgcacattaaacgaaaccattgcccccgcacaatccaccttggaccagcagaacgcgcaactgaccgccaaggaacaggaagcggctgcaggagaggcacagctcaataccaaatccgcggaactcgaagcgaatgccgcaaccctcgaaacccagtcggcgcaacttgaagcgcaggccgcccaactggccagcggcaagcagcagctcgaagaaggcgagcggcagctggaagaaggcggacaacagctcgcggacggcaaggcgaaactggatgatgcgcagtctgaactcgatgcgaagcgaagcgaagcggaaagcgaattcgccaagcagcaacggcgcatcgacgatgtggccaacgcacgttggtatgtgcagacgcgcgcttcgatcgacggattcagctcgctcaaatcagacgtcagttccatcgaatccatcggccgcgcattcccgattgtgttcctgctggtcgccgtgctcatgagcctgaccaccatgacccgcatggtcgaggaagaccgcggacttatcggcacctaccttggactcggctatggcggactcgccgtgtccagccggtatctgctgttcgcgttgctcgcctgcttggtcggcggcggcatcggtctgctggtcggattccttggcatcccggcattcctgctggtggtgattgagggactgtatatattgcccggtgtgcgactcgaatacgactggctgtacggttcggccggcatcgtgctgttcgtggtcggcgtgggcgtggccaccgcgctcgcctgtcgcgaggagatacggcacacgcccgccgcgctgatgcggccgaaggcaccgaaagcgggcgctcgcatattgctggagcggattcgcccggtatggagccggctgaacttcctcggcaaagtcaccgcgcgcaatatcttccgattcaagtcgcgcttgattatgaccgtgggcggcgtggccggttgcacagcgttgattatctgcggatttgcgattaatgacaccgtcgacacgattggcgtcaaacaatacgagcagatctaccagtacgacctgatggtcgtggccaatgacgatgacgccaccgcgatgcgcaagcaggtggcacaagatggccaaaccaccgaaacgctgaatctgcgcgtggatagtggcgagatgagcaatgcggcgcaggaaagcgaaaccgtgcagctgatgaccgtgcccaacgattcgctgaatatcttgaacgatatggtcacgctggaacaagccggcgatgatggatggtttgggctgcccaatatcttcggcaaagcgggtggcggcactgtagcgctggacgatagtggcgtgattgtatcgcagtccgccgccaactcgctgaatattcatgccggcgacaccgtcacgctgggcaatggcggtagcagccgggccaaggtgcaggtcacggccgtgacgcgcaatcttattggctctgatgtgtacatcagtgagcgactgtacgaccagaagtttgcggccggcggtgtgacgtcttcggcttcgggagatggcactgcctcgaccttgacgtggaacgcgatgctcgccaagctgaaaggttccgagaccgaacaggccgaatatgcggatcggttgggcgaggaatcgtcggtgctcaaggccgtgagctgtgcgcatctggccgccacgtttaagttcgatttgatgggtgccgtggtggcgctgattgtggggctcgccggcggcctggcgctggtggtgctgtttacgttggccaatacgaacgtgtccgaacgcatccgcgagatggccacactgaaggtgctgggcttctatgaccgcgaggtgcacaactacgtgaatcgcgagatgatgatattgaccggtatgggtgtggtggttggtctgccgcttggcaggtggataggcggattactgactgctgcgttgaatatgccgtcgctgtatttcgaagtggaagtgcactggtacagctatgcgattgccgtggtggcgacgctggcgttcgcgctgctggtgcagctgttcaccaacccagtgctcgatcgcgtagacccggtcagctcgctcaagtccgtggaatagaggtagaagttcaatttggtgttggtaaattgaacttcttggctgaatatttacagtatcatcgcatgtattcttgagctgagcggttttcacgacatatttcggtgatacagtccgaacttgttttgaacgagtatcgcgtccggtgcgtaacaatcgggcggcggagaagagaaatgaaatcagtatggccgatacgaatgtgaatggtggtacacggcaggctacgggcaaactcaagtctgtcgaaagcctggaccggaccaacgagatggagcgtggcctgaacaaccgccacgtgcagttcatcgccatcggcggcaccatcggcaccggattgttcctggggtccggcaagtcgctggcgctgaccggcccctcgatcgtcttcgtgtatatcctggtcggcgtcatcatgttcttcctgatgcgcgccatcggcgagatgatgtaccgtgaccccagccagcacaccttcatcaatttcatcacccgctacctgggcaacggatgggggcatttcgccggctggacgtattgggccgcgctcgtgctgttgggcatgaccgagatcacggccgtctccacgtacttcatcaccttcttcgacacgttcggcatcgacctgacccattggaaatggctgatcgaactgtgtttcctggtgtcgctggtgtccgtcaacctgatcgccgtcaaggtgttcggcgaggtggaattctggttctcgatgatcaagatcacgctgatcggcgcgatgatcgtcaccgccgtggtcatgatcgtgatcggctaccattacccggccgcgcggattcatggcgtggatcatgtgagcccggcgggccacgccggactcgacaacctgttctccggcttctcgttcgccccgaacggctggatggccttcctcatgagcttccagatggtgttcttcgcctatgagctgctcgagttcgtgggcgtcaccgtctccgagaccaagaatcctcgtgaggtgctgcccaaagccgtcaacgagatcatcgtgcgtgtgctcatcttctacgtgggcgcgctcgtggccatcatgtgcatcgtgccgtggacctcgttcaagccgaacgaggacggctccttcgcctccccgttcatcatggtgttccagtatgccgggttgaactgggcgtccgccctggtgttcttcgtggtgatcaccgccgcgtcctcgtcgctcaattcgctgttgtattccgccggccgccacctgtaccagctgtccgaggtgtcgccgaacccgatgctgaacaagctcggcaaggtgtccgatcgcaaggtgccggcccgcgccatcctggtgtccgcggcgctgatactgctgtcgccgatcgtcaacgccatccccggcatctcgggggcgttcgtgctgttctcgtccgccagctccgcggtgttcctgttcatctacatcctgacgctgctggcgcatcgcaggtatcgccgttccgccgatttcatcgcggacgggttcgtcatgcccgcgtggaaggtgctcaatacggtggcgatcgtgttcttcgtgttcatctacctgacgttgttccttgcggatgatacgcgcaattccgcgattgccggtctggtgtggcttgtgggcttcggtggattctctatgctgcgcgaacgctaccgtagccgcgatttgaaggccgcactggaacacaaggagtgattggacgggctgattggctggcggctattagttgggtggctgttggctgttggcggctgactggctagcggccgatagccaatgactgggctgatcgtcagccaatcggctgcc

SEQ ID NO: 2154 - DNA, 3080 bp, Unknown
  R51_24m  MAG No. k141_10229
gcaccgaaactcgagcgcccgcttatgctgatccacggtttcgccgacgacaacgtcaccatcgcccatagcctgcgcctctcgcaagccctgatggcggcgggtcgcccgcacaccttcctgccgttgacgggcatcacccatatgaccaacgacgagaccgtagccgagaacctgctcaccctccagcgcgacttcctgcgcgacgccctggcctgaccggccccgggcgcgccgtgggccgtgacgtccgcggcacgcccggggcccgcgcccacacggcatgcggaaaaacggcgcaggtggtgcgccgcacccatttccgccctgaatttttggatatttttggatattttgcacccatcgtcatgtgaaagaccggttttttgcctcatattcccatcaccgcgtaggatgggtgaggattagaaagggaggactatgagcgttctcgaccgttttgaaaaaagcgtggagggtgcagtcaacggagtattcgccaagtttggctccaaagacctgcagcctgtcgatctttccagcgccttggagcgcgagattgacgccgaggccatgcccgtgggccgtgaccgcacggtggccccgaatgaataccgtttcaagctcagtactcctgacttcgaccgtatcgaggcatggggtagcgagaccctggccaacgaactggccgataacctcaccgagtacgcgaagagccagcattacgccttcgtgggcccggtgatcgtgatcttcgaggaagaccttgacctgtccaagggcaacttcaacctcacctccgaatccgtgcagggcaatgccgtgccggtcaccaccgatgcgcagaccgaggatagcccggtgctcgaggtgaacggcaaccagtacctgctcaccaaagacaagacggtaatcggccgcggttccggttgcgatatcgtcatcgacgatccgggcatctcccgcaagcacctggaaatcgacatcacggataacggcgtgatcgcccgcgacctgggttcgaccaacggcacgtacgtggagggccaccaagtgcccgccgccacgctgctcgacggcaacaccatcaccatcggccgtacccgcatcctgtactgggcctccgcccaagcccaggagtagtcgagcacacgcccgaaagtcgtccacttatgaccgaactgacattcgccctgctcaagtatggattcctgatcctgctgtggatattcatctggctggccgtacgttcgctgcgcaaggacatcgagacgttcagtccgcgaccttcgcgcgcgcgtcgtcgccgtgagcgtgaagtgcataaggccaaggccgaaacgccgcaggcagctgcgccgcgcccgcatcgccagcccagcgcttccgcgtcgtccgccgcctcggcgcagcctaccctgttgatcatcatcgatggtccgcttgccggcagctccgtgccgctggccgaagccgacatcacgcttggccgcgccgcctcgaacaccgtggtgctcgatgacgaattcgtgtcttcccaccatgcccgtgtctaccgtgacacgcgctccgggcagtgggccattgaagacctgaactccaccaatggcaccgtggtcaaccagcagcgcatcaaccgccccaccattctgcccgctcgtattcctgtgcgcatcggcgccaccaccttcgaactgaggtagccgcatgccaaaatccgccgcttcacaaccgctgttcctgtattccaccacggtgtccgatgtgggcactgtgcgcgcgaacaatcaggattcctccttcgccggcgagcatctcatcgccatgtgcgacggcatgggcggtcacgccggcggcgatacggcatcctccatcgccatccggtcactggcccacatcgagcaggacgacaccggcggcaacgtcgagacgatctcccgcatgatggaaacctccgttatggccgcgcatgacgccatcgtcggcaaggccaagcgcgaacgcaagcttgccggcatgggcaccaccgttaccgcagtggcattggtggccggctactgggtcatcgcccatatcggcgattcgcgcgcctacctgctgcgcgacggacgcctgagccgcatcacgtgcgaccacagctacgtgcagcacctcatcaacaccggtcgtatcaccccgtccgaagccaagaaccacccgcagcgcaacgtcgtgatgcgcgtgcttggcgactttgacattgacccgcgcccggatatttcggttcgccgagcccaccccgccgaccgttggctactgtgctcggacggcctgtgcggtgtgctggaagattccaccatcgaagagacgatgaccacgctgtccgatcagggcgaatgcgcgcagcgtctggtgcagatggcactgcgggcaggcagcaccgataatgtcacggccgttattgcggatgccacgttggcgttggatgccgatgcgttcgatctgccgcaccaaacgccgttggtcggcggtgccgccagccgtaatcttgagccgatcgccgacatcgtcaacgagccggtggctaccgcgcccgcgctgcgtgaggatgattcccccgcccagcgcgccgcagcattgattcagcccgccagcgcgcacgagacggaggccgcgcaaaccacggccgaaccgtcgtccacacgcgtggtgcagccgtccaccgtccgcgaggagaccggtgaacgagccaatcccgataccggtgagattccggtggtgcaaaagccggatgggcgcctgtccgccgaccccaacgacccggatgtggccaaagccatccgcgatgagcagatcgagcagaagaaggccacgcgcaccaagaagcgccgcaataagcttgcggtgattattacctgcattcttgccgtgctggccttggccggcgctggctggggcgtgtacacgtggagccagacgcactactacgtgggagatagcaacggcaccgtggccatttatcgtggcgtgccgaccaatctctttggacttgagctttcgcacgaagtgcagaccaccaatatcgccaccgcggacctgcc

SEQ ID NO: 2155 - DNA, 12666 bp, Unknown
  R51_24m  MAG No. k141_11606
cattcagaacgtgtcctttgatttgcgcaagaacggctatgtgatcgcacaggttgacgccgcgcttggacgtctggaacgtgccgtggtcgataagcagaccacatgggagatcgcacagcatgggcgtgtgacgtggaaggcgaagaccgagaagctgtatcacgaagtccagaaccatgcggagcgtaacgagcgcgaacgcttcaagtccggagcgcccaagcagccttcgtacgataagaagcaggtggatcgtctggtcgaccagattgtggacaaggcggcggccgcattgggcgttgacggcgtgaccgaagacgatgtacggtctttggccgatctcaatgcgaatacggtcaacaatgtgatcttcacccagcgcaagggcaagaaaggctatgacgagcgacaggtcgattacttcctgaacgcctgcgtgcagttgctgagtcgcttggaatcctatgcacgtgtggccgatttcgtgtccggcgagcccacggctcctgcccagaccgccacgaacgtgaccgttcaagcgaacggcgtctcgccgttgttcgcttccggaacgcagcgcccggcaactgacgaacgttttgcgccgtctgccgttgctcatgacgaatcattcgatgccctgcatcaggccgagcagagcttgttcactgctccggctccggttgctcccgcggcgccggccgcggcggcaccgatcgcctatgcgccggctcctgcatcgttcgatgcttccacaagcaccaataacaccaatgcggaacagccggtttcctttgctcccgcagcatacccggtgcatacgtccaacgagtctgcggcgaagcccgtctccgagacgccttccgtggctcctaccgcagctgttgcggctgagcctcccgccagtgccccgtccgcaccggtttccggtgtgaccgctggcagcgccccctcgtttgctccggcacagtcgtcatacgaatccgcagctccgtcatcgaccccgtcggtgttcgcggaacagcccgtggatatggtgcaggacggttcctctctggccgctctcgcccacatggctgcggtttctcaggaacttccggcggtggatgcgccgtccttcgctcccaagatgcccagccttgatacaccgaatgcgctgaaattgaatgaggtaccgggttcggtttcatccccggcaccctccgccccggcagcgcaacctgtgaatagcactgccgacgaggctgcgtccgctgccatgccggtctcctttgctcccaccagcaagccggatcgtaacacgaactccattccggttcgcgtatccgatagtcagcctgcagacagcacggtctcccgtccggctgtggaatcatctgaatacgttgccgcctcccacgacacggaagcagctcagccgtcacaggataagcacgattccaacgattcgttcccgctgctgttcccgcttggcggtaacttcgattcggatatccccgacctgtcgttccccacactgaacaatgacgatacgaagaaggaaaagtgagcatagcctccaactccaccgtcatcattctcggatccaccggatccatcggcacccaaggacttgacgtcatctcgcgtcaccctgaacgatttaccgtcaccggtctggcggcgggcggagcacatatcgagctgctggcgcaacaggccgcacagttccatgtgcccgaagtcgcggtgtttgatgagaccaaggttccaacactgcaagcggctctcgcacaggccggcgcacaaggtgtccgcgtgaccggcggtccggattcggtcatcgccatggccggatccggtgcgaatgtcgtattgaacggcatcaccggctcgatcggcctcgaaccatcgatcgcggcgctcaaggccggttcccagctggcattggctaacaaggagtccgtagtcgcgggcggtcatctgctgttcagcgcgcaagtgcgcgagaaccagatcaacccggtcgattccgagcattccgccatctggcaatccctgcgctccggaacccacgccgaagtcgccaagcttgtggtcaccgcctccggcggaccgttccgcggctggaaacgtgccgacatggagaacatcactcccgagcaggcgctgcatcatccgacgtggaacatggggccggttgtcaccatcaactcctccacactgatgaacaagggcctcgaagtcatcgaggcgtcccgcttgttcaatgtgtcgcctgaacgcatcgacgtgaccgtgcacccgcagtccatcgtccattccatggtcgaatttgtggacggcgccacgatttgccaggcttcgccgccagacatgcgtctgcctatcgcgctgggcctgtccgcgccggaccgcatgaccaatgtggccgccgcgtgcgactggacgcaagccgcaacttggacctttgagccgttggacgatgaggcgttccccgccgtgcaactggcccgccactgcctggccgcctccgagaagcatacggcggtgctcaatgcagccaatgaacaggccgtgcatgcgtttcttgatcatcggctgccgtacctcggcatcgtggacacggtcaaagccgtgctggaccagatggacgccgagcttcgtggtaacccgctgttcacggacgtggaggaaatgaaccagcttgagcttgaagcccgccgacgcgccgacaacctgataaacaagcaatgatgaataccttgaatacggaaaatcccatcgaaaagccgttccgcaaaaccggtgatccggtcgacctgaccagcgaatcgcccttgcacccgcgccgcaagtcccgccgcatcatggtgggcccggtgccggtgggcgggggagcgcccatctccgtgcagtcgatgaccaacacgctcacggccaacgtacctgccacgttgcagcagatcgccgaactgaccgccgccggctgcgacatcgtgcgcgtggccgtgccgagtcaggacgatgccgacgcactgccggaaatctgccgcaaatcgccgattccggtcatcgccgatatccacttccagtccaaatacgtgttccaagccatcgacgccggctgcgcggccgtgcgtgtgaaccccggcaacatccgtaagttcgacgaagtcggcccggacatctgcaaggccgccaccgacgcgggcatctcgctgcgtatcggcgtgaacgccggctcgctggacaaggaactctacgccaaatacggtggcccgactccggaagcgctggtggcctccgccttgaaggaagcgcacatgttcgaggacgtcggcttccacgatttcaagatctccgtcaaacaccatgacgtcatcaccatggtcgaaacgtaccgactgctcgcatccaagggcgattggccgttgcacctcggcgttaccgaggccggccccgcctggcaaggcaccatcaaatcctgcctggcgttcggtgcgctcttggccgagggcattggcgacacgattcgcgtgtccctttccgcgccgccggtcgaagaggtcaaggtggggtgcaaactcctggaatacatgggattgcgcccccgcaagttcgacatcatctcctgcccgagctgcggccgcgcccaagtggatgtgatccagctcgcatccgccgtcaccgaaggcctgaaggacgtgaccgcgccgatccgtgtagccgtcatgggctgcatcgtcaacggtccgggcgaggcacgcgaagccgacctcggcgtggcctccggcaatggcaagggccagatcttcatcaagggcaaggtcatcaagaccgtgcccgaagaccagatcgtcgacacgctgctcaccatagcgaacgatatcgccgcccaaatggaggccgacggccaagtgcccgtcaattccaccggcccggtcgtggtcccaatccagcatcccggtcactgattcggccgaataggccctcggcgtaaatatcgcggtcagattacaatagcgcacgtgtcgcaagaagaagagcatcgcctgactgttcgatccaagccgtggaccagcacccaccggctgatggtcagcctgcccatcttcattatcctgatcggcgtgctggtctccatttccaacctgaccacggtgccttggaacatcgaacccaccggccagtcgatggccacgctcaccgacgataccgaagtcaccttcgataacccgtccggagaaacgctgccggcgaaaggcacgtatgaggtcaccgagcgatacatcacgctgaacatgaccagcgacggcaatctgaccaaggagcctggtgatcggggcaaggccaatgcggacggcgtccaagccatcaaggtattgattcgggaacctcagaacgcatcaggcaagcgccccggcgtggtgttcatgcacggtgccggatacggcacctgtgacaactcctttggcgacgtggcctccgatatggcttcggccggctttgtgaccgcagtgctcgacaaacccgtctggagcaccaccgacatcaaccgcgattatccggcctcagccaaggcatatgatcaggtcatcgaatacctacgagcccaaagcgatgtagacgccgccaaggtcggcatctatgctacctccgaatcgacatggatctcctcatatctgctcgaggacgatccggacgtcgccttccagattcttctgagcccgatggtgttcagcccacgccaatcactgggatttttcgtcacccaggacttcactcttgtcggcgcgaacgagggctatcgatccatcgtccaacgcgtgttcagcgcggacaccggcctgttcggactgaacaattccgacctcgccacgctcaaacccgccgcttacgccgtacccacctatgtggcttacggttcaaaagacgtgatgacggcgcaggtcgacggcgtgcgtgcgattctctacaacgcccacaaagccgataactggaacgtgaccgtgcgcagctatccggtcgccaaccatgtgctgcgtctgggggatgagtccgaagcgggcaccccgtttgcggacgcctatgtggacgatctcatcgattgggccgtcggcacttccgccggactcacgcagaccagcgaaaaggtggccggcaccaatctgtaccaatcaatcggtctgccgggcgctttgaaggcaagacgcgtcggcaccatatatggtgtgatcctgcacgtcacggtggtactgctgctgctcgcatccatcgtgctggcactggtggcgctgggccgcaaaatcgcggcggatgcccgatggcggcgcgagaaacgcgaggccaaacgtgcgggcatgctgataccggaacggcctgtgatactcggtttcgcacatggtttcggcaacgcgctgctgactttgaccctcaccactcttgccacactgctcatcttctttgccggacttggacaggtgattatgggtgtggtcaaacttgcatggggcagcgctcctaccgagacgccgggcgtcatgtattggagctggccggtcatccaagtggtgtccgtgctggtgctatgggcttggtcccgcgtctttatgcatctgatagaggtcgcttccgcccgcggactgattcagataccccctcgtcgtgaatccgttcgagacatcgtcaccggtgccgacccggtactcgcctccacccgtctgggccgagtcctgttctggctggtggccttcaccatgctgtacatactgttggtgttcgccttctggggcctgtttatttactgactacttcattgagtagagtctgccgggcgtcgcggggaaaggagatgagatgtcgctgtaccgagacgaaggtgtggtgttgcgcacctccaaactgggcgaagccgatcgtatcatcaccatcctgacacgtgggcatggcaagattcgggcggtcgccaaaggcgtgcgtcgcaccaaatcacgctttggtgccaggctcgagccgttcatgcgagtcgatgtgcttatcgctgaaggccgctcgcttgacgtggtctcccaggctgaagcggtcgccgcttacggtgctccgatcgcggcggattatgcggcgtatgaggccgccaacgtcatcgtcgagaccatcgataaactcgccagcaccgaacacgagcagctgacgaaccaatatcggctgctcatcggcgcgttgaacgcgctcgccaaacaatcccacgccccgcaagccataggcgactcctatgtgatgcgcgccttggccttggccggttggacgccacgattgggtacttgcgtggtatgcggcaaggcggagccggcgtacctgtccatcgcgtccggcggcgtgatgtgcgaagccgaccacactaccgatgcgcgccgtatcgcgccgttcgtgttaaaccagttcgatgcactgattcgtggcgattggtcggtgcttgatgccgcgcctgtggagcgggttgtgcaggagttggttgaagattggggggagtattacctcgaacgcccgattcgttcgctgcgcttgatagattcatgagtatggcttttgagaacgttgattacacgtcgttggacattcccgcagctccgttcagcgaccctgcccgtattcccgacttccccaagaacaaggtaccccgccatatcggtgtgattatggacggtaatggtcgttgggccaagcagcgcggcatggtccgcaccaatggtcatcaggccgccgaaccggtggtgttcgacactatcgccggtgccatcgaagccggtgtgcggtatttgagcctgtacacgttctccactgaaaactggaagcgttcgccccaggaagtgcgcttcctcatgggcttctcgcgtgaaatcatccaccgccgcgtggaacagatggacgagtggggtgtgcgcgtgcgttggtccggccgtcgccccaagctgtggaagtcggtgatcgacgagcttgaggccgccgaggagcgtaccaagaacaacaaggtcatcgatgtggtgttctgcatcaactatggtggccgtgctgaaatcgccgacgcctgcgccgccatcgctcgcgaagtgcgtgatggcaagatttccggcgaccgtgtgactgaaaagatgattgccgaccatctgtacaatccggacgttcccgattgcgacttggtgatccgtacttccggcgaacagcgcacctctaacttcctgccgtgggaggccgcctacgccgagctcgacttcgtgcccgaactcttcccggactgcggccgtgacgtgctatggcgctccatcgaccattacatccaccgcgatcgccgatttggcggcgtgaaataaagaacagtccggtggactgttcgttcacgccgcctggccgaggccgataggacatgaccaggtaatgatgagtccggcgaagccggtccttgattgctgggggtgtgaaatagtccttgttaagcccctcaaaattgagggggctgagccgtaaaacaaacagcccgatgggctgtttgtaggcgaaggcgagacgagagtcgagccagaagaatgcgagcggcagcttgtccgtaattgcggtcgagctgtccgtgtagcggactgaggggagttaccggcacacctcagccatccgctctgcaaactcatccaaaaaacgtcccgaatccgcaccaagtgccacatgcacatgtggcatggaatgattcaccagcccaaccgggtctccggtggtccggcctcgtactccattgaaatcaccggtattggtctccgcgcgcaacgcaagatcaaaacaatcgaccagtgaagaatcaagtgcaaccgccgccgccaacggatcatgcaacggcatgccgccagagaacagtgcggggtcggcttccaaatttgccttgatggaaaagtccgcgagatcagccaagaaccgcccgcgcttggtccccgtcgcacgccactggtcggccgccgatcgcggtagcaaacactggtgagtcacatcaagtcccaccattgtgatgtctgcgccggaatgaaatacacgattcgcggcctcagggtcttggatgatattcgtctcggccaccgcatcccaacaattgccgggttgggtaagcgtaccgcccatcatcaccagcctgagtttcggtgcaatatccggtgcccgagtaatagccgcatccacatccgtcaacggcccggtagccagcacggtaacgtctcggccaaactcacgaacctgctcaatcagatactcaatcccatccgcagcatcaacggagcgcctccttttgccccagctggcgagagctgtcgatgtagccgactggggacggtccacaggccgagagcgacccacacgagaacaagaccccgacgccggatgagcatgagcgtcccctaccaaatacccgccaacagaaacaaccccatcgggcacatcctcagacatgtcatccccagacatatcatcaccaggcacaccagctccatcagccagagccccggcccctgccagccaagtattccccagtccatccttcccatgaaactgggcacaccctgcatcgggaataaacgcatcagcccaagaaggatgctcggagcccaaaaacaccggaatatccgcccggccaaacaaatcaagcaccgcgcaagtattggcataagccgtgttcgcatccacattgccataactggcgatcacaccgctcagctcgcactcatccgccgaccccaacaaatacgccaacgccaacgcatcatcaacaccggtatccatgctggcaataatgcggtcaggacgttgggccatggaatcgcctccttgttagcatgattcgctatgaataactttatcggccgatacgcaaaaatgcgtcctttcctcatgggaaggacgcatttttgcgtagattcaaactcggaatatcggaaattacttgccgaggaattcgtcggtgccaaggtccttggcctgcggggcctcatgaatcaccttgtcatgactgtcagtgtaggcgtcttcttcagccaggaagtcgaagtattcctgagtgcccttgaagtcgttggtgccgagcacgaaagagccgtccttgatcttggccggatcgccccagtactggccgtcgacgataacctgcatgctcttcttgacgaattcgggcttgaggttggcgtcaggggcttcgtccacgagaatctgcgcggcgtcatccgggttggcgtacgcgtactcgtaacccttctgagtggcctgagtgaacttcttgaccaggtcgggattgttcttgatggtcttgtcattggtgatgatgccgatggcgtcggcgttgccgggcacgccgtagtcaggctcggtgaagcagttgagcttcgggccgtacatgtcggcctgcacgccttcccacgtggcgtagaagccgccgaaatcggccttgccggattccatggtctggaaggtggaggtgccgacggtcaccttgtcgaactcgcccttgccgccgtcggtctggatcatgcggcgcaccacggcgtcggactcgttggagccgaaggtggcgaaggtcttgccatccaaatccttaggggacttgatggcggtgttggacgccagtgcgcaccaaatggcgctcggcttctgctgcacctgcagcacctgcttgatgtgagcgcccttcagcgtgtagatgcccacattggtcaagttggacagggcgaagtcggccacaccgttgttcacggcctgttcggcaccggcctgggccacggccacgatatccacgtcaagaccggcatccttgaagtagcccttgttcttggccacgtacacgccgatgtggttggtatcgggcgcccaggaaagcatgaaagtgaccttcttgaggtcggaggtgttggagttggaggagtcggcggtgttggtctgaccacatgcggcgaaaccgaaagtcatagcaagggcgcccacgagggcagcggccttggatacaaggcttttcttcataatgatggttccctaattcgttgtctctctatcgttctctgggattgcttcgaacggaagtcggcagaaaacgatatggagggccttgatttccgttcgaccagcgcccccgacattccctatgaaagctcaagaaagccggtttgccacacgctggtaaagctgttccattatagagacagggctggagacctcatgagaagccgccccgttcagtcggttctggccgccggcttgtgtctttgacggtaaaaagaactactggtccgcgtcggggtcttcgtcatcgccggccgggccgagcaggatgcgctcgctggcgttcaccgccagcatcagtacgcatgtcatcaggataatgacgatggtggcggagaagatcagcggcgtgcggaacgaattgtaggcagcctgcagccagatgccgaggcccttgcgcgcgccaagatattcagcggtggatgccgtggcgaagatgtatgcggcagatacgcggataccgccatagatctgacgtgcggcaacgcgcagcttcacgtgccagagcgtccagaccggggtcgcgccgcaggtcaatgcgacgtcggaatagaactggggcaccgcttctagtccgcgcacggtctgcacggcgatggggaagaggccgaataccgccacgattacgattttgccggaaatctcaaagccgaaccaaatcaggaacaacggggcgatggaaatcagcggcatggtttgtgcggcggcaagcagcggatagaacgccgcgttgaacgtgtgcgagcagtacagtgcgatgccgatcataatgccgaagaacacggcgaacaggaagccgaccacgccctcatagccggtgatcgccgcggccgggccgagcgtgttccacgtttcgatggtggcggcgaaaatctcgcttggcgcggagatcatcgtgggggagacatgtcctagatccacccacgtttcccagactgccagcaatacgatgacggcgatgacggtgggcatgcggcgcttgaggcgcttggcgatggacatgggatgtcaccttgctttccgcgccagtccggtttgctggtggcgcttgcggccggggcgtggaacagtaaggtgaggagcctgcgcgcctgccggtcgtgtgatggattgtgttatatgccgtccatcagtataggcgaaggcgaacgacaggggcacacaaaaaacctccctctgtgagggaggcgagagagctactccagtccgatggacttcatgtggtggagcttcagggaatccaccttgagggagccggactcggcgacgagcttgatggcacgcggtccttcggaggcgtaggagtaggagctcagcacttggtggccaccgttgacgtagacctccacggagccgcgatccacgaacacgcgcaggtccagcttgccggaggccagttcggtgtcggtcagtggggcggcgcggtagccgcgatcgccgttggccatggcctgacgatccaccaccacgcggccgatctggtcgtcataagccacgtaggtgtaggcaccgtccttagtggcatgaatcttcaggcccgcacgctcggcagtggaggcggccaagtcgatggtcatttcgatttccacggcctcggcgtcatcggcgatgacctgctcgccatccatatcgagtgtgatcgaaccatggtcgagggtatcctcgcgcaggccttccatttcggcgaccggcgcggtgaccacgtcgccgtcatcgtcaagggtgatctcgcgcggcagggtgagctgaccacaccagccgtcatcctccatgggaatcggctgcacgaacgggctcatccagccatagacgatctgacggccgtccacgttgaaggactgtggggcgtagtagttgtggccgcaatcccacaggcggaactcggtttccggcttgaattcgccgcccggctcccacgtgccgatcatgtagccggcgttgttgacgttgcggttcatgaagccgctgggcttggaccccatggcggagaagccaatgacccacttctcgttgccgtccttgtctttgatggggaagaagtcggggcattcgagcatgaacacatccggatccgggtgctggaagagcacgcgctcgtattcccagcggaccatgtccttggtggagaacagcgacatcggggcgcgcttgtccgccgaggagacaccgaaggtcaggttccaggtgtcgccggtcttccagaccttcgggtcgcggtagtggtgatccaccttgtcggtcgggcagtcgatgatcatgccctgcttggtggcggaggtgagctcgtcattgtccggcagcgcgagcatctgcacctgccagtcgccgccggtgttgtcgtggccgttggcccaacggtggccggtgtagtagaacttgagcttgccatcgtcgccgattactgcggaaccggagaatacgccgtccttctcctcttcaagggtcggggcgaacatgattggttcacgcttccagttgagcatgtcggtggaggagacgtgtccccagtgcatcggaccccactgggtgccgtacgggtgcagctggtagaacacgtgccagcggcccttatagaagcacaggccgttcggatcgttgatccaa

SEQ ID NO: 2156 - DNA, 32376 bp, Unknown
  R51_24m  MAG No. k141_11696
ggattggatgcctccgacattctggaccgtaagctcggcttgaagtaacggctggttcggacgtgattgctgtcacgtacggatcatgacgacagcgcgaaggtcctcatcggtttacgtcgatgaggaccttcgcgcgcattaggggagtctgttgcgggctgcgctacgcgggtcatgctgcgcgggcgtgctatgcggacaaactacgcgaacaagtcgttcagtgcctcggcaatcgtcggatgcgtgaacaccatatcgcgcaacgtgctggccggcgcgtcaagatccatcgccaacttgacgatattgatcacctcgtgcgactcgacggaaagcagcatcgcacccagaatgcggccagtattgcgttccacaatcgccttcatcagaccatccggtcgccgcattacctgggccttcggcacagcggccaccggcaatcgcttgaccacataatccaatccggccgccttcgcctcgcgctcattcaatcccacgcgcgagtaaggcgtggcgaggaatgtgctcgacggcacatgcttgcggtccttcaccgtgtacggacggtcggaaccattgagctgcgaccataccacgcgatagtcatccagcgaaatgtacgtgtgctgcgggccgccgttcacatcgcccagagcccaaatgtcggctgctgtggtgcgcagaagctcgtcgactttcacggcaccgcgttcggtgagctccacgccagctgcctcaagatgcagtccctcgacgttcggcgtacgtccggtggccaccagtaccgcgtcggtggtcaggcagaatcgggcttcagccggctcggcgaaccgcggctcgccatcgtctgatggtttcgtttgaacgtgtgacatcgtggcgtgatcggtcgggttgctagtggggctggtggttgttgtagtgtcggtggcgccggtggcgtcggtggcaccggtgatatcggtatgagcgttcccggtgccggcgggggtggaatcgcaagcttgcgatgcgccgcgagtcatacccttcaccgcaacggacaacctgacgccgccgtcagcagcaggcgcgatggccttggtatccgcgttgaacaggaacttgacgccctgcgcttccaactgtgcgcgaatcgcggccgccacatccgcatcctcgcgcggcaggaactcggcattgtgctgcagcacggtaaccgccgtgccgaaatcggcaaacatcgaggcaaactcaagtccaatgaatcctgagccgataatcaccagtcgctgcggcatatcgtcgagatccatcagtccagtgctggtgtagacgccgggcgtagtgtggataccgggaatatccggaatgcgcggcgtggcaccggtattgatgaagatcttgctggcggtcacggcgaccgggccctcagcggtggcgatttccacgctatgagggccggtgaagtgagcgcggccggtgattacggtgatgttgtcttggtcggcgagcttgtgatagttcttgtcgcgcagcatcgaagtgacgcggcgcttctccttgatagcagcctcgaacgctgcttcgcgggtttcgggagtactgttcgcgccatcccgccgcgcctgttcggcggacaaaatcagtgacttggacggcaagcatccgatattgatgcaggtgccgccgtacatgtcggcgcttgcctcggcgacgacgaccttgcggccggctgcactgagcttggcagccaaggttttgccgcccttgccgaatccaatgatcagggcgtcggtggtgatagtgggggaggtgctgggtgtgctgatggcattgggagtgctgatggacatggttacttccttacgtattcgagtgataagagtgcgttgtgctgatgtgttgtgtgccgtgcggcgtctgttttcttctttgactgccgaagcgttatcgactgatgctggctaggggaaacgcgcgggattattagcctttgcgctcgctgaatatctgttcggtgatgtcgtggatggtggtgtgttcgagttgttcgaggcaagtgcggttgagcccggcatagatgtcgttcatcactgcgcccattgaagatgacaccagacagtcctcgtgtacgtcgcccggtgtccagttcactttcacaaaagtggtgccggtggcttccgctaccgcgcgcaaagtgatttcggcggcgggccgggccagagcgtacccgccttcagcaccctctttagtggcgatgagtccggctgaggcgagcggtcgcattactttgcgcacgcgcgccgcattggtacatatgttctcggccaggatctgactgggcaggtgtgtggcgcgatggtcaaggtagaccaatgcgtgcactgccagtgaatggtcgccgttcatgaaacgacctccttaccgagtcgatactgtaactatgatgtgtacagttatgatactgtaatcatatcagatacagttagtgtgtcaaatcggggttgaagaggtggatgactatgtgtataagtgaggtgtccacatggttatccacaatgaatgtgcgtaagtgaagctaggaccacatacctcggatcggcttccgtttccgcacccactacccatatggtggtgtcatgaacaggatgaccgacggcatcaccaactatggagctctgccaggctctatatacgatcagcctccggaagaatcggaggcagtttttgttccgcccgaatttgcggggtcattttctactgactcgaaatacccgacttctcgcgactcgtcatcgccgaacagtggtgcacatgattctgcagcgacaccgaccatgagcgaaagcctcgcccagcgcagacgcgacatggtcgcacgctgcactgaggaagcgaaacgggcgggcaagaagctgcttttcggcatgaccacttccctcgctctgcaatccgtaccgattcccgccgattgcgacctcgactcggccaagctgcacactgtatccagcgttaagagcaagcggttccgtacacgccatgcaccactgcaaacgcatatttggaaacatgcggctaaagccgccaatgtggaaatgaaccaacacgtgtttgcgctggacctgtttcacgtatgggcccaacttgccccgtatgtttcttttgagtccctgattgtgctcggggatgccgtcattgctgctacgagcaaacagccagtattggccaaggatcgtgatgctgctgcaatctatcaggatctggtgaagttcgtggagcaatttacccgattcagagggcgcccgtcctgcgttcgagcattgcctctgatatcacctggtgctgattcgcccaaagaatcagaagaacgactctctctggtagcgcatgggattccacggccggttgcgaactatgtggtgccggacgcggcttttgcatctggagctcccataacgttggacttagcgtggccggagttcaaggtcgctgttgaatatgatggcgatcatcatcgtacgagtaaggctcaatggcgccgtgaccaagagaaaaggggtgtgctggtcgggcggagatggctggtcttcgtcgccacggcggcaagtatcgctaacgaggacgctcgtgctgaattcgctttcaacgtggcgagggcgcttgcttcgcgcggtgccgtattcgagtttcatgtagttgccatgtctcttgaagagttggcgcagagcctgctgtgaccatgatgttcgaaacggactgatgtaaaggcaatatttgtacgacctgttgttgtggtgtgtgcttgatattgcatgccgttcgattgcgatgcctcgtagtgatggatttcgtgaatgactagtgttcgattgtggagggaaatgtgtcatagtggtcgattgggggtgttgtcggtgcattgagcgtggatttgcgccaatgggtgtgggacgctacgcatgttttgccgatttttgcgtggcgtcccacggcccctcgggtaatggctgtgacgggtgtggcaggaatggcgtctttccggggtttccagtttgagtgtgtgggatgggggaaatgtaaaacgattgacttagctgttgtcccacgcttttgtgggatggcagctctggaatgggcaaattcgtcgtggcgtcccacaacgatgttaaaactcgaccatgatgcaagccgaccgaacgcttcggcggtcatctggccgctgtgaccccacaatgatgatgggaaactcggtcataatataggtagtcgaacgtttcgcggtcatctggccgtcctgccctgcagtgatgttgagaaaatgcagtcatggtgcatgaggagaaccgttgacctgcgtgtttcagtggtcgcgaactgcatatgcgctaaaaaaagctctgcagcggattgtatgaatccaatgcagagccttattggttgctgtgaacgcgactaacgcagcgatttcactcgctcagggccttgtcgaccacgacggtggcctcgtcgagcaccttgtccagagcctcgggggagacgaaggactcggcgtacaccttgtagatgttctcggtgccggaggggcgggcggcgaaccagttgtccttggtggtgaccttcagaccgccgatcttggcgtggttgcccggtgcctcggtcagcttggcggtgatgtcttcgccagccagggtggaggcggtcacgtcgtcgccggacagtgccgcgaacttggccttctgctccagtgtggtcggggtgtcgacgcgcttgtaccaagactcgccgaagcgctcgacctgctcctggtgaagctgggccgggttcttgccggtcttggcagtgatctcggcggccagcaggtcggggatcagaccatccttatcggtggtccacacgcggccatccttgcgcaggaagctcatgccggagctctcctcgccgccgaaggcgacttcgccgctgaacagcgggtccacgaaccacttgaagcccaccggcacttcgatgaccttcgcgttgatcgatgcggccacgcggtcgatcagggaagaggagaccagcgtcttgcccacggctgcgccctcaggccagcccggacggttgccgccgaacaggtactccacgcacacggcgatgtagtggttcgggttcatcacgccccagttcgggcagacgatgccgtgacggtcggcgtccgggtcggtgccgccgaccagatcgtacttgtcccaagcgccggcgttgagctcgtcgaccaggcccttcatggcgtacggggaagacgggtccatgcgaatcttgccgtcgtggtcgatggtcatgaagcgccaggtcgggtcgacctcaggacgcaccacgccgatgttcaggccgtacttctcgttgatgagcggccagtagttcacggaagcgccgccgagcggatcgatgcccagacgcacgccggagttgcggatcacgtcgaagtcgatgacgttctccaggtcgtccacgtagtgctcgcggaagtcgaagccctcgacgtactcggacttgatggcctcctcgtagggcacacgcttgatggacttgaagtcgccgagcagctcgttggcgcgagcggcgatggcgttggtggtctcggccggggccgggccgccggtgacggggtcgtacttaaagccaccgtcggtgggcgggttgtgggacggcgtgacgacgatgccgtcggcgaggccctcgccctcgaagcgctgggtgccgtcgaccgcacggttgtgggtcaggatggcctgggagaccaccggggtgggcacgaagtcgtcacgggagtcgacgcgcacgtgcacgccgttggcgacgagcacctcgatggcggtcttcttggccgggccggacagcgcgtgggtgtcggagccgaggtacagcgggccggtgacgccggccttcttgcggtattcggcgatggcctgggagatggcgatgatgtgggcctcgttgaacgaggtcttcagggacgatccgcggtgaccggaggtgccgaagatgacacgctgctcggggacttcgggatcggggacgaggtcatagtacttgccgataacctcatcgacattaatcagatctactggggtggcgggctgacccgcattgtttgctaccatgttccctattctgccacgtttttcgccactttgggtactcttatgttaagagttgtcaacttttgtgcgaatcgtgtgccggttgtctagcgcttggtcatttccttctcgatttcctccagcgacttgcccttggtctcgggtaccaagcgcagcacgaacgggatggacagggccgagaacacgccgaaaatcgcgaacgggccgcccacattgttgccgaacgcatcgagcagcacgaggaagaactgggagacgatgaagttgcccagccagttcgccgccgagccgaaggatgagccgatgccgcgcacgctcagcgggaagatctcgccgataagcacccaggcgatcgggccccacgagaccgcaaagccgaggatatagaaagcgatgagaatcatcgtcggcactgccagcacggccacgtcgcccacgaagttcatcacggcgagcaccgcgagcgaaacggtcatcacgatggaaccgaagatcagcatgcccttgcgcgggaaacgatccatgataagcgtggccacgatggtgctcacgaagttcaccacgccgatgcccaccgacacccagatcgcgtcgccttcagggaagccgaagcccttgatgaacacctgcggcaggaagtagatcaccgagttgatgcccacgagctgctggaacagcatgataccgatggcggccaccagcgccggacgagcgatacggaacagttcgcgcacaccacccttggtgtcctgtgcggccacggccttgatttcgtccagctcaatctgcacctgggtctgatccacgtccttgcgaatcagcgtaagcactttgaaggcgttgcgggtgtcgcccttgttcaccagataacgcggggattcgggcagcaacaggccgccgagcagcaacaaggcggccggcaccagcgccgaaccgagcatccagcgccagtcgcggatgccgaagaggttgtggttcaggaatccgaggttggaggcgtaggccagcagaatgccgaaggtgaccatgagctggaacagcgtggacagtgagccgcgacgctccttcggcgccagttcggccaagtacgccggggtcagggcggaggccgcgccgacggcgagacccaggatgatgcgggcgcacaccatcatcgcgaatccggtggaggaggcgcacaggcctgagccgagcaggaacagcagcgcggagacgatgagcagcttcttgcggccgaaccggtcagacagtgcgccgatcgacagcgcgcctgcgcacgagccgatcagcaccgaggaggtgatgaagccggtctgagagacgctcaggccgaagtccgattcgataagcggggaggcgccggagatgatgccggtgtcgaaaccgaacagcatgccgccgagcgcgccgaaggtgaagatgaatgcgctgttgagcgggaagcgcgtggagaagccgtgcgattcggcggcttcgaggtcctcgattgcgttggctgccgcgtttgtggccgcgcccgccactccggccacgccggtttcgatggtttcgattgcggtggccgccgcaccggttgcgctggtttcctgcgccgcggatgccgtctgtttcgatacgggtgatgccgttgtcgtcgtcattgccttgtcctttcgccgttgacggaccgcgcctgttgcgtggcccctctgccgcgtgcaaggtcaggcttcgattgtctgcagtcgcccgaaaacaaaaaaagacctggaacaacgtggaattcgcatatcacgatacgcaaattccacgtcgctccaggtcttgcctcgttttgagtaacaaccctgctacgcaacgtgtgtgaaagatagaatacgacttccgcagtcgcgacactccgaataggcagcaaaaaacgatgatttttgacaacgattgcaggattctgcatggtggaatgatgtcggaatgggcgctgcggcaaatacggagaacgggtgtggcgaagcatcatcgcggaacattatggcgggacaccatcgcggagcaccgtagcgcatagttgccgtttcgcgatgctttgccggcattgccgtgcttttggggcacccagcgctgataatggaacacagtggcatacggcagcaaggaggaaccgtggcgaacgcatcgaacgcaacgcctgcagtgattgcggcgcgcatcgtcgatgccgtcggcggccccgcgaacattaccagcctgacccattgcgccacgcgactgcacttcgaactggccgatgccggccatgtcaaccagcacggtcttgaatccatccccggagtcctcggtgcattcccgcgagccggcaatcgttatcaggtcatcatcggcggagcggtcgcctcggtgtacgagcagatcgttcggctgcggacggcgcgattgatgccggcagcgcaattgccatcggcagtgatgcagtcagcgtcgcagtcaacgcagcccactcagtcaacgcaacccactcagtcaatgcagcccactcagccagcgcagcccgcgcagtcagcgcaatccacacagcccacgcaacccgcgcagtccgcgccgtacctttccgacgatgccgcaccatcgcgcgatactgccaccgacgccgaacaaagttgcggcccatccaatacatcccgtcacttcacgcctcgtaccgtccgcgagtggggcagtgccgcccgcgcttgggctgccgcgtttttcgactacctgtctgactcgttccgcccgattctgggtgtactgctcggtgcctcgctggtcatcgccatcgtcaacgtgatcgttgcactcggcatcgtgcctgacggcgagacctccgccggctggatactactcaaggcgatttgggagggtgtgttcaccgttctgccgattatgatcgcctacaatgcggccaagaaactggacgtcgacccctggctcggcggcgcgattatggccgcgctgatgaccccgcagtttactggcgtgatgtccggaatgtccggaatgtccgggacgtccgtatccagcgccctctccggggcgattcaatgctcggccaacgccgtattcggcgccgaaacctgcaccgtgtcggcgttcggcataccgattcaactcaacgactacggcggcaacgtcttcgtgccgttgctcatggctgccgtgctcgccgtggtctaccacgggttgaagcgcgtcattcccgacagcgtacagctggtgttcgtgccgttcctctcactggtcgtcgtttttgcgctcaccatactggtcatcgggcctctgggaatatggctcggcggtgggctgggagcggccacagcatggcttaacgcgcacgtgccgttcctattcgcgctcatcatcccgatgctctacccgtttctcgtgccgctcggtctgcactggccgttgaatgccctgatgctgatgaacattcaggcgctcggctacgatttcgtccaaggtccgatgggtgtatggaactttgcctgcttcggtgccaccgctggcgtgctcgtgctggccgtacgcggcaaggattcggccatgcggcagaccgcggtgggggcgttgctcgcgggattgctgggtggcgtttcggaactgagcctgtacggcatccatctgcatcaccgccgcgtctaccgctggctgctcgccggctgcgcggccggcggcgtgaccagcgcggtgcttggctggctgttcccgtccgtgctgccatccggtcagatggtccggggcgtcacgactacggcgttcgccttctcctcgttgctgacgatttcggtgtttgacagaatgtgggtgtacgcgctgtccatcgccgttgcgtttgtaatggcgatggtgctgacggtgctgttcgggtaccgtacgccgccgcgcgccacggaggcgcagatggtctcggcgggcgagaacgtacgctcgcaggatgcggtgagagggattggcgcgacatcgtcggatgcggagtctgcggaagattccccatcgcggcctgcctccgatcggactcctgactccaacgccatcctgtcgccggtcgccggccggttgatgaatctggaagcgactggcgatccggtgttcgcctcccgcgcgctgggggagggtgtaggcgtcgtgccggagacggccggcgagacggccgtgctggcaccggtcagtggcacgctgaaaaccgtggcccggaccggccatgccttcggcattaaaaccgatgacggcatcgaagtgctggttcatgtcggcattgacaccgtcaatatggatggcgagggattcgtcgtggccgtgggcaaaggcgagcggatcgcggcgggagagccactggccaccgtggatttcggcaaagtcgcggcggccgggcacagcgttgtggtggtggtgacggtggtcaacgccgctgaactgaccgtggtcacgccgttgatcggcgacggtagcagcgacgacaacggcggcgactgcaaaaccgtatcagccggcagcccgatcatcgatgtggaacaatgacgttgcgaaaggatgccatggaaatactgcgagtgttcaacaacaacgtcgtgctcgccaaaggcggcgacggcggtgaggtgattctcaccggccgcggactggggttccaggccaagccggggcagacggtcgacgagtcgaaagttgtgcgcaccttcgtgccatcggacgggcgcgaccctgatcatctggcgcagatgctggcggacattccgcccgaaatcatccgcgtggtcgtcgaatccatgcaggagaccggactgggggagcgcgagaccggcagcaccacgctggtcatggccctgtcggaccacgtggcgaatgcggtggagcgggtgcggcgcggcatcgacatcacctacccgctgctcggcgaggtgagcaacctgtacccgcaggaatacgcgcaggggcgtgcgatgctcgcatcgctcaatgcacggctcgacgtcacgctgccggacggcgaggccaccgcgcttgccatgcatctggtcaacgccggcttcgccaccggcgacctgtcctatacgtacacgatgacgggcgtgatccagcaactgcttgacatcatcgaccacagctacggcatcacgttggaccgcagttccgtgaacgtgggccggttcatcacccacctgcgctacctgttcgtacgcatccaccagcaccagcaactgacggacgagccggcaccggtgatgaaggtgattcgtgagtcctaccccgctgcgctgcgatgcgcgcgaaccatcgcctccctgctcgaactgcgcctcgacacggatatcagcgacgacgaaatcgcttatttggcgatgcatgtcgcccgagtcaccggccacgcatcgtagtaacggattagcggattggcgaatcagcgaatcggctcgagtgtaccggtcatttcggcgaaattcgaggtggcatttgaagcagcggcctgcgcggtcttttccagcgcggaggcgtcgggcacgcgcacgatcagcgcgcggtgatccaccgagaaacggatgtggcgggtttccggcagcatgtcaccgtccacctgcgctttggccggcttttccaatgtgatttcggcactgacaccctggacctgttcgatggtcgagttcgtggacagcgggttctgttcgggcttgccgatgatcgtctggtgcaccacgtcgccgaacaggttggcccagccgaggatgccgccggtggtgtcgatgatttcgaagtccagcagaccatcgtcataggatgccgccggcatcagcgagaacatgggaatctggccgcagttgccggccatcaccgtgcggaaatcgagattcttgatggtgtgggtcgagccgtcggcgctggtgactgtcagcgtgccgcggaacttcggcgcgaacaggttcttcacgccgcccacgaagtaggcgagccagctgatgttcgccttgagctcggggttggtgtcgtcgatcatggccgcatcgaagccgatgccggcgatgatgaggaaggcgtggccgtggtcgtcctccgggtggtcgagcagggtgagacggcccatgtccaccaggcgggagccgtgggaggtggccacggtcagcgcggcgtcgatatcgtccacgggaacgcccatattgcgggcaaacaggttgccggtgccgatggggatgatgcccagcgcatggccggtgccggagacggcgctcgccaccgtgcgcaccgtgccgtcgccgccgaccgcgatcaccacgtcggcgccgtcctccagcgcctcaagcgcgcagaccctgccgtccttgtcaagctgggtgtcgtagaagcggatgcgattgagccccttggcctcgcagaacctctggatatgcagccggcgggcttcggcctgcggtttggacggattcacgatgaaggcgtactgcacctcgtcgtcccggcgcttctccagcgtctgagccagcttgcggcggcgctgcgcgcgcagggcgatgacgatgacggcgatgagcaccaccacaatggcgattgcggcgatgatcagaaacacggtgagggcaggctgaggcatggctcctattgttatcggtggggaggtcgtttgcggccatggtgcgccgtacgtgaacatttcctgcacgcaacagccccgtggggcgcgattatggttcaatcgcgtctcatctgacgaaattggccgggtggacccgtccgcggactttcccgggcttccctgtgatttccgcgtgactcccgcgcattcggccattgtcggtgtctgcttacgcggctagtctggtgcccatgcttgatattcaattcatccgtgaacacaccgatatcgtcaaggaatcccagcgcaagcgcggcgagtccgtggaactcgtcgacgaagtgctctcctccgacaccgcacgtcgtgaggcgctgaaggccttcgaagaggctcgcgcccagcagaaggaaatcggcaagaaggtcgcctccgccccggcggacgagaaggccaagctcatcgccgagaccaaggaactgtcccagaaggtctccgaatacaagtccaaggccgattccgccgccgaggaatacaccaccgccatgtggaagctctccaacatcgtggagcccgaagctcccgaaggcggcgaggacgactacgtggtcgtcaagaaggtcggccagattcgcgacttcgcggccgaaggcttcgagcccaaggaccacctgaccctcggcaccggcgtggccggcatcgacatgcgccgcggcgtcaaggtcggcggctcccgcttctacttcctgcgtggccaggtggcccgtatgcagatcgccatgctcaccatggccgtggaccaggccgaggagcacggcttcacgctggccatcaccccgacgctggtgcgccccgaggtcatgcgcggcaccggcttcctgaactcccacgccgacgagatctaccgtctgcgcgagcccgacgaccagtacctggtcggcacttccgaagtggcgctcgccggcatgcacgagaacgagatcctcgacctcggcaacggcccgctgcgctactgcggttggtcctcctgctaccgccgcgaggccggcgccgcaggcaaggacacttccggcatcatccgcgtccaccagttcgacaaggtggagatgttcgtctacgccaagcaggaggactcctacaaggagcacgagcacctgctggccatggagcaggagatgctcgccaaggtcgaagtgccctaccgcatcatcgacaccgcagccggcgacctcggctcctccgccgcccgcaagttcgactgcgaggcctgggtcccgacccagggccgctaccgcgagctcacctccacctcgaactgcaccgagtaccaggctcgccgtctgaacatccgcgagcgtatggaagatggcggcacccgtccggtctccacgctcaacggcacgctggccaccacccgttggctggtcgccatcatggagaaccaccagcagaaggacggctccatcgagattccgcaggccatgcgcgcctacatgggcggcaaggaagtcatcgagcccactaagtgggaggcctgagtctcatcgtgctttagctccctttaatgggggagctgtcagcgtagctgactgagggggagatcgctaatagccagcaggcgaatccaagaccgaccgcactgccgaatatcaacatccctcccttctgtataatgaatacttgcgcgtgtgaacgcgcatcaggacaggtgtctgagcggcctaaagagacggtcttgaaaaccgttgaggggcaaccctccgcgagttcgaatctcgccctgtccgcgaaccgaggcctgggcaacatgcccaggctctttttctttttctggaacctgtcttcttgatcgccaccggggtgctgatatattggtttgtgatgccgtaacatgcggtgtccccgttgatatgacgggccaatcggcgtgagccgataagaaaaggcccgacgtttgcggcatcgggcctttgcgttgattaccggcttgcgcctttaatcaacaaggttgcaagatgaatcatatcacgatgcacggtagtctgaccgtgaacgggcgcaccgtgatcgtccatgtgggcgatggcgaggcgaacgccacggttgacggcacgcacttcaacgtgcgtagcctgtggcagctctaccagttgctgagactgctcgtgtagcgtctcattaaggcgcggtgcccccccctagtcgggtatcgcgccggcaacctgaaaaccgataatgttggcaagtgcttgcaatttgtggtggacgattgcaagctgatgtcttggattgttgccgctatccaatatctcattaggtctaccggtggaccaaaagtacgttgctttgtaaggggagttaatgaaatgaacaaacccgcacaatcgagcatcgaatcggtttaatgccactcacctcaacgggacgcgcggtaattgttagctaagttgacaataaaagagcaaaggcctaaattagcaatcagtcatcacgctgaggtgatgatttcactaggaaggagtagagatatggtatcgcacaacaagcgcatcgtggctgctcttgccgcggtagcagcaatgggtattggtttggccggttgcggcggcagcgacactgccggcgacacgaagtccggcagcgatggcggtgtggtcaacatcacctatatgcatcgtctgcccgattccgaaggcatgaccttggtcaacgacattgtggccaagtggaacaaggagcacccgaacattcaggtcaaggccaccaagttcgatggcaatgccgccgacatgatcaagaagctcgagaccgacgtcaaggctggcaatgcgccggatctggctcaggtcggttactccgaggttcctgaggtcttcaccaagggccttctgcaggatgtcaccgatgaggccgccaagtacaaggacgatttcgcttccggcccgttcgcactgatgcaggtggacggcaagacctacggtctgccgcaggacaccggcccgctgacttacttctacaacgccgctgaatttgagaagctcggcatcaccgtgccgaagaccgctgacgagctcattgagaccgccaagaagaccgctgcccaaggcaagtacatcatgaccttccaacctgatgaggccatgatgatgatgtccggccaggccggcgcttccggtccgtggtacaaggtcgacggcaactcctgggttgtcaacacccagactaagggctccaaggccgtggccgatgtctaccagcagctgatcgacaacaaggccgccctcaccaacccgcgttgggatgcatcgtttgataactccatccagtccggtcagctgatcggcaccgtggccgccgcttgggaagccccactgttcatcgattccgccggtggcactggtgctggtgagtggaaggtcacccagctcggtgactggttcggcaatggcaccaagaccggcgccgatggtggttccggtgtggccgtgctcaagggttccaagcacccggccgaagccatggagttccttgactggttcaacacccaggttgatgaccttgtctcccagggccttgtcgtggccgccaccaccgcggatgccaagaccccgcagaagtggtccgactacttcagcggacaggatgtcatggctgagttcaagaccgcgaacgacaacatgggtgacttcacctacatgcctggcttctccgcagtcggcgctgcaatgaaacagaccgccgccaaggctgccgatggttctgccaaggtttcggatgtgttcgacaccgctcagaagacctcggtggatacgctgaagaacctcggtctgtccgtcaaggagtgacctcactaggtcttgtcaacgggccggcttgaaatagccggccgtccaagacctccgatgcctcgcatcaccatagcgaaaggccggggcacatactccggccttccgtattgtttgggggtattgctgcaggggcgctgtggcccttgtcatttgttttactgttctttgcgaagacaggttttgtattatgactgcatccactactcaggcgaagggcaaagcacctaggcgtgccgccgccaagccgaagcggtccggcgctcagaagcgcgagaaccgcaccggctgggcgttcatggcaccgttcgccgtcctgttcactttcgtgttcatcttgcccatcatctgggccatctattccagcttcttccgtcaggtcaccgagggcggtggcgcatacggcggtggcgagctggtcaataaattcgtaggattccagaacttccagtatgctattacttccggcaacttctggtccggcgtcggcagggtgctgctctacaccctgattcaggtgccgatcatgatcatcgccgcactggcgttggccatcgtcatcgactcgttcgtggtcaagcatgtcaccggtttccgtctgggctacttcctgccctacgccatccccggcgtcgtggcctcgattatctgggtctacctgtacaacggccaaatctcgccgatcgtcaagggacttgccgccatcggcgtcaatgtggacttcttcaacaagaacatcgtgctcggctcgatggccaacatcaccacatggaccttcaccggctacaacatgctgattttccttgccgcactgcaggccatcccgcatgacctctatgaggccgcccgtatcgacggcgccaatggttggcagattgccacgaagatcaagctgccgaacgtgcgtggcgcggccctgctggccatgctgctttccatcgttggcaccattcagctgttcaacgaaccgcagatcatgtctacggctgatccgggtatttccaagtcgtatacaccgatgatgatggccatgaacacttctcagggcaccattaccccgtctggtgacggtccggcctcggccatcgccattgtcatggctctgatcgcaggtgtgcttgccgtgctgtacaccttggccgaaaggaaggtgaacgagtaatgagttccgcaaccgttgaagaacgcgcccgcaaaaaggccgagcgcaagctcgaaaagcagcgtcaggctgcgcaacacgatttgcctcgctccatgcgaccgtccgcggccgtgaagaccctcaccgtggtgctgctggtactggtgttgatctacttcctgttcccgatttactgggccatcatcgcgtccaccaagacgccggcccagatgaccggtagcaacggcatgtggtttgctgtgccgcttgaccagctgcccaatgccatcgccactaactattccaagctgcttggctggactcgtggcaacttctggcgctgggtgctgaactccctgatctactcgggtgtctcggcattgatcggcaccatcgtgtctgtgatggctggctacgccaccgcaaaattcaacttccgcggcaagaacgcggccatcggcatcattatggcctgcatgctcatgccgtccgccctgctgaccatcccgatgtactcgatcttccacacgttgcacctgaccaacactatgctctcgatcatcatcccgtgctgcgtttcgccgttcggcttcttcctgggccgcacgtacgcacagagttcggtgccggacgaactgcttgaagccgcccgcatcgacggcgcgagcgaggcgaggatcttcttcaccatcgtgctgaggctcctggccccggccatggtgacgattttcctgttcctgttcgtggccacgtggaacaacttcctgctgccgttgatgatggtgtcttccgacaccttgaagcccgtgaccctcggtctgtacggcatggtctcgctggccacgttcaccgatcgcggcgccctgatgatgggtgcgttgctcggcgtgctgcccgtgatcgtgctgttcctcggcctccagcgctactggcagtccggcctcgccgccggtgccgtcaagggctaaccaatccgctgcccggcatgtcgtgtcactccttccggtgccgggcaacgtccctcccatattcagtgacacgattccaatcgtccggcgtcaccgtaagcgtcaaggatctacgcagtcagggtcccagggcccgcgatgacgccggtcattttgtatgcgacgaattcgtcgctttgtagttttttgatgaccaaccccacaaaggagcactcatgaccagcaccggccgcttcacgctgcccagtgaagagaattttgccgaaaagaccaaggaactcgccgaattgtggggtgcggacgccatccgcaactccgacggcacgcatctggacgaggcagtgctcgctcttggcaagaaagtctacagcgcctacttcccgacccgcgcccacaacgagtggatcaccctgcacatggacgagaccccgcaggtctacctgctgaccgcccgtatcctggccgagtccaacgcggtggatgtgccgctgatggacggtttcttcgaggaacagctcaagcctaaccgtgacgccgaccctcataagtactgggaagtcgtggaccgcaccacgggcgaggtcgtggacccgtccggctggacgctcgacccgggcgaggacaccgtgcacgtgaccgctgccgtgccgatgcacgaatacacggtgagtttcctggcctacatcatctgggacccggtcgagatgtacaaccacctgaccaatgattggggagacaaggaacacgagattccgttcgacatctaccatccggccacccgcaagttcgtgttcgatacgttcgagcagtggctgaaggacagcccgcaggtggatgtggtgcgtttcaccacgttcttctaccagttcacgctcctgttcgatgccaagcgtcgcgaaaaggtggtcgactggttcggttgcgcctgcaccgtgagcccgcgcgcattggacgatttcgagaaggagtacggttaccgtctgcgtccggaggatttcgtggatggcggtgcctacaactccgcgtggcgcgtgccccgcaaggcgcaacgcgactggattgacttcctctccggattcgtgcgcgagaacgtcaagcggcttgccgacatgtcgcacgcggcaggcaaggaagccatgatgttccttggcgaccagtggatcggtaccgaaccgtataaggacgggttcgaaaagctgggtttggatgcggtcgtcggctccatcggagacggcaccaccacccgcatgatcgcggacattccgggcgtcaaatacacggaaggacgcttcctgccgtacttcttccccgacacgttctacgagggcaacgacccgagcatcgaaggcctcgacaactggcgtaaggcccgccgcgcgatcctgcgttcgccgatcggccgtatgggctacggtggctacctctccttggccgccaagttcccgaagttcgtggacacggtgacccatatcgccgacgaattccgcgacatccacgaccgcaccggtggggtggccgccgaaggcgagctcaacgtggcgattctgaattcctggggcaagatgcgttcctggatggcgttcaccgtggcacacgccctgcccaacaagcagacctactcctactacggcattctggaatccctgtccggcatgcgcgtgaacgtgcggttcatcagcttcgacgacgtactcgcgcatggcatcgatagtgatatcgacgtaatcatcaacggcggcccggtcgacaccgcattcaccggcggcgacgtgtggaccaacccgaagctcgtggaaaccgtgcgcgcctgggtgcgtggtggcggcgcgttcgtgggcgtgggcgagccgagctcggcaccgcgcttccaagcgggccggttcttccagctggccgacgtgattggcgtggacgaggagcgctatcagaccctctccgtggacaagtacttcccaccggtggtgccggaccacttcatcaccgccgatgtgccggtcgacccggcggcccgcgaggcttgggaacaggccggctaccgcatcccgctgagcggttgcggcggtggccagtccatcaagccgttgggcggcatcgacttcggcgaacccgtgctcaacacgtatccggtcaatgaaaacgtgaccctgctgcgcgcggacggcgggcaggtgcagctcgcgaccaatgattatggcgaaggccgcggtgtgtacatctccggtctgccctattcggcggccaacgcccgactgctggaacgcgtgctgttctacgcctcccacaacgaagacaagtatgcggcttggagctcgtccaacccggagtgcgaggtggcgcacttccccgagcaagggttgtactgcgtaatcaacaacaccgatcagccgcagcggaccacggtgactctggccgatggcaccaccgaggacttcgacctgcccgacagcggcatcgcatggcgtgaagcctgattcccgcgttttggagaacggacccatcatgaccgaaagcaatgaagttttattcggcatcgcctcgcattttgcgctggaaggtgccgtgaccggcatcgaaccttacggagacggccatatcaacaccacctatctggtgaccacggacggcccccgctacatcctccaacagatgaacaccagcatcttccccgatacggtgaatctgatgcgcaatgtcgaactggtcacctccactctcaaggctcagggcaaagagacgctggacattgtgcccaccacctccggcgccacctgggccgagatcgatggcggcgcatggcgcgtctacaagttcatcgaacacaccgtgtcgtacaacctcgtgccgaacccggacgtgttccgcgaggccggcagcgcattcggcgacttccagaacttcctgtccgaattcgacgccagccagctgaccgaaaccatcgcccgcttccacgacaccccgcatcgtttcgaggacttcaaggccgccctcgccgcggacaagctcggccgcgccgccgcatgccagccggaaatcgacttctatctgagccacgccgaccagtatgccgtcgtgatggatgggctcagggacggttcgattccgttgcgcgtgacccacaacgacaccaagctcaacaacatcctcatggacgccaccaccggcaaggcgcgtgcgatcatcgatctcgacaccatcatgcccggctccatgctgttcgacttcggcgattccatacgctttggtgcgtccactgctctggaagacgaaaaggacctcagcaaggtgcatttcagcaccgagctgttccgtgcctacacggaaggattcgtgggcgaactacgtggcagcatcaccgcgcgcgaggccgaactgctgccgttcagcggcaacctgctcaccatggaatgcggcatgcgctttctcgccgactacttggaaggcgatatctactttgccaccaagtaccccgagcacaatctggtgcgcacccgcacccagatcaaactcgtgcaggagatggagcagaaggccagtgaaacccacgccatcgtagccgacatcatggaggctgccaagtgagccgtcagtcgaaccatacccgaaccagcatgatgggggccgagcaatgagcgatcagctgaccgaggtatacgccagcatcgacgccctagtcgattacgccttggatcatctcgacctcgatccacgcaacgcagactggacccgcaaccaaatcttcgccctcttccacctggattcctaccccggacccaaaaccacaacgtcggcggcgtcagtgtcagacgcagtccaagacattgtcggcagccgaagccaggccccctctgacgaaaagacccccgaccccctactcgccgccttccgcgccgccgccacaaccgccggcctcttcgatccggaggaaggcccggcctacgccgacaccatcatgggcatcctctccgccaaccccgccgatctcgacgaccggttcctgctcatcgagcacagggacggcggcatggccgccatgcaatggttctacgactactgtgtggccaacaattatgtcaagcgtgcccagctcgaccggaacccgcgcttcgactcgcacgggctgacggtgaccatcaacctcgccaaacccgaattcaagaacatgaagaaggcggcggccggcaacgccgtgtccggcggctacccgaagtgcacgatctgccatgagaacgagggcttcgccggacgtgacaagcgcacgctgcgcaccctgccggtcacgctcggcggtgagtcatggttctggcagttctcgccctacggctacttcgaccagcacggcatctgcgtgaacaccgaccacacgccgatgcatgtggaccgcgacaccttcggccatctgctcgacttcgtggaccgcttccccggatacttcctcggatgcaacgccgcgctgcctcgcatcggcggctcggtgctcgcccacgaccactaccagggcggcggcgaactgctgccgatgcacaaggccgccacttgggccgccttcacgctcgccgactatccggacgccgtggtcgaaatcctcgactggcccggtaccgccgtgcgtgtggtgtcgaaaaaccgccagagcatcatcgacgtatccgacatcatccgcgaggcatgggtcggttatgacgacgcggcgaacggcatcgccagccatgacgcggacggcaaccgccaatccgccctctcgcccagcgcgatcatcaccgaacgtggctatgagatgagtctcatcttccgcaacaatgcgatcagcgacgagtacccggaaggtattttccatgcacaccccgaatactggccggtcaagcaggagccgattggactgatcgaagcccaaggcctgttcatcctgcccggacggctcgtcgaccagctcggcatcgtcgaggaggcgctcgccgaaggccgcgatttgcccgatgaagtcagcgaattcagtctcgaatggggcgaactcgctgaaacattggccggaaaccgcgaccgcgaggccatccaccaagccgtacgtgacgagctcggcagcgtctgctaccgcatcctcggcaacacggccgtcttcaagcagaaagccaccacgcaaacattcctcgaaagtcttggttttgccgctaggtgaaacaggtcaagtgaagtaagctcaatactgaaggaaaaccgaaggcaagtccttccaaaggaggagatatgactactgttctggttacgggcggtgctggattcatcgccacccacaccgacatcgaactgctcgacaagggctacgacgttatttccgtagataactacggcaactcgtctcccgtggcgcttgagcgcgtcgagcagatcaccggcaagccggtcaagcgttacgacggtgacgtgcgcgatgaggcgcttatggaacgcgtcttcaccgaaaacaacatcgattgggtcattcacttcgccggcctcaaggccgtgggcgagtccgtggccaagccgatcgaatactacgacaacaacctgtactccacgcttgtgctgctcaaggtgatgaagaagcacaacgtcaagaagatcatcttctcctcctccgccaccgtgtacggcacgccgaaggaactgccgattaccgaggagacgccgaccggcggcaccaccaacccgtacggcacctccaagctgttccaggagcagattctgcgcgacgtacatgtggccgatccgtcctggaccatcgtgctgctgcgctacttcaacccggtcggcgcacacgagtccggcctgctgggcgaagatccgaagggtattccggcgaacctcaccccgtacgtggccaaggtcgcggtcggcgagctcaaggaagtccaggtctacggcgacgactacgacacgcccgacggcactggtgtgcgtgactacatccacgtggtcgacctggccaagggtcacgtggccgtcattgaccacatcgacaaggaaggcgtgttcgtctacaacctgggtaccggccacggctactccgtgcttgaggtcatcaaggcttacgagaaggccgccggtcatccgattccgtacacgatcaagccgcgtcgccccggtgacatcgccgcctgctacgccgacgcttccaaggcggagaaggagcttggctggaaggccgagctgaccatcgacgacatggccgcctcctccctcaactggcagaccaagaaccccaacggtttccgcgacgccgagtgatatgagcagatgagctccctctgatgggggagctcatctgtcgtttatcacacaatgcgcctatcggcggcccagcgggtgagctcggtgcgattcgaaagctgaagctttcgcagcaccgagctcacgtgcgtttcgaccgtcttgatcgaaatgaacagttcggccgccacctctttatacgtgtatccgcgtgcgatcagccgcatgacctcctgctcgcgggcggacagccggtccagctcctcatcatgagcccgtgccgcaccatcagcgccgccatcagaccccgccgccggcacaccctgaaaggccgaaagcacaaaaccggctagttttggcgagaacacggcatagccctcatgcacctgcttgatggatgaaatcaaatcagcgccggtaatcgtcttggtcacatagccctgggcgccggcgcgaatcaccgcccccacatcctgcggcgcatccgaaaccgacaatgccagaaacacggtagtgggggagtagggccgcgatttggcgaggatctcggcaccgccgccaccttcaccgccgggcacgtgcacatccagcaacaccacctgcggcttggtctgtgcgatcatcgccaccgaaccgggcacgtccgccgcttggccgacgatatcgaaggaatcgcgcaatgtggcgattacgcccgcacggaacatctcatggtcatcgaccacggccacacgaatcttggctgtctcattctcgctcatcgatgttctccctgcgccgctttcagcgcgattggcatatgcattctgacctcggtgccccagccggccctggacactatctccactgtaccgccgcgccgtttgatgcggccgataatcgattcgcggatgcccagccggtcgggcggaatggcgtccatatcgaagccttcgccatggtcgcgcacgaacacttcaaccatcgtgtcgctggcctcgcaatacaaagacaccggctcgccgccatgcgtgaccgcattgaccaacgcctgacgggtggcgtccagcagcgcatcggtctgggcgctcggccgcgcgtcgcccacggtgaccacctcaatcggtttgccgtgctcgtcctccacctcggcggcgatctgcttcaatccggctcccaccgaacgatccgatgtggaacgttcctgatacagccattcgcgcagctcgcgctcttggctacgcgccagggcgaatacggtggtcggttcctcggagtgcagctgaatcagcgccaacgtttgcagcacgccatcatgcagatgggcggtcatgtccgcgcgctcctcttcgcgctccttcaatgcctgctcgtgggtgagtcgttgcagcatcgcgttcgcccacggcatcaccgccaccacgataccgacgatcatcacgaatccgctggcaacaatgcgtcgaggagagctgccccacccaggaatgctgacattatgcacatacaatgcccatcccatgaaaatcagtgcgatgccgcccaacatagacaacagctgcgtgcctcgcggactaagattcatccatgccagtgcgatgccgcccaaccctaccagcagcggaagcacaatctgggcatccgcaccggtgctggtgagcagcagtccggtggccatcaacgcgaaaccggccaatgccacaacggccggtttcggagcacgttggatggcctcggacaatgattccggtgcggcagccgattcgtcgtcatgagcggcaagtggctgattgcctcgcgcaagcggcgcctgatcaacgggcactgtgcgagccgcagccgccaccgggtctccggcgggcatgaacacccacaggaatacataagcgatgatgcctgcgccgtagaggaaggtcagagcgatgaacgcaatccgaacccatgtcacgccgatgcccaagtgcagggcgatgcccttgcacacgccggtgagccagcggccctgccgggggcgcatcagcggcatgcgcgcgggcagcaatggttcgggagatgacgtcatactcctattgtgccgcgctcagggcgttgcggccggggttttacccggtgttcagggaacaatcagggtgttccccgagcgttgtggcagtggtcgggcggtgtaatggaatcatgagcaatccaaacgcgaatccgtatcagccacagccgcagcctggtccgcaaaaaaacaagacatcgcgacgcttcttcacttgggtgcgatccagtggactggttcgcggcgacgaccggtggatcggtggcgtatgcagcggcatcgctttacggcttggctggagccccacattagtacgtgcgttggtgattgtatgtacattgttcttcggttttggcgcagctctgtacgcactcggctggtttctgatgccggatgtacgcgatgggcacatcttggccgaggacctcattgccggccaatgggactggaattgccttggatgcttcctgttcctagccgtggcaatcgtgattccaggtgcggggtgggtttgtattgcgctcgccgccttagcgctatggttgttggccaaaagcggcattcgccagcaggaagggtacggattcggggcatctgcgccgcgaccggtttcacagcctgtgtcgtatccagctccacagcctgcctcatatccagccgcgcaaccggtccctctatctcctttgtattcagctccgcaacctgtttcacaatctgtttcacgaaccgcgcctagtgtttcacaacctgtttcacagcctgtctatcagtcgatgcccagcgtgatgccgggcacagtgcccggcgtgatgcccggcacagtacccaacgggccgtttgcccccgaccgtatgaatgcgacggcttatgcccccaccgagtccaagcgccgcaagccggcgggcccaatcgtggtcttgagcatactgggccttaccttcctctcctttgccggtctgatgggactgatttgggtaaacgacatgggcattatcggcattatgcgtctgagcaccatctggattgccgcagtatgcatagtgatggggctggtggtcatcattctcggattcagagggcggcgtaccggtggtctgattcctctcggactggttgccggtggatgcgcgctctgcatgaccatcgtttcaggcacgtatggcgtgcactaccgtgatcttggtgccagcggcatcaatactgttgtttcactgaggcaatctatcagcgcgagaaacagcgacggcatgaacgatgtgcaaaaggatggcatcttcgttgccgatgccagtgatgccacgttcgaaacattgcagcaaggtgtggcgttcaacggtgaaaactacaacaccgatcaggcaatcattgattggtccgattgggacaagacacatggaccgcacacagtgaagatgctggatggcaaaacctccatcagtaattgcccggtcggtaccatcaccatagccgcaacacaggcgcaagtgcatatcgttctgccggattcctgcacttacgccttcggcaccgccgactcctactccacttcgagtgacgtcggcggcaaatacgagatggtatacaacaactacatgggtctaagctttgttttcttcggagctgaaagcgccaccaatcccatgaatgggcctgattacgaatggttggataagggatccgccatgccggacaacggcccagaattaaaaatcaatattccctatgcagtggaagcacgtgtcaacgtggtgtacgcctccgattggaaaggctccacgttccagccgcttgccgatatatacgacggcaacagcacaagcaagaacacaaccgggcaatcggaatgatcaagccgttacaaccaggagatggaatcatgactgatgaaaccaaggaattcgcctccatcgaggatgcgacaccgaccacggccataccttccgaaaccgacgagaccaccgagaccacaaccatggtgaccgtcgatgaccgaaccgataccacggtgctgccatccgtagcggatgatgacaaaacggctgtgctacccgtccccgacgatcatgcggatgcgccggtctcggatgtggatacgcaggcaacagctgcctctccatcgcccatcgaaccaaccacagatcggattgccctggaaacagttgccgatgccgtggagggggatggcgggccgattccatctgccgatgatgtaccgatgtacgcagcatcttcagcacaaccttcctatgagcagtctcagcccgccggcaaaccacgccaaactgaggggatcgccaagaacgtccagaatgctaaggatgtcaagagtgccaagaacatccagaaacagagcaccagcgcgcctactgtggtattcggactattaggcgtgattatcggcgtgatcgcgctggttttcgggtacatatctccggatcggatgatttcgctgttctcgccgaatccgcaattgctgacggctattatctgcgccgtagtgggacttattctggtaatagtggccgttgtatgggccatagtcggtgccgtcaagaagagaaaatagcgttacaaccattgcattacggtcccagtagaagcacattatgacgggagccgaccgataagagccgaccgttctatgctgatggggggaggcatagtaactatgaaacggatttcggcgcggcgggtagcgagcgtcatcgccaccgcgatggcgatgacgctggtattcgccgcacttggctgggcgatgatgccgcaatggaacacacggccctacaccaagcacatcgctatcgcttctgccgacaccaccatcacccctgcccatgcgaacattccccacgaggggcgatatcgtacgcgtgaaacccgactatccatcaagaccggcgacggcgtcacgctacccgccgtactacgtgaaccggtcgacgctcccgggccacgcccggcttgtctgttcattcacgggtccggtaccagcggtgccgaggatttcggcgatatcgccaacgccatggcctctgccggcatcgtgaccttggtgccggccaagcgcaacgacaactacaccgtgctgcatcgcgactacccgcgttttgctcgcgaatacgggcgttcgctcgacgtgctgcgtggcataagcggcgtggaccccgccaaaaccggcatctacgccgaatccgaaggcacctggatcgccacgattctaacctcgaaacggcaagacattgcctttgccatacttacatccgcaccggtgttcaatggacgtgagcaaatggccatggctgtcagcgcctatacgcatgaggccggcgcgcccaagcccgtggtcaaagacatggccaaattgatgtcgctggactacgcgccattcgatctggcctatgccgactttgatgccgaccggtatctgaaatccctcaccatgccggtgctggtgaactacggcacctacgatacggccatgcccatcgaacagggggcgcagcggatcatcgccacggccaacaagtccggcaacgagaacgtcaccgtacgctattttgccggcaaccatcagatgcgggctggtgagggcttattcaccccgaacctgccattggccgaaggctatacgcaagcgctggaaaattgggtgaacggtgtgactgccggaaccaaagccgatggatgggcaacgccccaagtcgccggtgcgacacctcaccagcgcttcgccgcgccgcaacgtaccagatccggtatcgtcggctcgctcggcgtgctggccggtctgatggtggcagggcccgtgctgatcgtgatggcggcgatattaggtattggcttgactgtgttttcttggctacagacgttgctggccgggcgacgtagtgtggcgactgtgcgggccatgcatgcgacgccgagtgggctgggagccgcccaacagcgtacgttgcacggcattgccggcttatctgccggtatcggcacagcggtaatggtgattaccgtgctgttgtatggctatatgagcgccgtaggcgtatcggctgtattggttatgcctcaaccgcagttgttttcccttgggtggagggcattgcaggtgctgaccgtgctgttggtcgtgctgttcgcgtgggaactggaacgtatgtggcggtatcgcgccagcattatcggcgtgcgtcgtgtcatttgcgtgatggtgacactggctgcacttgtcacattgacgatattgtctttctgggggttgttcagtctgtgatattcacggtcgttaccggctccttcccgaatatgtgccactgagtcgccgtgagcgtcacaaattcgggaaggtggatggggcgtgacggcgtggaggcactgtcgtcagcgctgagcggcttcagcctcatccaaagtgtcgaaaccgccgagctggactgtgtgcaacaaggtttcctcagtgatattgcgttgcgggctggctgcggcgcgctcgctaatcatcacctcgtagagctggaaggtccgttcggaatacgtaccaagctcgccgcgcagataggtttcgaatgaggtggcagatggtgtgtcttcggtggtggtgagtacgcgcatcgcctcgccgagcttggggtagcgctcgcggaaatccttggcccaggcgacctgctgggcgatgacctgttcctgacgggccacgcgctcttcagagggacgcggaatatacggctctatgttcttcgtgaaatcttccggcgcggtggaggccatcatgcggccgtatttttcggtcacgaggttgcggcccacgtggtcggccgcgtcaagatcagcggcatagctggtgagtaatggccgctcccatgtgaggaactgggccagccgcatctggtggaacaccggccagttgccttggcatgccgcgcgtccaccctcattgttggtgcgctggaactgatcccattcatggcgcacaatagcctcgcgcagttcatcatcagtcagttcgttggtcatcgacgttcctttcactaatatctccctctgatgagggagatggcacggcgaagccgtgacagagggagcttgaatctacaaacttttaagcaccggatcatcagaggcgatgtggtcctcgacatacgggcgctgccattcgaggaaggtctcgccggacgtggtcaggtgttcgcgtttgagttccctgacgatatccgccgcaatctgctccacaacatcgttgattttctcgattgctggagccgcgcccttgccgccttcgccgaatccggcccctccatagcaggctgccgaactcaatcgcatcacggtttccaactgttcgcccacgttcggcaacagcgcgaacatcgagccagacagcttgcgcaatgctgcgaactgccacttgtaatacggcatatagcccaccaccatcggcacgttaac

SEQ ID NO: 2157 - DNA, 2619 bp, Unknown
  R51_24m  MAG No. k141_12012
cgtggtgatctgacgcggaatcggccgcaagggattcaccagctgctggaattgatcgacgatatgcccctcccgcacgcgcacggcaccgatttccgtgatggcgcaactgttcgggtaaaagccggtggtctccagatccagcgccacataatcggtgggaaagagggcatcgtccatgtcgattcgcccgccggcaccatgattgggctgggatggttggccgaaaacggtaatgccggaagtggtcacggaggctcctcatatcagtcggtgttcggtgacttattgtaccggcagcccggtctgacggtaaaatttttccctcccggattttctcggatatattggttaggcggccggcaacatgcggcgcatcgggaagggagcacagctgatgaaacagatagtggcaggcatcgtggcgcatgtggacgcgggcaagaccacgctgtccgaggcgctgctctaccgtaccggtgagatccgcaaattggggcgagcggatcacggcgatgcgtttctggacaccaattccttggagaaggcgcgaggcatcacgattttcgcgcaccaggcattggtagaacacggcgacctgcgcctgaccttgctggatacgccggggcacgtggacttcgcagccgaaaccgaacgtgtgctgcgtgtgcttgactacgcgattcttgtggtctccggcacggatggcgtgcaaggccataccgagacactatggcgtctgctggccagatacggtgtgccgacgttcatcttcgtcaacaagtgcgacgccgccggatttgcccgcgaggccgtgttggctcagttgcgcaggcgtctgagcgatgcgatatatccgttgccggcaatgggacagtccactgagggcagcgcgctaccgttggacgcgttcgccgaagacatcgccaccctggacgaggaggcgatgaacgactatttggaacatggcgcgctgtccgtgggcagattgcgatcgatgatcgccgtacgcgagctgttccccgtatatttcggctcggcattgaaactcgaaggggtcaaggaattcctggacgggctggagacgttcacccgcgaacgtgaatggccggccgccttcgccgcacgcgtgttcaagatcgcccacgacggtcagcacaaccgtatgacgtggctgcgcgtcaccggcggtgcgctcaaagccaaggagatcgtctcctcctcgtgcgccgcggcgtcgacaccgtcgccagcgcaggaggatgatgacatggcgtggtccgagaaagtcgatcaggtgcgcatctacaatggcgccaaattcgagacggtcaccgaagtgccggccggcttggtatgcgcggtgaccgggctgacgcagaccttccccggcgaagggctgggaacggaaccggacgccgaatcgccgtcgttgcaacccgtgttgacctacacggtgttgcccgccggagcggaatccgatacggccggcacctcgggagcggccaaacgtgggggagccggccatgacagcgcgaatcaggacgatgccgagcatgatgccgccaagtcgggaaccggccgcaatgaggagaacgacaccgccggccagaccgcggcggacaatagctcgccggcccgtccccagttcgatgatctgaccttgcacaaggtcatcaccgcattgcgtgagctggaagacgaagacccgttgttgcatgtggtgtgggtggaacggctggccgagattcatgtgcaattgatgggcgcggtccagctggaaatcatccagcagaccctgcacgaccggttcggtctggatgtgtcctttggccccggctccatcctgtaccgtgagaccatcactgcgccgatcgaaggcgcaggtcatttcgagccgctccgtcattatgccgaagcacatatcctgctggaaccaggggagccgggcagcggagtcactgtggcctcggccctgtccgaaaatgatttggaccgcaattggcaacggctgattctgacccacctgaccgagcgtgagcatctcggtgtgctcgttggcgcaccgctcaccgatatcaagatgactttggtggccggccgcgcgcatctgaagcacaccgaaggcggcgacttccgtcaagccacgtaccgggcgattcgccaagggctgatggaagccagggcaggagtcagtggccggcccgagacgccggtcgagagccggccggacaccacaggggagggcaactgccgactgctggaaccgtggtaccggttccggctcgaagtgcccgcagacatgatcggccgtgctatgagcgacatccagcgcatggccggcagcttcgaatccccggtcaccgatgacgaatacgccgtgatcgaaggcgaggcgccggtgtccgaaatgcgcgactatgcgatggacgtgaaccagtacacgcacggccatggccgtttctccgccaccttcggcggctacaagccatgccatgacgccgaacaggtcatcgcagccgccgcctacgatcccgaagccgatctggacaacacccccgactcggtcttctgcgcccacggtgccggctaccccgtcaaatggtacaaagtccccga

SEQ ID NO: 2158 - DNA, 4175 bp, Unknown
  R51_24m  MAG No. k141_12092
ccgtccgcgtagacgagtggaatccagtggttgcgtgggttcgcggatttgatggcggtgccgtcggcacgatagacaagtccctcggattggaatccggggccgcggtgatcgagccagccgaggtctaccatgagttcgacttttcgtcctttgaccgccgccatgtcgatgtggccgttcacctcgaaccatgtggtgccccatgtggtgccccagactccgggaacgcggaaaggttcgaagggcacttggccgttgcgcactttggctagaaattcgctggagggcaccggttcgccgggattgtggaacgaacgcaaggtgcatgcggcgagtgtggtgtggatatgcggtttgacgcgctgctgcatgacgcggtcgcagcgctccaactgctgattgggcagaagaaacatggagagttcaactcctttgctgtgtctggtggtaggggtgggagtgatggtaattggagaaaccgtaatacgacatacttctgtcccctcatggtacaaggaggcagaagcgtcaggcgagaattcagcgcgtgacgcgcagggtggcgagctggaacgggccgaagtgcagtgtggcgccttcggcgttctgtgtgccgtcttgcagcgcgaccggcaggtcggcggccaaatcgtcgccttccaacacgttggtctcatgcaccgaagcgcctgcgagcgccgggcagacgtgcagcgtggcatcggccctgccgccggccgcctcataggcacgcacaatcaggtctccggagccatcgtcggccagctttatccagtccaacaccacggtgccgtttgctgactcgatcgaggcgagcggcgctaagtcgggcatgtcatgaagcgtcggtgcgttgagtgcgcaagcggcgtcaagcgcacggcccaccgtggcgttggccaccacggaccagtcgaactcgtgcgagccgatatcggtgcgcgggtcggggaaggtcggcgcggagagcagcgacagtcggaacatggtgcccgagtcacgaccttcggcggcgttcccggcgatcggtgaggcatcggacccgtacaccgatccgttgatgacggccgccgcgtaaccggcgtcgccgataagggtgaagcggttcgtgctgctctcatacttggcttcgtcggatgcggtgtttttgacgattgggcggcggaccagaccatactggcagtcgtatgtcgcttggtcggccacgatgcccagcggcaaggcgaccttgaggaaacgttcgcgctcatgccagtcgatatcggcatggaaatcaagcgtgtgcgaacccgggcgcagcgtgatggtggtggtgatgacggtgtcatcgtcggcggtacgcacgcgaactcgtgccgcaccgttttcggtatcgaccgattcgattgatccggtcatggcattcgccatgagcagggattcgcgttcgatctcccacgcatcccaaacggcgggttcgtccctcaacagttcgtattggcccaatcgggtgccggccggaaccagttcacggccatgctcctcgtcaagcagcgacgagatcgtaccgtcggcctcgatggtgacggacagtacgccgttggccagcagtacacggccgttgtccaatgtctgggtcagtacggaaagcgcgtcggtcggttcgttgatgcggctggcacgccaagacacgccgtcattacggaactggctgatgcgggcttcggcgagcaggtcggcctgcgggttggccttgcgcagcacggcgcacatgtcttgggcgatttcggcgagacgcttcaggtcgcggcgatagtcctcgcgggcttcgcggtgcacccatgcgatggccgagccgggcaggatgtcgtggaactggttcagcagcagcgtcttccatatgcggtccagctcctcgcgcgggtagacgtactccggatcggacaacacggcggctgcgcccaggtattcgaccgtgcgcaacagcgattcctcttggcggcagccgcgtttcatgtcctgttgcgaggtcaaggtgccacggtgcagttcgagatacagctcgcccttccagacgggcatttctgggccggcgttctctgcaagctgctgatgcgccttgtcgaagaagtcattcggctcttcgatgctcaccttggagacgccttcgaggttctcgtagcggtgcaggtgctccatcatgttgcgcgtggggccgccaccgccatcaccgaaaccgaagagcagaagcgagcggtcggagagatccttgtcccggaagttcttctcggcgtagtcgagttcctgaaccttgcaccaagcagcataagtatccgccggcgggaagtgggtgaagatgcgcgagccgtcgatgccttcccacatgaacgagtggtgcgggaacttggtggtatcgttccacgagatcttctgcgtgaggaaccattcgtacccggcacggcgggcgatctgtggccatgcgccggtgtagccgaagctgtccggcagccatacgcccttgggctccacaccgagatgttccttgaagtatttgcggccatatgcaatctggcggatcagtgactcaccggcgggcaacatgccatcggcttccacccacatgccgccgaccgggatgaaccggccttcttcaatgcgccgcttcatgcgcttgaagatgtccggatgatcctcttccagccaggcgtactgctgggcggagctcatcgcgtatttgaagtcggggtcggcgtccatcagcgccaatgcgttggatacggtgcgggccaccttgcggcgggtctcgcgcaccggccacagccatgcggagtcgatatgcgcgtggccgatggcgctgacgttcatggccgaggcattggccggcttggccagtacgccggcgagtgctgcgcgcgcggcttccacggattcggggttgcgctcgtcgtaggcgttcagcgaacgctgcaatgctttggcgagttgccagtagcgcggcgactgtttgtcggcgaattccatcagggagctcaccacgtcgagatcgacggagtagttctcgtagcgttcatcgaattcggccagatcggcggacttgaatacgtacggctcgtccggcttgccggtggcatggtcgcccagttcggtctcaatgaacggaggcacgccgagcagcagcgggttgctggcggcttcgaggtacagggtgaagctgccgtcttcggcgaccggcacttgcgcgttgccctcagcatccatgaacggcacccaatagttgagcgggtgtacggctttgatggcggtgccgtcggcacggtagacgaggccctcgatatggccgccgcaggagtgcgggtaccagccgaggtcgaggatgagctccagcggcttgcctttcgggtagccggccggcacggtaccggtcaggcggaaccagactgtgccccatgtggtgccccattcaccgccgagcgtaaacggcttgaagtcgatgtcacctcgattgagcttctcgaagaactcgtcagtgggcatcggctctccgggaatgtcaaaggactccaccgcaagctgtgcgatcgatgggtggatatgagggtccacgcgctggcgcactatgcgcttgcaccgctccagttgctgttcaggtttcaggaacatctgctgttcactccccttatctctgccgcttgtgcggccacatcattgtgctgcccgttcatgggaaacatatcgacatgcgccctcgcccgcagaagactaaagcgctttagtaacatattggagggaacgggatatgatgtcaaattactatcgcaattcagcgtgttccgtcaggcatgtcatgctcggtgtcgatgacgatggtcaccggcccgtcattgaccagtccgacccgcatatgcgcaccgaaacgaccttccttcaccggcactcccccggagcgcaacgcctcgtcgaacttgatccacatgaaatcggcatgctcgggcttgccggccttgatgaagctcgggcgattgcccttgtgcacgtcggcgaacagcgtgaactgcgagatggagagaatctcgccgccgatgtcctggatcgaacggttcatcttgccctgcgcatcctcgaacaccctgagattcagaatcttatgggccagccaggcgatctgcttgtcg

SEQ ID NO: 2159 - DNA, 5290 bp, Unknown
  R51_24m  MAG No. k141_12114
ctcgcacaccaacgacaacccggtgtactacgtgcagtacgcgcacgcccgctccaagaacgtggaccgcaacgcagccgccgccggcatcagctacgagggtgccgacctggccctgctcgacaccgaggccgacggcgaagtgctcgccgccctcgcccaggtcccgagcgtgctcgccactgcggccgacgaccgccagccgcacaaggtggcccgttatctcgaagagctggccgccacctatcacaagtggtacaacgtggagcgcgtggtgccgatggccctgaccgatccggaaacccgtggcgacgatgaggctcgcaaggccttggagatcgccaagaatccggagccggcccgtgccgccgcccgcctgaagctcaatgacgccgtccagcaggtcatcgccaacggcctcgacctcctcggcgtcaccgcccccgaaaagatgtgattatgcctatttctccaatttggccggccgctacggctgtgaatgccgacggtaccattacattccacggtcgtaccgccgaatcgctgcttgacgagttcggctcgccgctctatctcatcgacactgatgaagtcgtcgcacgtgccaggcacttcgtgcgcgctgccgccgaagcattcaacacatccactacgcacgtgagctttgccggtaaggcgttcctgtccaaagaaatcgtgcgattggtcaccgaggccggcatgtttgtggacacctgcacgatgggcgagatgcgaatcgccctcgctgccggtgtgcccggccgccgcctagtgctgcatggcaacaacaagtccgatgatgaaatcgcgctggccatcgaacagggcttcgccaaaatcgtgattgacgagcccgacgagccggagcgcgtcgccgccatcgcccgcaagctcggcaaacgcgcccgtgtgatgctgcgcgtcaccgtcggtgtccacgccggcggccacgagtacatctccactgctcacgaggaccagaagttcggcgtgccgctgctggccgccggggccgacgccgccgtgctcgatgtgctgaacgacctcaaagacgtgacgcctgccgctaccaacgcgcgtatctctgcgacacattccctggaaaatggcgcggaaaagaccgagaaatcagagcgcgagctgcactacgacgtcaagtacccgtacgacctgagccacgaggaagtctccgacaccgacaaggcgctggccgccgcgatggaagccattgcggacggtccgtccatcgccgtgctcaagaccatcctcgccgaccaggacgtactcgaactggtcggagcccactcgcacatcggctccaacatccacgatgcggacgccttcattcacgcggccaagcgcatgatgctgctgcgcaagaccctgtgggccaccgacgcctacatcctgcccgaaatcgacctcggcggcggctactccgtggcctacaccgatggcgaagattcaatggacattgacgtggaactcactcgcttggcggatgcggtcaacagcaccaaccgtgcgctcggcatgcccgccccggccatcagcttcgagccgggccgttacatcgtggcacccgccggcgtaaccctgtaccgcgtgggcaccatcaagcacgtgcacttgtccgatgccaaagacagtgccggcaacccgattgccgagcgcgtgtatgtgtccgtggatggcggcatgtccgacaacattcgcccggcactctacggtgccgactacaccgcgcgtctggcgaatcgcaccggttccgctgaaacgatgcttgcccgcgtgtgtggcatgcactgcgaatccggcgacattgtggttcacgaggtgcagttgcccgccgatttgaagcgcggtgacattctcgccgtgccggttaccggcgcatacggccgcaccatggccagcaactacaaccaggcgctgattccggcggtggttgctgtcagcgagtccggcgcgcacgtcatgctccgccgccagaccgtagacgacctacttaacctcgacgtcagcgagtaatcagcgtgcagaggtgagcgcctgacagtctgtaatgtgcggccaaaaccgtcataatacgaaaagggccgtcagcttgatgagtactttcggtctgctgtcggaaataatccgtaaaataggcgtgggatatagaaaactttttggaaggaccctgaattggctcacaacagcgaaaccccgattcgcgtaggcctgcttggtgccggcaccgtcggctcccagaccgcccgcctgattgtcgagcagaaggacgaactgtccgctcgtatcggccgcccgatcgaactgaccggcgtcgcctgcctcgacccgaaggaaaccgagaagttcccgtggatcgaccagtccatcgtcaccaccgatactttgagcgtggccaccaactcggacatcgtcatcgagctcatcggcggcaccaccgtggcccgcaagttcgtgcttgccgccatcgaatccggtgcttccgtggtcaccgccaacaaggcgctgctggccaagtacggcccggagatctactccgccgccgaggccaagggcgtcgacatctacttcgaggccgctgtaggtggtgcgattccgttcctgcgcccgctgcgcgagtccctggtcggcgacaaggtgaccagcatgctcggcatcgtcaacggcaccaccaactacattctcgacgagatgaccaccaagggtctccagttcgacgacgtgctcaaggacgcccaggccaagggctacgccgaagccgacccgaccggcgacatcgaaggctacgatgctgccaacaaggccgccatcatggccaccctcggcttccacacctccgtgaccatcgacgacgtgtccgtcgaaggcatcaccaagatcaccgccgacgacatcgccgccgccaccgccgagcacaaggtcatcaagctgctcgccgtggtcgagaacggcgaggccggcgtctccgcccgcgtctacccggccctgatcgacgagaaccacccgctggcctccgtgcacggctccttcaacgccgtgttcgtcaaggccgaggccgccgacgacctcatgttctacggccgtggcgccggcggcgctccgaccgcctccgccgtcgtgggcgacgtggtgaccgaagcccgccacattgctgctggctgcaccggcccgtccatcccgctgtacaagaatctgccgaaggctccgattaccgcctccaaggctgcattcgccgtgcgcttcctgatccacgacaagccgggcgtgctggccgccatcgccgccgagttcgccaagaacggtgtctccatcaacggtgtgaaccaggatctgaagcccaccatgaccgaccccggctacgacggcgagattcagcagttgcgcatcgtgacccacctgaccgacgaggaaaccctgcgcaacaccgtcaaggccgtgcaggcgctcgacttcgtcaccggtgacccgtccatcctgcgcgtgctggactgacaccgtctaggctccctctgatgaggcggtcgaacggctgcccgtgagttgaaagctgaatacccaagctcccctgacaaggggagctcctttttaaggaacaaccatgaacccaatctgcaatagcgttcacgtgcgcgtgcccgccacgtccgccaacctcggctccggcttcgataccgtgggtctggcgctcgactaccatgacgagctcactttcacgctcaacgacgacccgaacgacggcattgcccacgtgatcatccacggcgagggtgccgacaccctcccacgcgacgaaacccacctcgtggtctccaccttccgccgtgcctgtgccacgttcggcctcggccgactcggcttcacgctggaagcgaccaacaacatccctcaggctcgtggcatgggctcttccgccgaggccatcgtggccggcatcgccgccgccgcggccttcgcccagaccggtgacctcaaccgtccggccatcttcgatatggccgcccagatcgaaggccacccggacaatgtggccccggctgtgttcggtggcctgaccgtctcttgggacttcgaaaccgcggaaggcgtcggctcggtcgccgttcctggtggtgaaccgctgcacggcggattccacgccgtcaactacccggtggacccgtccatcaccgccgccgtgttcgtgcccgactatgagctgtccactgagaaggcccgtcaggcgctgcctagggaactgccatacaaggacgccgtctacaacgtgtctcgcgtgggtctgctgcccgctgcgatgaatcccatggtgctggcccaggccgcccagcagggcaagtccggcgtcgccgctgccccggctcaggatgccgatacgtgcgcttgcgctggcagaacccgtgaatcgccgttcgctgacgagcttgcggccgctcaggcccagtccaacgcgctactgttcaccgccacgcaggacaagttgcaccagccgtatcgcggtaccctgatgccgccgtccaccgagctcattgcgctcttccgctccaagggctatgccgccgccgtctccggtgccggcccctgcgtgctcgtgctgcattacggcaacgcccgcgaagccatcgaccagatcgcatcggagcagcttgcttccggccattggcgtgtgcttcacctgcccatcaacaccgccggcgtcgaaatcgagcgtcgctaagtcgaggagaaggctcccgctggcgggagctggccgccgcaggcggtctgagagtggtccgccataccggcagagaccaccctcagtctcacttcgttcgacagctcccgccagcgggagcataaggacttaagtcatgtccattccgctaattcttgcttccaagtccaagcctcgccgtgacgtgctgtattcggcgggtatctgccccacaattcgcgtctcgcacgtggatgagcctgctgcgctggaagcggccgcccgtgaggaaggtgtcaccgtcgacgatttgagcatcaagcagcgtgtgatgattcttgccgcagccaaggccgaggccgttcaccgtgcgtatcgcgatgcggccaatactgccgccgccgcaaccggcgatcgcgtgattgcctacccgctcaaggccaaggaaatcaaggattcggaacgcgaagccgtcgtcgaagacctgcgcaaagccgccgctggccggcccatcgactattccaaggcggaagtcgccaccacgcgcgacttctccggcatcga

SEQ ID NO: 2160 - DNA, 4826 bp, Unknown
  R51_24m  MAG No. k141_12883
cgcgggggagcggccagcccggccgaacgcgcgctggcgaaccgcatgctgcccaaagacgagattctcgggcgcgatgctgacgtcgccgataatgccggtagcgccgaacataccgtgaacggcactatccgtggcggcaaacgctcccgactgcatcgtggcgaacgcccatcggtcacatggaaccagtcggtaatggaactgggggcggtgatctgcacggccaagacgccgttatgcgagatttgcccgattgccgacgattgcgcgttcctcaaggccggccgccccggactgggggagcgtcgcacccgcccacgccaacgattccaaggcacggatcgacaggtgcgcggtctggtgctcgccgcgctgcgcgagcttcccgctggagtcacgttgcccagggaagatgccgacaagctttggaaggaccagattcagcttgccgcctgcatcgccagccttgacgatgacggcctgatcgagattctggacggcggcctgcgattacccagctgacattgtgaaaatggcgggctccccaagcgtgtatgggtgtggtgaccgtagactggaagggttatggcagtgcagaggaacacatcaggcgcgagaacggcacgcggagccggcaccggggacaatgggccatccggcgggcccgcccgaaacgaccgttccggcaagccgcgcaagcgcaggatcagcaaaaagcagcaggccatctatcgtcgtcggcgtatcgtggccggcacggtgttgctgctgataatcgcgctgattgtattctgcgtgtacagccttggccggggtatcggtgccgtgaacacgatgattcaccatgacgaggtgtatgcgatttcccgcgacgccacgccggctccgaagaaagtcagcaacgtcaaggattgctcggccagtgatgtgacattgcagctttccgcggcctcccaatccgtgccggtaggaggatcgcttgatttcaccgcgaccatcgtgcacgaggggtcaggcaactgtttggtggacgggtccgattccggccgtgtgctcaccattacttccggtcaggaaacgatttacaagtccgatgtgtgtccggcggattcacgtctgctgctgatgtccaagggtgataaggacgttcagaaggtcacgtggaataccaatgcgaacgccacgctcaccgaatgcacggatgagtcgggttgggccaaggtcaatgcgggaacgtacgtggcgcagctgagtttgaaggatcatccgaaggtgaagagcgatccggtgacgtttacggtggggtaggacctgcggttggtgtttggacgctgggtctctccctcagtctcgctccgctcgacagctccctcgtcagcgggagctaaaaatgtcctcgcatatcagtattctgttgactttgcatgaggtgtgtcatattgcgggcatgccgtcgacaatgaagcgtccgcataggcatatggtggccatgccggcgctcccaggggaattaccacatattagcgagcgataaggaacgtccattggctactgagtctacgacgaacaccaccaccatcatcgcacgcgccgaccagcatgacattgatctgcacaaggcgtcggatcgcgtgaacttcggttccatcaaggaacccatcgatgtgccctacctgctgggcgtacagaccgacagctttgattggctgatcggttccgaccgctggaagaagcgtgtcgaagaggatgaggctaacggcaccaacaccgtggcccacacctccggtctcgacgaggtcttcaacgagatctccccgatcgagaactttgcacagaccatgtccctgaccttctcggacccgtacttcgaggagccgcgccacaccgtgcaggagtgcaaggagaaggattacacctactccgctccgctgtacgtgaacgccgaattcgagaacggcgacaccggcgagatcaagtcccagaccgtgttcatgggcgacttcccgctgcagaccccgcacggcaccttcatcatcggcggtaccgagcgagtcatcgtctcccagctcgtgcgttccccgggcgtctacttcgaccgccagcaggaccgcacctccgacaaggaggtcttcggcgcgaagatcatcccgagccgcggtgcatggctcgagttcgagatcgacaagaaggaccagccgcaggtgcgcgtggaccgcaagcgcaagcagtccgccatcgtgttcctcatggccatcggcatgaccaagtccgagatcgcccaggccttcaaggactacccgctggtgctcgacgccctggagaaggaaaccctcgagacccaggacgaggccctcgtcgacctctaccgcaagattcgtccggccgacaccccgacccccgaggccggcaagaacctgctggactccttctacttcaacaccaagcgctacgatctggcccgcgtcggccgctacaagatcaaccgcaagctgggtgtcgaggccgatttcaacgatcgttccctccaccaggaagacatcatcgccacgatcaagtacctggtggccctgcacgacggtgcggcgaccttcccgggcaagcgcaacggcgaagacgttgacctgcgcgtggacgtcgacgatatcgatcacttcggcaaccgtcgtatccgccaagtcggcgagctgatccagaaccagctgcgtaccggtctgagccgtatggagcgcgtggtgcgcgagcgcatgaccactcaggacgccgaggccatcaccccgcagtccctgatcaacatccgcccggtgaacgccaccatcaaggagttcttcggcacttcccagctctcccagttcatggatcagaacaacccactgtccggtgtgacgaacaagcgtcgtctttccgcactgggccccggcggtctgtcccgcgaccgcgcctccatggaagtgcgcgacgtgcacccgtcccacttcggccgtatgtgcccgatcgagtctcctgaaggcccgaacatcggtctgatcggctccctggcgaccttcggccgcgtcaacccgttcggcttcatcgagaccccgtaccgcaaggtcgtcaacggccacgtgaccgacgaggtcgagtacatgaccgctgaccgtgatctcgaccacgtcatcgcccaggccaaccaggaacttgacgagaacggcaacttcgtctccaagtccgcccttgcccgagtcggcgaggaagaggcagtcgatgtgccggtgagctccgtggattacatggatgtctccccgcgtcagatggtctccctcggtgcctccctgattccgttcctggagcatgatgagggccaccgtgcactgatgggtaccaacatgcagcgtcaggcagtgccgctgatcgaatccgagcgcccactggtgggcaccggctccgaatggcgcgccgccaacgattccggcgacgtcatcaagtccgagaaggacggtgtggtcacctacgtgtccgccgacctgattcgcgtgatgaacgacgacggcaccaccagctcctacaagctggccaagttccagcgttccaaccagaccacctgctacaaccagcgcccgatcatccatgatggcgagcgtgtggaggccggctcggtgctggccgatggtcctgccatccagaagggcgacctggccctgggcaagaacctgctcatcgccttcatgccgtggaacggctacaactacgaggacgccgtgatcatctcccagcgcctcgtgcaggacgacaccctctcctccatccacatcgaggagtacgagatcgacgcccgcgaaaccaagctgggcgccgaagagatcacccgcgacctgccgaacgtcggcgaggacgccgtggccaaccttgacgagcgcggcatcatccgcatcggcgccgaggtcgaggccggcgacatcctggtcggtaaggtcaccccgaagggcgagaccgagctgaccccggaggagcgcctgctgcgcgccatcttcggcgagaagtcccgcgaggtgcgcgacacctccctgcgcgtgcctcacggcgagaccggtaccgtcatcggcgtcaaggagatcacccgtgaggatgccgaggaggacggcgacgagctgcccaacggcgtcaaccagatgatccgcgtctacatcgcccagcaccgtaagatcacggtgggcgacaagctctccggccgccacggcaacaagggctgcatctcccgcattctgccggaagaggatatgccgttccttgccgacggtactccggtcgacatcatgttgaacccgctgggtgtgccttcccgaatgaacctcggtcaggtgctcgaactgcacctcggctggattgcccactccggttgggacatctcccttgacccgaacatggaagccgagtggaagaagctgattccgtccggtgccgagaaggccgagccgaacaccccggtcgccaccccggtgttcgacggtgtcaagcccgaggtcctgaagggcctgctgtccaccacgctgccgaaccgcgacggcgaccgtctggtcggccccgacggcaaggccaccctgttcgatggccgtaccggtgagccgtacaccaagccgatttccgttggctacatgtacatgttgaagctgcaccacctggtcgacgacaagattcacgctcgttccaccggcccgtactccatgatcacccagcagccgctcggtggtaaggcccagttcggtggccagcgcttcggcgagatggaggtgtgggcccttgaggcctacggtgccgcctacacgctgcacgagatgatgaccacc

SEQ ID NO: 2161 - DNA, 24251 bp, Unknown
  R51_24m  MAG No. k141_12920
ccgatgcatctacctactcagaggcataccgccatttttcagccagaggcggtgattggtgatacatagttccaaaaaatcctgaggtattgtcatcccggaatgacagttgacaatttggagcttgtaagtccaccttcaatttgagaagctgacaatgcaaatggaacgagagaattgcgaatgagactcttgtcgatgtcttatagcaataaaatggcaacattataatactgagattttataaggagccctatgataaaagagtttacgaatgcagcacgatcacctccattaagtgcgaccaatagcaggctacaaaataatgctgatgtattactcaaggaaactaatgcaattaactaatgaagttacatagtgtttgttaacattattcaaaggagacaatgatgtctaagcatgaaaatgatatccgcctcacgtcttgcgataagggaaagcgtcaaatggcaagtgcggcagttgctcttgcggcagtgttcgtcactccttttgttgttccacttgtcgcttctctaatggtagtgctaggaattggaagcgcagcagccaccgcaattgtcgctgtagcttggcttggatctgctgcggtgggaatgatcttccccgcggcggcgccactcacttctgccattcaatccatgattggcatcttgggaacatcaggtgccgcagcatggtgatttattaattagatattatggccttgcaggaaaggaataatgtgggattcctgaagttgctctttattaagacgtgttgtatcctaatgatttccttaatggcgtttctgggtggtggacttttggccagactacgtccgtaccctttgagcaaggccataattccaaacgtgtatcttaatgaactgctgtggaataatactaaagtatggctaacactattattagggggatttcttttttctattcctacaactatcgtattggttattaactatggcatctttggttggagtgcggctcagtatttgttccaaggctttggtaataaattattaacagcggttattccgcatcttttctttgaatgcttttccttgattactgctgcaggtattgcactaactattacacattatgaattatgtttcttacaaaacagtcagaaacgaaatgttgatacaggtaatgtcgttttattgaccctgtcaatggcttttatttcatggatttcgcttgtccttgctgcaattatagaaacatacgtatctcatatttaaggagcatcatgattcgcctttcggtctggtttgagtccttgaagtggcgtatttccaacgggcgtcgccatactttgaactggtggtatctggtattggccggcgtgctgatcgtgtggcttggtgtggcagaggccgtggcgttgcctgcgtatggcaggtacgcgcatgaggtgttctcgaatttgctggcaggggtgccgtccacgccgcccgcggtcgtgcaggtgacggtgttccaatggtcgtgttcggcggtctggctggtgttggcgtatcggcagtgggctcgccgccagttcaaatggatgattgtgttgatggtgtgcagcctgctgtatatgccatttgtggtttatctgatgcatgaggtggtggatcagcgcagaggagtcgttcggttggaggaaaagcctccggaaccgagtattgtcgctgacgatgaaatgatcggagatgagctaggacagatagattccagtatcgcggcatcagtaaacgccggcgatccggtatctcatcgcggcaagactcgccatggacgccactgttgaggttcgcggcctggtcaagcggtatgcgtccgggccgacgataggcccgatcgatttcgaggcgcagccgggtcaggtggtggcggtggccgggtcgaatggtgcgggaaagtccaccacgctgcgcatgacgcttggcctgtccgctcccagccggggacatgcgctggtcatgggccgcccgtacgggcagttggagcgaccgggtctgcaggtgggcgtgtttctgggcggccggttgggcgatgagtcgatgacgggccgtgagtatctgacgttcatggccggcatgatggaattgcccaacgtgcgccgccgcgtgcgccgcgtgctgcgcgactgcggtttggagcgttggccgaagacacggatcaaggggtattccacgggtatgcggcaacggctgggcgtggccggcgcgatcatcgccgacgcgccggttctcgtgttggacgagccgttcaacggattggacatcgccggcagactctggctgcacgactcgatgcgccaatggtccgccgccggcaagaccgtcattctcgcggcccatgagatcgacgaactgcagcgcatcgccacccacgtgctgatcatcatgcacggcaggcagatggcctgtgggccgctcgaacaggtcatcgccggcaacggcggcaagtccgggaccgtgttccggttcgcgcccgatgtggatgagactcgaaaggccatggtcatcggcgatctggcccggcttggtgccgacattcacctctcggatgacggctcctatctggcacgacagacggacgaggccgccgtgttcgccattgcggcgaggcatgacgccacactggtccgtctggaccatgccgagccgacattacgtgacgtgatgaccggcatgatccggcaaaccccggaaaaggaacacgcatcatgaacaggacgggacgatgcatacgccgtttgacgctgctcatgcgctatgcggtctgtcggccggcaccgctgacggcatggttcggactgccggtggcgttcatcttgttcaccgcactgaccagcgtctccgtgcggctcatgctctccactgattccaaactcgacggcctggccacgctggcgggcatggggccgagcatcgccggcgccgtcatgcccatgaccgagcccgtggcgatcatcgccgcgctgctcgccatccgcatcctgaccaacacggccaccgccgtgccgttgttcctgatcgagccgaaacggacgcgactgttcctggccctgtgcaccgacatcgccctaatcggcattatcgcggcgacgctcggcgcgcttgctgcgaccgaggtctctcgactcatcctcaatcccgtcgtgcccgaacaggcatggcccgcgccgctgtccacggcattgctgctgtgcctgcccgtggcattgatactcgccggacgaatgttggtcgccgccgcgttatgcgtgaccctcgactcggcgggcaaaggcgcggccgcctacatagccctgtattatctcctgcccatcgtcgtgaccaatctgcaggcaccccaaacgttgcacgaatggctgccctccatagccggcaccgccatactggaacccaaaccaggcatcagcccgatgctcagcggcgcgattgccctcgcgtatgccatgaccgcaatcggcatcgcctgcatcgcccaaaagcagagagatatcagatgatcaatctttgtggaatttgtcgagaagctattgtaagcagccgcggtggctgcttcccgtcagtgggaataacgtagcatcgtcgatgcacagtgacgtgctcggtaaacatattgatgtcattgatacaggaacttcaataatgtcatgattggaatcattagtgaaatctctggccatccagagcttcctgtggctcgcaatcgatagcgcaggagccggcccccatgatgcacagggaatccggctcctacttccatttcctcctcagaggctggcttatctcatactatatcgttcaccaacgaccagtgatatctgattcgtttcgggaagagtcagcttgtgcgaagatccacggtccgaaaatccaaggatgcgaccatcgggctgaaatccatcgtaccgttgcgtgtatccccgagtgcgccaaggacctgatccgggatccatagacgagcgtcctcattgccgggcttgaaatctacacgcaacgtctcgatgatgtgtcggctgcgaatccccctggcaaagtcgagatccctgtcgtcctgatgggattcgcgcgcctccaagacaagacggttcaccccatactcgtattccaagacgggcagcagcagttccagacattttctcctggcccgctccgaactcaccgacccgtcgagtggtatggccgccaccacgatgtgcgacaatgcgagtcgttcgataatcggtatggatttgcgtttctccgaaggtgtcatgtcgcgccagtgaagtttgggcacgtgtcttttggtgaccgtggtcagcatccgatgtacatcaacttcctccagattgcagatgcagacacccatgtagtatgcgggaacgtcttgtccctgcgttctgacgctttcatcgccccaagcgactagattactcattggctttcacctccgtcatgtctcttcttctgcgggacgagttcagcgattcccgatcgaacggcggtagcaccgtgtaggtgttcaccttggagaaccctgtggggctcaatggcgtggaaatactttctgatattctgctgaccaacccgcgttcgaccaactcatgcagccctctttcggctgtgtcagccgaccacccgtaccattcgggcatgcgctcagaaggtagccggcagtaggatttctctcccagtacaaccagtagcatggccaatgcgggaagactgatttcctcgtcgagaccggtgcgccagaactcatatgacaggcgcagaaaccgttgccgaggcctctgatagggtccgccagacccatcctgggacagaagacgcaccttgacctcgcggccggagcctgatcgttcccgcttgattagtttccgttgctgcaggcgggagagtatcttcgtggctgcagcttttcctgaatcgattccggcatgctgaaagcatccgaacgcccttgcccaggtctgcaatggcagtgtggtgtaccattccccgttctcatcgctgctgctggtcgatgccgctatcagcagatacgccttgagaccgcgcaaatctccgttcctgatgaaccgggcaagcacgctgttgcgctcttcgttgccacgtggaagctgcacgaaggatttgtcaatcggcacgaatgaccgtttcgagcgggcaaggagtgtctctacggtctcacgccagtcaatctgattatcattcatatgctacctttcgcatgaacatcatcaccattgcccgcaatgctaccatgcaagccgaagagagcgaatgttgcatcattgcagatgacgtacactacagcgggtatatgtatatatctctctaatatctattttgtcatatctatgccattgcctgacatgtcctatgccagcttccatggaaaacgcatccgacaccccgtgctgtcgcgtcgagcgatgtactacagcagaaatatccgacattttcaccggtctgcacatcaggatttgcgacgctatcccattcctcacctacgaacaagacgaaccagccccctacagcgaacatatccgctcctcatctctgctcaaaacgtaattcgtccgggaagatcggggaatccccctgattcgtatcccacgacggcttgtgctgtggcgggaatccgttcccggattggccgggttcgccggcatccgcatcgcccgcatgcggttgcgcgcccccatggtccggggcacccgtacttggtgaggggcgttgtccggcggcgtccgcctccgttttcctttgcatcgactcgttgacccgtcgcatggcgtcggtgagcctttcggcggcctgttccagtgtggaggggttattgttctcgtgcgccgtgtgtcgggcgtggtcgagttcggctccgagatcgatgcgaggccgggcgtcgtcggtcctgtccgcggaatccttgtagagcgtgtcggcctgttcgatgacctggttcagtttctcccgcgcgtcggcgagctgcttgcgttcgcgtgaggctttggccttgccgacggcgtcgcgcaggtccttggtgcgggcctggatttggccgttcgttttttccatggacgtccgccggtggtcgagctggttcgtcgtcatgtccggatcgcaggcggccggcggttccgggagccggtatcgcgtgatcgcggcgaccagttccagggtcttgggatcctgcacatccccgtcgccgagtctcaggtatggttcggcctgttccaataccttgccccagtccgttcgtatcgtgtccgactgcttgattgcttgattgcatgacgtgagcgccgcctgatggtcccggatgctcatcatcgcagccagacccgcggccgacccgatgatgacggccaatgtaagcgtgatgccgatgatgcggacaagggggatgcgtcggcgtacggggacctcgtccgattccccgggcgccatttcctccggtgtgatggcgtcgtcggctgtctggccaccggtttccctgggtttcggggctgttgtcggttcctcccgcctatgcgtgacgggcgtgtgtgtcttggtcttctcgtttcgcgtggctcgtgccggcctgtcgtcgagaacgggtgcgatgggccggaaccggcgtccgggtctcgttccggctggtggttccggcggcgctccggccgttcccgggtcctcgatggcgtgcgcggcccattggtcgagttccggccatgtgccgggatggtcgtggatctgggtaagaaggtcccagttgccggggtcgctcatgaggtcggaaagttcgtaaggatcgagcctgggattgatgcggcgcatgtttccttcttttccgtcggggtcagtgtatgtaggtgatgttgggattgttggcctgttccttggtgagggtcctgagccatgcgtacgggatgcctccgccggattcgctgatgacgatgctgccgttgtctttgatttcctcgacgatggcgacgtgcccgtagtcggtgcttgcgccgagatagcctttggtgaagctggccacgtcgccgagctgtatgtcgccgccggtcgggtatccgagtttccgggcgcttgacgcccacatccagccgtcacccatgtagccgtccactggtttgccgatctgcagtcggcgggcggccgcccaccatgtgcattggccggtcgcataggtggtgatcctgcccacgggcgtgccggtcgccgccacgtccacattcaacgtgccgggctgcatggccaacggcggcgcgagcttgccgatggttcgtcctgccgtggccgaacagccgcctcccatgtcgatcgccggtctgacgttgtcgaggtaccgtttggtgatgcttgggatatccgggtatttcatgaggttgccttcgccggcgttgtgggcgatgaccagtgccgtcagatcgtcgagcttggcgaatggcatgtccgggtgcgcggccttgagctgtttgacgccttccagacggtttttcaggtacatgccgccgtaatgggcgtggaccatggggtcggtgatgccttcgggtggtgtctggtcggcgccgtcgggatgtacgccgcgccatacgctcctgttcatctgcagcaggccccatgtgccgccgttgctgtcgtcggcgtacgcatccggccggaaacccgattcctgttccatgagcgccgcgatgaaatccgcgcccaacccgctcgaccgggccgcctcgcttacccagggcttcgcctcgtcagggacctcgatcacgccggcctcgcagcctccgccgtctccggcggcgacggtggggatgaaccacagcaacaggctgacgatcatcagcacggccaccgcgcccagcaggatcgggacgccgaccgtggccgacgccgctgcggtgatgccggccttcaccgccatcgccgtccgtgcgaccatccgtatggcctgccgtgcggcctgggtcgaggccttggcggcggatctggccctccggccgcccgatcgcgcggccttgccggaacgacgcgcgcgcctggcatgggccgagaccctcctccccgccgcgacgcgcgccatggtgccgcccgtcgcgctcttcctgcgcgggacgccgttcaggccttcgccgatccggccggcgactgccgtcggctgcggattgttttcttcgctgtcctcctcctgtgccggttgcgattcgagcacggaccatgccatatcgatgccgcgttccgcagcatcgatgggcgtcgtgccgttcggatgcggggcttcggggccaccgttgcggttcatggcccgtgggcgtttcggtccggccggcccgtgggcagaggagatcccgttgatgtgccgaacccgcagtccgggaatccttccgttcggccgtatgagattgcgcgtggcccggaatgagctgggggcgaggggtctcatgcgggtttccgatcctcgaatttcgtggtgtacagccggtagagcaggctgtcggtgtcgatgcgcccgtcgaatggtatgaacgcggtgccgcttttggccatgccctggccgggctgcacgccggtgaagaacgcccgctgctcgtcggacagcttcagcagttcgcacagggcgtcagcatccgtggcggtctggttcagcagcaggaggaagtcgctgttcgcgagcatcagcctcgcgtcctggttggccagcagctcctcgatgttctgcgtgatgccggtgggggtcaagccccatttgcgggcgcgcttgtacaggcgcaggaagtattcggccgcgtaccggttcgagaacagcaggtggaactcgtccacccacagccaggtgcgccggccgagacgtcggttcctgacgacccggttccatatctggtccaagacgacgagcatgccgaacgtgcgcagctccgcccccagtccggagacgtcatagacgaggaaccggctggacgtgtccacgtcggtggcatgggagaaggcgttcaggctgccggtcgcgtagatctccaacgcgcgcgccgcgtcacggccccccggctcgcccagagcggcgaggcggtcgtgcagggtggcgagcgtgggcatgcccagttcgggatgctccctcacctcgcggtacatgccgatgaccgtgcggtcgatcaggctgcgctgcatgcggtcgatgccgtcctgtccgccgatcagcacgccgagcatgttcagcacgctcgcgcatttcgaccgtatcgggtcgccttcggaatcgtcttcatattcgatgtccagcgcgttgatgtgcgcgcgcgacgattccccaatctcgactcgttcgccgccgagaccgtcgcacaacggcgtgaactcatgctccgggtcgatgacgatcagatcgtcgtccggccgggtcagatagatctgggtgatctcgttcttcgccgcctggctcttgcccgacccggtcgtgcccaggatgaacccgttgccgttcatgcctttcgtgcggtcgatgaccacgggattgccggtgcgcgcgttcgctccatggaacacgcctcccggctcgaacagctcctgcgacgtgaacggcaccagaatcgccgcgctcgacgtggtcagcgtgcggcgcatcggcggcaggggattgcccaatggcagcacggcgttcaacccctccacctgcatgtaggccaaggtctcggccacgcacgactgcccatcgatcgcggccgtcacgtcacggaccgtctggtccagttgctcacgactgtccgccgacacgtccacgatcatgagggaatccaccagacggtcgccgttatgctccagatcatcgcgcagctcgcccgcctggctcatggattcctgaagatcatgaggcagcatgtcttcgggcagatgctgtttgcggttcttgcgccgctcgtcgatggcctgcatgtccatctcggcgatcgtccggttcacgagcttcagcccctcggccttgccccgcggggacagatggatgccgaccgtgatatccgccttgatgtccgtgatggacgacaccagctggtcgctcaggtaatccgggaaatcccgcaccagaagacactggtgccatacttccgtggtgcccgagctcaaccggagccgccggcggtccgacacgtccacggcgaacggggccacgtaatccttcgtggacatgccatgcgatttcaggaagccgtcctcgtcgaacatgaaccgcgtgccgcgacgcagcatcccgtgcagcacctccagccgggaccggcggtccaggcgcacgccgacgcagccgcccaccgaccgcagttgcgccgtggcacgcagcacggcgcggttcagcagcgtgaccgcacgttccccgtcccgctcgcgcagcgtcagcgtcagatacttgtccgtcaccgcgccctgcgaacggccggcgagacgccggcgcacattgcggttgaagtccccgcgcaacccatccagcatgtcgccccgtaggggcatggcgatgctgcgcgtcacctcctcgggatccagcatgcgtgtggcgaccgtgatctggacacccatgttctcgccgaccgagttcaggaaacgtccccaccggtccacgacgtccagctgctggtcctgggtcgcgacctgatagttgatgtcgctgatccgcagcgacacgctccaccggtcgccgcccagatacgcgatcccgttggacagcatcgaatcatagccaagcagctccttcgacgaacgaggtatgcgacgattcccggagcgccggtttccggcctttccatgtcgcttgtcgttgcctttgaccgctttgctgccgttgatgtcagacatgacgacgtgccttccttcctccgattcgtctacgggtcttctccttcaacgacggtttgccggggaatctcgcgggaacatggggttcgagcggatacaccttcgggccgaaacgttggcgcagcatgtatcccagataccgttccggcttcagtcccttcggacgccaccagccccacagcgcgaacggcagacacaccacgaacagcagatacgagcctaggtccgtcagccccaacgaccagaacaacgccgcctccccgccgcccaggacgagcatgcacgcggcggccgccagttgacgccagcccagcccccacatcaccttcgcctcgacattggcgatctccttatacacgcgcatctgcaacatgaaagaatcctttccgattggccccggttccgatgcggctattcgccgcctgctatggcgcggctgacacgctggctcaccgcgatcacgaagaacagcaggatgcccgccatcatgagattgccgaaattgcccgtcacccacgacaccatgcccttgtccgcggaatccgggatcctcacggcatcgaccacgatccgctgatagaacaccagacagacgaacacgcacaccgcattcaccgacgtacgcgcatacgacttgaagaaacccacgccgatcggcttggtatcctcatgcaccagaaacgcgaacggcaacgactgaaacgccgtcaacgcatacaactcgatgaaccgcacatacagcaccaccgtgaacaccaccgacgccaactgggacaacaaccacgggatcaccagcagaaagaacaacgccgcctgccccatcacacctgcatcacggatctggtcgcgcatcagatcgcccaactggccaccctcgcccgccacctcaaaggacatctgcgaggacacgccctgcataaggaactgcgtgacccggttgaacatgccgatgaacagaccggcgttctgcacggcgatgaacaccaacgcgatcttgaacatggtgccggccacgatcttcgcacccagatcgcgatccgcttcaatgcgcgtcgagttgcgcgccagctccaacgtgaacatgaccgcgagcaccaccgatgtcagaggcttgacggcgactccatgcacgttcaccgccaactggtaaagagcgggattccatgtctccggcgcctgggacaacagcccggccgtgatcgaaccggcacctccgccgccgatcatgttgagcatggctacgatgaagtcctccatggcaggccccgaatcagctcagcccagagccaccgcgttgaaaatctgcgcggccgcgatgatcatgcctccacccacgatctgccacagtccagactgcgtctgcggcccattatgatccttcaggccgccgccgaatgtgacggcgccccacaccagccacagcccaccgccgatggtggcgaacctgacgaacaactgaagcacctgattcaacaaatccacgacggcctcctctgatgacgatcaaggagcccgacaggcaacggtctccgttgacacccatcgtcagggaaagccggcggaatagcggcggacaagaatggtctcgttgtcctttatgtgcggtgagaccgttttgatcaggacgaataaagaaggaggcgagcaaagctcgcctcctcgattcatagagtcaaattcagcggaaccagacctgagcgtgatagctggtcgagtacccgtcatcggcgtatgcgcggctggactgcagagtccacacggtgcttgctacgcgcctaccatgctgcgcataggagcgaccttgggttcctccgttggtccaagtctgggccaaggcatagtccgtgccggcatggagagcgtaggttccggccgcgttagcggcaggaacggtgaaagccatcacggctgccgcagctgcggcgacggctccgactttgcccagcagaccgattttgcttttggcggtggtgttcatgggagttccttcctccttgggttgtccaacctttccggttggtgctcccataatatgcattgactgactagtcagtcaacaagaatcgttgattcttgccatacgattcccttatagcctgttatcagagagttcagccgctttgctcagaccggttagggacagatagaaatcaagagcctgacggagctgctgcttattcttccatcgatcggaccttatgacggcgatgtacatatcgattagggctcctgccttaatgctgtcatgggcgtcgttgagctgcccaaacaagactagttcaagtgcttcctcccacttcatgtgccccgcgttctccgctcgggctttttcttcatgcagcagcaatccggaacgtattcgcgcatcttcatagtgcatgtcagcaatcgcggcgagaatccgagcgaaatcgcttctgccgctacattgggacacttttgcgcacaggcgctcatcgcaccattggataagcgtatcccgtaatgcttccttcgtgtgaaaatggaacagcactgtgccacgcgtcaaaccaagtcggtcagcgacgccctgcaatgtggtcttcgcatatccctgtgtttcaaattcgagagccgcggcttcgagcagggcttcgcgcgttctacgtctccgttccgcactattcatcgatatcctcgcattcattgactaatcagtcagtatgagtaaggatatcttatcgtgaataaatcatctaatgggcatgccgatatgtcgatttagcatgattccggcgcggaatacatcggctgtgggacggctgatgttgaggctggcgccgatggcgtctgtgcaggctttggtgatggatagtccgaggccgtggccaggttggttggccatgcgggttgcgtctcctcggtggaatggttggatgaggtcggccgtggcttcggggtggtccggctgttttgtggtgttggtgatgctgatggtgacgtgctgcttgtcgtcgtggatggtgcaggtgatggcgccgtggtcggtgttgtggatgatggcgttgcgtatcaggttgtccacagcgagcgagaggtagcgcgggttcgtctcgatgaaggggccgtggtatgcggcgagtccgtcggcgtcgatgcgcaggtgacgtgcctgtgcctgttcgcggtgggtttcgagcgtgtcgcgtacgatgcgggcggggtccacggtttccgtgctggtgtcgggcacggtctggatgcgggagagttcgagcagactgttgatgagttcactgcttttgcggttcgcttcgatggcgtggctgatggctggtttgacgtcctcggggaaccggtcctgggccatgagcgcttcgaggctggtgccgatggtcgtgatcggtgttttcagttcgtggctggcgttgcggatgaacgatcgttgcagttcgttggattgctcgatgcggtcgagcatcgtgttgagcgcgtcggctaggccggcggtctcggcgtcgggatgatcgaggctgatgcgcccggcgggatggtcggggtcgagttggccggtctggcggctgatggagtcgaggtgtgcggtgagtttgcccgacaggttccagacgaggagcacggccaggagcgcggatacggcgaacacggcgagcgatccgtagcgcatccattgcacgacgccgtccctgacggtgagcaccacgccctccgtgccggtctgcccggcggtcggagagagaatggcaccggtcacgtcgcagggatccgcgttacatgagtcggccgtgccgggaaccccgtcctggggcgtggcaggttccgtcgtgatggtgttctggttgctgcctgtggagatggtgtccacctgatgctggaacgcccagtcgagcgagatgttctgtacgaggatcacggcgaggagcatgccgagcaggagcagtccgacggtgacggcgaggcggatgcggaagctggcgggtttgcgcgggcgcgcggcgtgcccggccggccggttggtcgtgtcggtgtcggtcatggtatgcggtatccctctccgcgcgacgaggcgatgagcgaggggtcgggcagtttgcgtcgtagcgagtagacggcggtcttgacgaggtcgggctggtcgtgcgcctcggacggccacagggattcgagaagggcgcgggtgttgatccacccgccgtcggcgcgcagcagttcctccaggagcgagtattcgcggggtgcgaggtcgagaggccggccgtccgcgtaggcgagccgtctcacggtatcgacggacagccgtccccgtgagatcacggtgggcgcgtcgtcggcgtcgcctcggcgcaggagcgcgcggatgcgggcgaggagttcggggtaggcgaacggtttgggcaggtagtcgtcggctccgaggtcaaggccgtgcacgcggtcctcgatgctgccggccgcggtgagcatgagcgtgcgtacggggatgcgcagcctgtccgcggtgcgcatgacctcgtctccggagagcacgggcagatcacggtcgaggagcatcacgtcgtattccccccgtgagagcaggtccagcgcctcgacgccggtgcctgccagtccggtcgcgtacccctcgtgcctgagacagtcgtccagcacggccgacaagtcggcgtcgtcctcgacgatcaggatcctcgccatatttcgttgcctccgattccgattcatggccttcatgcgattgccttcgcgttctccattgtgctcggcgtgggtgtgcgttaggtgagcgcgacacgcacccatcgcacacggagagccggctgtaatgggcatcgtccggcaaccgccgggccaaagcatcgccccggcagcggcgaacccatgcaagggaggaacacatgcgaaccacatccgtattcagactgtcggcggccgcggcgctggccgccgcgctggccgcgccattgtcggcatgcggccaacagcagtcgtcgcagtcatccggcgcgccctccgcgacgacgtcgcaggacgcggcgccgaagaccgacagccagggcggcgacgcgccgcagggatcgaacccggcctcgaaacaggccgccgaacgataccgcgactgtctcacggcggcgggagtgcccgcgcagatcatggacggcaactgggtcgtgctccaatggaccggcgacggctccggctcggtgtcctcggggtccacggacggtgaccgggacaaggccatcaaggaatgccaagccaaggtgcccgactaccacgatcccgacttcaacaccaagtaaacagaccgcaccagccgatggaaggggaaaccaccatgaccaccagcacatcatccatcctccgccaagaaacgctgcgcagggccgccgcgctgctgtcctgcatgggactgctcgtctcgctgacggcatgctcaacgccctggaaccagaacacggccgacgacgcgcagacatccggcaccagaatcgcgccgagcatgagcgccctgttcgaccagtacctcgccaaggacacactcagccagttcgagcgcgacgtgctccaacgggccaagaagaccggcaagatcagcgccgaggactacgagaccgcgcacgacaaacagaccgcgtgcatggccgagaacgggtggcaggaacagacccgcaaactgtccaacggactctaccagaccaccggtgtgacgccggtgccatcgaccgacgccgaagtgaacaagtacatggaggcatccaacacctgctccgagggtaccagcaagatcatcgaatccctctaccagctccagcagggcaacccgggcctcctggccgacccgtacgagaccgccgtggaatgcctgaagaaaagcagcctcgtcgatgacgcctacaccggacgcaaactcgaaaacgcgttgaacggggacggagcgtccaaaggactgccgttcgacgcctcgtcggacgccgcccagtcatgcttcaccggagccggccttgccgtcaacatcggctgacgaacaagcatccgacgaaaggaaacgaccacatgaaaacacgaatcctgaccccgctgatcctgaccggcctggggatgctgtccgcgggcgtgctcgtcaccgcgctcgtcatccccacgcccacacccgacggactgtccgcggccacgagccccgacaccgtcacggccagccgccagcagttcgacgacgaacggaccgtcgaggcctcgttcgagaccagcgcggaacaatcgctcacctcgcgcgccgccggcaccgtcagcgaaaccctgtgcatgcccggccaagcggtcgaatccggcaaacgactgctgtccgtggacggcaaacccgtcatcgccctgcacaccgacacgcccctctaccgcgagatcggcaccggcgacaccgggcccgacgtgctcgccctgcaacaggaactcgcccgcctcggctacaacgccgaaggcaacggcacctacgggtggcgcaccaaggacggcgtcaaccagctgctctcgcaggccggcgatcgcaaccccgacggcaggatcggaccgaccgacgtggcatggctgccccagaccaccgccacaccaacccaatgcacggccggactgaacaccaacctgacggacggtgccgaaatcatgaagaccggcggccaactgacggccatcaccttccccacgccggcgaacctgagagaaggcaaacgcacgttcacgctcttcggcgtcaagaccagcctcgacaagaccgacggcaggatcagcgaccagaaattcctcgaccagatccaggccagcgacggctacaagaccaccctcgccgaccaaggcggcaagaaaccaaccgccaccctcgcgctcgaacaacccatcgacgcgatcaaggtcccgccctccgccatcaccggccagaacggcacccgcgcctgtgtctcgcccgacggcaaacaggctatccccgtcaccgtcatcggctccgccctcggcgccacgctcatccaacccgaacaagccgacgcgacaatcggcaaagtcgccctcggccacaaactcgacgacatccaatgccccgccgcaatgcagcactgacacaaggaggacgcgcatgagcaccagcatcctgcccctcgaaacggtcgcggaccccgtgccgacacggccaatcgactccgcgcggcccgcggccggcggaataccgtcggtcacgggcgagcacgtgggccaccggttcgcggacggcccctggctgttccgcgaccttgacttcaccctcacgaccggcgaggccgtcggcctgtgcgggccgtccggctctggcaaatccaccctcctgtccatcatcgccggcttcgagccgcccgccgaaggaaccatccgacgcagccgggtcaaccgcgtgcgctgggtgttccagaacccccacggcatgccacggcgcaccgccatcgaccacgtcgtccaaccactcctcggccagggcatcgaccgcacgcaggccgaagacgaagccatcgccatcatgagcacgttccacctgaccaaagtcgccgcacgcgagttccgggaactatccggaggcgaagcacagcgtctcatgctcgcccgtgccatcgccagcaaacccgacctcctcctcgtggacgaacccaccgcccaactcgaccagcgcaccgccaacgacatcgattccaccctcaccggactcgcgcaaggcgacgcgatcgtcgtcatagccacccacgactccaacacccgggccgcgtgcacccgcgtcatcgacctcgcgtggcacaatccgaaccccaacatcgacaccaaggacgacacacgatgaaaccgaccgccatcctgtccgaagtatggcgcaacgtcgccaccggcactacacgtgccctcgcctgcgccggcatcctcaccctcatcgcagcaggaaccgccgtattcgacctgaccgccattacttccctccaacacgaatcacggcaatgggccaccagcgccgccgccatccacatcatctccggcagcaagcagatcgacccgaccacctgcgcaaacctcacccaaaccaccggcaccacaggcggcaccaccacgaatcccatccaagcggccggtgcgctcaaaagcaacggggaaatcaccctgaccgccatgcccgcggccccactggacgcctggcaggcgacaccgggactcgctaacgtgctcggcgttggagcaagagagcaaacccaacccggcgtatggatctccagccaactcgccgccaccctccacgcgcgcgaaggagacgacctgcccacaacccagggcaccatgcacatcagcgcggtcttcccctgggccgacgacagccgcgaccaacgactcgcctacgcgatcatcacccccacacccatcaacgccggccagcaatgggacgaatgctgggccaccatcaaccccgcaaaccccgacgccgaagacctgctcaacaccaccgcgaccgccatacccggagccgcgcccgccacccaaaccaaacaagccaacaccatgctcggcaccaaccccgacctcgacacccgctaccggcagcgaaccacccgcagcatgctcgccatcacccccatcgccgcgttcgccatcgccatcatggccacgcgcgcgcgacgcatcgaaatagccgacgacctgcacatgggcatgccccgccaaggcatcctcgccaccaacgcgctcgaaaccctcgcatggaccctgcccgccatcctcaccgccaccgccatcacctacaccacggcacgctggaccagcggacacgccaacgcactcaccctgaccaccatccagcttcccgcactcaccgcagccctcatcgccgcgcaaatcggagctgccatcgccatcaccgccatacacgacaaccaactcttcgtcttcttcaaaaacagacaatgagcatgaggggtgccagttcagactgccataagccttgattaaagggcgagcatgtttttcaatgacacgcccgccctctatgcattgcccctttgtcgggacgcttgaagtttatcagttgtaggtcatttcctgagtaggagaatccgtcatcttgcaaatcccgggttatgctgtagtaaaacctttactaaagtttgcggggaggatgtcatggccacgctcaaggaggtcgcggaacgggccggggtgtcacagagcacggtgtcgcgcttgctgaacgacccatcgttctccatcaaggaggagacgcgacggcgcgtgctgcgcgtatgcgaggagctgggataccgcaacgtgttccgtcccgcgattgctgtgctggacgctcctccatccggggagaagctgcaggacgcatacttctccgatctgcggaaggttcttgcggagtgtgcggagtcgatggaattggaccagcccacgttcatccggtccatacgcgagctgacggaacgcgcggcggagttcgatgggttcatcaccgtggatgccacggtgtttcctgaagcggacctgcgcgccctgcatgcggcactcccgcatggcgtgtgcatcgacacgaatccggcaccgcacctgttcgactccgtacggcccgatctgtcgcagacgatgttggacgccctggacgcgatgattgcggcgggccgtagacgcatcgcgtttctcggcggcgtgggcagcatcatgggcacacatgactatcccgaggacatccgcacgttcaagacctgcgcctactacctgccgctcgccggcatcgtcgccagcctcgtcgtcttcctcctgaccgtcaagatcgacgagaacatgcacgaccacatcgtcgaacagctcgaagcgcgcctcgcctccgaggaaaccgacaagcagtaagaaatccaactacaaacaaaaagaccttgggtgggttgtcatctatagatgacaacccacccaccactcaagtcgttcgaatcgtaactgcgcaattatttaatgtaaatgactctattctaatagaatgtttccttctttcgtcgcgccaaaagaaacatcaattgtaatccgtaataatttgatgaatacatgatagttcttccaatcgtaagatactccgactggaagaactatcatgacgggaagcaggtccgacgtccgggtcagatcacggacgattcgtaaggaatctcatccgtagtctcggcgacatcctcatcggtatccgcgatatcgctggactgcgccgattctgagtgacggccgccagcactgttcccgtgtctgaaccggcgggcggcgaccagtcccacgccgacggcgagcagggtgattgccgctgcgatcacgccctggatggcggcgccggtatgggcgagcccggtccggtagccgttccagtcgtcggtgttgctgaccacttcggtgtcggggcagacgagcctgccgtcgatcgtgaccgcgtcatcgggtgcggacgtctcgtccttgccgtcgaacggatccgggtcggagacgacgcattcgaccagcggcgtgccggtgaccgtggcgcggtcggtgtgatgatcggtcacgcccttgaggatgcccttgacctcgacgctctcgccgggcttgaggacacggctgtcccaatcggcgggatattcgagatcggtcacccggccgtcgccggcgaccagttggtccttgaggttcaggtccttggttcggtaccatgcgccctgcttggtgtcggggtcggtggtgctggtgttggtgatggtgaacacgatgcgcgtgtcgccctgcatggccaatgcgtccttgacctggtcgcggtcgccggtcggccagccggaggcctcgtcccatttctcgatcttcaggctcggggtcatgtcgggcgtgtgcgtctcgacctggttggacgggcggctggtgccgttgagtgtttcgtcgaaccggttggcgatgtgttcgccggtcttgacgcgcttgcactggatgaacgcggtccatgcctgctcgttttcgtcgttgccgctgacgaggtcgagcatgcgttgggtcgccgtgacggtgaccacgcccttgtcatcctgggcgagggtgaacagttcgccgccgtacataccggcgtcgaagccgctgccggcgatcttcacgcccttgcgggcgatcaccttgccctgttcggtcaggtcgcgcatggcgtacacggcccattggccggtgtactggtcatgttcggtgtcgagcgggtcggtgatgctccagtcggtgaccttctggtaggcgcggtgcgcgggcagcacggagctgtcgagacggtagaggaacaggctgttgaggtacacgctgtgcttgtcgatggattcgccgtccaccttcacgaccacgtccttggaggggttgacgggtttgagggggttggcgacttcgttggtgtccttgcgggtgtcgttgacgacctgcgtggctttgttcttcacgatatgtccgtcggtgaccttgatgacggtcatcggcaggctcacctcgtagctcgtgcccagcatcgactggtcgatggccggctccttcaacgggtcgtggtccttcttttcggcgtattccttgaggttcctgggctgggggtcgcccttgatggtctcgccggtggccggcactttcgtgtccgcggtcttggcgtacacgtaggcgacgccgtcgatcgccgcgatgttgaacttcgcggtcacgtccttgccggtcgcggtgtcggtgacctcgatgtgcttggcgtcgagggagaggtattcgtcgtcccagtcgtcggtcatgccgagtctccagaccttgtaggcctggttggtctgcttggcgtcgatggtcacgcggtagtagattcggtcgcccagcagcgcggtcttgccgtcgatgctgatggacgggtcggcctgggtgtccttcttcaccggcgtgaagtcgggcggctcgttccataccttgttgctcggggtgatcatgttgttcagggtcagggcccactggttgccgattttggtgtccgtgggcgcgtccttggcgaccgtgccctcgaagcggacgatgatgcgcgggttcgcgccgttgcgccagttggtcttcacgtacccgtcggagaacacgaggcgcaccgcgtgctgcgcgtcgttccactgggtctcgtactcggtcttcgggatgaacctgccggtggacaggtcggtgacctccagggtctgcttgtccacttcaagatgctcgtcgtaggtgtcggtgaccgccacctcgccgaccgagtacgcgagattgccgggcaggtggggctgggtctccagacggtattccacgcgctggcccgggtagacgaccttgccgtccacggacgcctggtcgcctccctgcgaggattcgccgaccacgtccttgacgacgggcggtatgtagccgcatatcttcggctcgttcgtggggatggtgtgcgtgttgacgctctgggatcccttgttcgtcagcgccttgccgtccggcgcggtgcagaacgacagttcgtcgctcgactgcttgccgaagtcgtcgcgcacctggcccgcacccttgccgttggcgtaggacgccttgccgggaatgagcagcgtgacctgcttcgcggtcttcagcctcttcaatccctcgcggtaggcctggcctgcggtggcggtcaccgtggtgccttccaccgtgatcgtccactggtcggtgacgtccttgccgtggttggcgatgtcggtgacgctggactcgcggtcggtgccggcatcggcctcgtacaccttgatcttcgacttgtcgtcggcgtcgaacaggtagtcggcggccgaccagtcgtccgtgagcgtcagggtctccggggcctggatgaggttcttggcgatggtgccgttgaccaccgaggcgacccggtccccgtccagaagcgtcatatcgtcggcgccggtccggttggtctccttcgggtcgatgaccgcctcccactggcccttcgcgttcaggcggatccagctcttgtcgggattcggccgccacgtatcgaactgtttcgttccggcgtcggcctcgggctcgtggttccacttgccccaggcatggtccctgacctgctggaagtcggagggcttcgacacggtcacgtcgaagctgaattcgtagacatggtccatgggcatctcgcccttgtccgccgaacgcgcggccgacaccgtgttcgacgccttgtcccaattgatttcgaactcgccggaaacgtcgcggttgccgtcggtcctgtcgatgagcctgtagttgtccacggagtattcgacgccgttgggttcgatcacgtcgcggaaacgcatctcgtagccgccgcggccggtgccgtacgtgatggtggtgcggttcgtcatccggtcggcgctcacgc

SEQ ID NO: 2162 - DNA, 16001 bp, Unknown
  R51_24m  MAG No. k141_12950
cctacacgctgcaatccggaggagaccgacaacggtgtatcgacttgaatcatcaagtcgaccgagcccatatcaatgcctagctccaaactggaggtggccaccacgcagcgcaattcaccacgcttgagccgttcctcaatcattttgcgacggtctttggagaccgacccatgatgagccatggcgatgacatcatcgccctcatgcgagccgacaagcatggtggtggaaccgaccacagcatcgtaatgtgtggagaacccttcgcggccttccggagagcccggatcccgcacagtgtcgggattggtgccatgccgggtctgcgcatagagatcattgaggcgcgcggtgagcttttcggccacaccacgcgaattgacgaacaccaatgtggtgcggtgcgcgagaatctcatccaaaatactgcgttccaccacgggccagatggaaccggaggtacggtcgcccgccgctccaaccaacgcggaggaatcgaacgcatcactcgcatcagaatcgtccccagaagtggaagaaacatctctatcatccaccggcacaatgcccctgcgttcggcaagtcgctgcatggccggcgtgacaccgctgatatgcggagcggaccgttcagcctccacgccaccgacacgctgcttggcattcacggactgcaaatcacgcatgttttccaacggctcaatcatgcgcagatccattgcaggccgcccaccgggattcacgatggtaaccggttgtccgccgcccaggaatcgcgccgcctcttcaggcggattcaccgtagcggatagaccaatgcgctgcatatgaaggtcactgaggccagcatcgatggcggtatcactgccctcatcagcatccgcatcgattgcatctcgcttgcgcgattccgcgacaaggttctccagccgttccagacttaccgccagatgtgcgccgcgcttggtgcccgccactgcatgaatctcatcgacgatcaccgtatcgacagtgccgagaatccgccctgccttcgaagtgagcaacagatacaacgattctggcgtggtaacgaggatatccggtggatgggaggctatgcgccgccgctcctgtgcggtggtgtcgcctgaacgagtggcgaccgcgatcttcggcacgggcagcccttgcgcctcgcattgtgcggcaatgccctccaaaggctgttctaggttcttggccacatcggccgcgagcgcctttaacggcgagatatacagcacacgcacaccggcacgccgcgtgcgtggcacggtcatcagccggtcaatggccgagagaaacgcagccaatgttttgccggagccggtaggtgcgatgaccaagacattacgaccggaatggattgccggccatgcctgagcctgtgcctcggtcggctgaccgaaggcatgctcgaaccacaccttggtgggttcggaaaacaggctcagggtttcgtacatatgtacgattataggtcagctgaagtaggcgatgacttcttcggcggtgccgtaggcgctttgggcaccaagcttggtggccgcataggcggagacataggagccgatttgcgcggattgcagcagcgtatggccagcggccaagccagccagcacagttcccatgaacgagtcgccgcaaccggtggtgtccaccgcattgacttgcgcggcggatacgcgatgccaacgtccgttctcgatcaccaccgaccccgacgcaccaagcgtcactatcgcccggtcgaatccgtaatcggtgaatcgttcggcgacctcataccagtcgagtgattccacatcgccgtccggcagacccagtaactgagccacttcatgctggttgaccagcagaatatccgtggcttccaccagttcgtgaggcagctcgtccataaatggcgagtcgttgagcagcacggtcacgccagcgtcatgcgcggtctgtgcggcggcgataacggtggagatcgggctctccaaacacagtcccaataccgcgcattcggcgatggtcgtgcgatgtgattgcacatagccggcacttgccttggcattggaacccggcgaatagacgatggtgttctcgccctcagcgctcacggtgattaccgtggtgccactggggccttcaacgtgcaggatatcggcggtgtcgacgccggcctcatccagcttgcctaataggaagtccgcgttggagtcctcgcccaccgcgcccagcaactggacattgacaccgaggcgagcagcggcagacgcctgattcgcgcctttgccgcccggcaacactttcatggcaccaccattgacggtttcgcctggcttgggcagtcgtttggtggtcacggtgtaatcggcgttcatcgagccgaccacgattaccgagcccggcgcatccttcagcgcttccaatcgttcccgtacgggctcgggcatctgtttatgttcttcttcacttatcaccatgggctccaagcatagtaggcggcgggcccaaatgcgcgcatgatcagccgcgcaacttacgaagacgctcgtgcatggccaccatcagcaccaagagcaccagcaaataccacgggtagagactgattgtcacatattgcgcgatgatgccgaacagtggcggcatgagcagtgagcccacataggcacaggccatctgcacgccgacgacggcctgcgatttgtcttcgccgaagtaggccggcgtcgagtggatgacgcacggataaatcggcgcgcacccgaagccgatgaccaccagcccaacgaccacgccaaggtggtgaggcaatggcacgaacatggtgaggatgccggcgagcaccagcacttggccgaggcgaatcatgaccgggtccttgaatcgcatggtcagaaagccggaaagcgcacgccccacggtgatgcctacatagaataggctggcccagctggcggcggtgatcttgtcgatgccgctgtgcatcaccatgtagctggaggcccacagacccgccgtggattcgatggcgcagtagcagaagaacatcacgaggatttccttggcaccgcgaatggcgagcacgccggccacgccgagcggtttgcgttcagcaacagacgccccttcagcattaccacatccctcggcattgccgtcagatgatgcggcaccatcggtcgattcgccgcccccagtcgtgccacgtttcttccacagcggcaggctcagcaccaggatgacggtcagcatcacctgcaggatcgcgatgtaccgatagccccacggccagccttgcccttgagacagcgcatagcccatgatgtaggggccgaccgatgcgccgacgccccacatgcagtgcagccagctcatatgccggctttcgtagtgaatggctacgtagttattgagcgccgcatccacgccacccgcgccaaggccgtacggtatggcgatggccaacagcacccagtaattcggggcaacggagaaacctaccaaggccgccgcagtcaacgccaccgaaacggcggtgaccttgcctgccccgaatttcaatgtcattcggtccgaaagcagcgccgagacaatcgtgaacatggaaatcaccgcggagatgccgccagcccacgccaccggcacgttcagatcctggctcatggtgggccatgcggacccgagtagcgaatccggcaaccccagactgataaacgccacatagatgacggcaagcaacagactggccatgttccatctcccattcacagtacggcaccggttgtgataacgatgtcatcagtctatcgaatgactcatgggcaacacgcataaaacatatgacaacgtgctcacctcaaacgccaattacggaaattctcggtaagcacgatgtcattatcagcgacgtcttcgatcaggtatcgatcttggagcggtcgaaatcgtcggcgttgtcgacgatgaactgcttgcgcggcggcacgtcgtcgcccatcagcaggctgaagatctcggatgcctgggcggcgtcctccatgcggatgcggcgcagcatacgcgtgcgcggatccatggtggtgtccgccagctggtcggcatccatctcgcccagacccttgtatcgctggatgtcgtcgttgtaaccgatgtgcttcttgtcgaggtcggccagtttgccggccagctcgtcatcggaatacgtgtagatgtattcgcccttgtgcgagccggtcaacgcgatgcggtgcagcggcggtactgcggcatacacgtagccgtgttcgataagcggccgcatgtaccggtagaacagcgtcagcaacaggatacggatgtgcgcgccgtccacatcggcatcggtcatcatgatgatcttgtggtagcgcgactgttcgatgtcaaagctctggccggagccggcgcccaccacctggatgatggccgcgcattccttgttggagagcatctgcgtaatcgacgccttctgcacgttcagaatcttgcctcgaatcggcagcagcgcttggaaaccggcgttgcgggcggccttggcggtaccgagtgcggaatcaccctcgacgatgaacagttcggccacgtcgtcattgcccggctggcagtcggagagtttggccggcatcgaggcggattcgagcgcgttcttgcggcgcgtgacctccttggccttgcgcgactggatgcgtgcgtgcatttcgccgacgatcttctccagcacgcggccggattgttccttgtatccgcgtttggagccggtgatcatctcgccgaattgcttgtcggtgagccgggtgacgatcggcttgacctgcgcggtgccaagcacgtccttggtctggccttggaactgaggttcggccacgcgtgcggtgaccacggccacgagtccggcttggatgtcgtcgcgctccaccttcatggcggagcccttcatgttcaccttgagcttgcgggcgttgtcttccaccgccttgcgaatctgcttggtgatggcgttcatgaaaccgtccacgtgagtaccgccgccgggcgtctccacgatgttcacgaagctcatgattgtggtgtcgtagccgttgacccatcgcagggcgatgtccacgccgcaggtgcgttcgatttcctgggcgtgcagttcaccgccttcgcccacggcctgggtctcctccttataggtgccctcgccttggatgcgccagatgtcggagatcggctcgcctttggataggaagtcgacgaagtccttgacgccgccggtgtgcaggaattccacgacgcgcgggtgcgcgggctgctcgccgaacgcgccatcgacgacctggtcgccggccgtcagcgagaagtcctcctcggacaggctctcggtactgtcggcttgagcctcggtggagtcgtcgaagagttcggcatcgttggacgagacgtccaaagccggggcctggtcttgcgcaggttcgactgcgtcggcatcaatggcttcggcggtgtcagtcgccgtttccggtacgttttcgtcaacaatggtgattttgaggccgggcaccaggaagctggtctggcgcacgcggtcgatgagctgttcgtatgagaattcggcggttttgttgaaaatctccggatcataccagtagcgaatacgggtaccagtggttttgggagataccttgccgatgatttccagctcggtgggtcggttcttgcgagtgcgcttgaacggggaatcgggagacggattggccgggtcggcatccgtgtatacgccagggtgaccttggtggaaggtcatgtggtgcgtcttgccgtcacgatccacttcgacgtccagtcgggagctcagggcattgaccacggaggagcccacgccgtgcaggccaccgacggcgttataagacgagttgccgaacttggcaccggcatgcagtttggtcagtacgacctccacgccggacaggccggttttcggttccttatccaccggaatgcctcggccattgtccgcgacttccacggaaccgtcggtgtgcagggtgaccacgatatcgttgcagaagccggccaaggcctcatccacggagttatcgatgatctcccacaggcagtgcataagaccctgcgagtcggtggtgccgatgtacatgcccggacgcttgcgcaccgcatccaagccctcaagaacagctaggtccttggcgccgtattcttctttgggcatacagtcctatttttctcttcaaatgcctggctcccctcacagaggggagccagatgatcattgatccaggaagtcgcgcagggtctgcgaacgggacgggtggcgcagcttggacatggtcttggactcgatctgacggatgcgttcacgggtcacgccatacacacggccgatgtcgtccagcgtcttcggctggccgtcttcaaggccatagcgcatcttgatgacgccggcctcacgcggagacagggtttccagcacctgcttgaactgttcctgcagcagggagaaggccacggcgtcggacggagcgatggcgtcggtatcctcaataaggtcgccgaactcagaatcgccatcctcgccaagcggggtgtgcagggaaatcggttcgcggccgtacttctgcacttcctgcaccttctcaaccggcatgtccagctcgcgggccagctcgtccggcgtaggttcacgccccagatcctgcagcatctggcgctgtacacgggacagcttgttaatcacttcaaccatgtgcacaggcacgcgaatggtgcgggcctgatcagccatggcacgggtgatggcctgacgaatccaccacgtggcgtaggtggagaacttgaagcccttcttccaatcgaacttctcgacggcacgaatcagaccaaggttgccttcctggatcaaatcaaggaagagcatgccacgacccgtgtaacgcttggcgagcgagaccacaagtcgcaggttggcttccagcagatggtccttagccttcttgccgtcggcggcggcccacttgagttcacgcttgcgcttgaactccatgccttcactttcggtgtcgagcaggtgctgggcgtacaggccggcctcgatgcgctcggacaggtcaacttcctgttcggcgttcagcaggctcacacggccgatctgcttcaggtagtccttgaccgggtcggcggttgcgccggccgcgatcacacgacgcttcggattgcccgaagggatgatgttctcttcctcatcatccgtgtcggagaccacgtaggcacccttttccttgggctgctcgggtgccttggacttggcttcttcctcgtcctcgtcgtcttccacatcgtcgtcggcatcgtcctcatcgaggtcttcgtcgtcggcatcgtcttcgtcaacgtcgtcaagatcctcgtcgagatcgtcaacgtccaaatcgtcgtcgttgacctcggcatcgtcatcaagcccgtcatcgacctgagtgtcctcgtctttgacgagctcatcgtccttggccttcttcgcggttttcttcgcggcggacttgcgcgtggtctttttcgagggctctgcggacttggacttcttggcagaagtcttgcgcgcggtggtcgtagagctggccttcttcttggtctcggtctcctcgctggactcggctgtctgcttggttgccgtcgtttccttcgtggccaaaactgctccttctgatctctcgccgtgaagtgcatataccacacgggcccacttctggcaagggcaaatcgtcaactatgtgagtaaaccaccctccacggacgattattcccacatcgttgcccgacgtgttgccgatcaccacacgctttccttccgcgcatcgcgcataaaacctcggaaatccgccgtttctgttcattcagcccgagcaccatgccggtgccacgcctcgatcggcggctgagaatatcatcgccgccagcgaacaatcctcatcgagcagcaggcatcgcaaggcgaacaccattgctcgcggatcgcccagccaccataaggtgtaggcgattacggccaatggttgtatgcagtacggcaccggtgaggcttccgcgatatcgagcaacataccgatgccggcatggcaacgctccttatccggcatcatgccttcatcctcgaatgcgcaggtcagcagctcgcccattcgtgttctcgtacgtgccagatgcggtcgcgccgcgaattccatgagccatgacttggggcaacggctttcatcaataaccaacgagagaatcagcgcatcacgaatcgataaggtctcgcgcatgcccaccgcaaacgcggccatcgtctctcggtctaggtcggtgttcccggcatcgagacaagacagccattcatccaatggttcggccacccagtcggcattagcctgttgcgcgcctcgaagtcggcgatcattgcgaaattcctgtgatctcgtctccaactcatcaaagccaaagggctccgtctgctcggcggcgtgccgtttggcgtgtcggctcttacgcggcttgtgcggcgtgttgttgttcatcatgtcctccttgactaatggtgtgcaatctattggtgttgtggtgcgcgccgagccggatagctcatgcgccgagggggtgtgtgcccactatggctgaaaacgccgtatgacgcaggaaaaaacgaccattgtggttctagcttcaaaacccttgattcccaacgttcttgtgttcttcagaccctgtggataagttattaggcatgtgcacaactgctaacaaccgcgaaatcatcgagccacgcatcattcagttggtgcgggaactgactgccgcccccgccaccgacgaggttgccgacgccctgaaaccggtgatggaacaggttgtgggccaagccgcctcctccagccaaggaggcaaacgactgcgtgcgttgctcgcattggacgccttcgatattcttgctggcgacgtgactcctgatcggcgtgacgccatgatcgacctagcctgtgccattgaagtgtttcagacggccgcactggtgcatgacgacatcatcgacgaatccgatctgcgccggggcaagccttccgcacaccgtgccttggaacaggccgtacacagcggtgccataggccgtggcttgggcctgatgcttggcgatattctggccaccgcctgcattgaaatcacacaccggtccgccagccgtcttcccaacaccgatgccttgaacgaggcgtttcttaccatgcagcgcgaggtggagatcggccagatactggacttggccgtcgagatgaccccgttgtctgatcccgaagctctggcgaacgcctcattgaacgtattccgctggaagacagccagttacaccaccatcgccccactgctgcttgcactgctggccgcaggagagagcccggatcaggccaggcattgcgcgttggccgtaggccggccgctcggactggcgttccaactggccgatgacctgttggatgtcgtcggatcaagccgcaataccgggaaacccgttggcggagacattcgagaaggcaaacgcacagtgctgttggctgatgctctgtctgcggcagatacggaggataaggccgatctgattgccatcttcgaagcggattgtcgcaacgacgaccaggtagcccgcaccattgaactgttcacgtcgaccggtgctcttgatcgatcccgcgagcgcatcgctgccctatggggtgagtcccgtaaggcgattgccggtcttgagctgaattccgaagcgcagcgccgtctgaccgaggcttgtgcgcgattcgtccccgaatccttgcgatagtccacaatgcgagccgccgggtcatgagaccatgaacaccggtgaaaacccgtgacaactatgcgccgatgctccggccgcgtaaccggggccatgtacactgaacatgtttagtcgtgattaaaggaaccgtacgatacaacatgagtgagaacgagcccgcgcagatgattgagggacgctaccgcatcgtgcgcaatatcgccgagggtggtatggccaccgtgtatgaggccatcgatgagcgtctggggcgcaccgtggcgattaaggtcatgcacacacaactcgccaaaggcccgcatcgggagcagttcgtcgaacggttccgccgcgaggccaattcggccgcgtccatcgccaacccgcacatcgttcaggtgtatgacaccggcgagttcaatggacttgattttctggtcatggaatatgtgcatggcgtcaatctgcggcatgagatgaacgcccaaggcacattctccgtacgtgagacactgcgcgtggtcgcggagacgctggatggtctggcttccgcacatcgcgccggcgtggttcaccgtgacatcaagcccgagaacattttgatcaatgatcgcggccatgtgcagatcactgatttcggtctggccaaggccgccagccaggccacattgagctccaccggcatgctattgggcaccgccgcttatctggctcccgaaatgatcgagaacaatcaggccaccgcgcaaggcgacctgtattccgtgggcatcatggcatgggagatgctgaccggcaaggtgccgttcgattcggataatccggtgacgcttgtcttcaagcatgttcatgaggacgtgccgtccgtggccacggtctgtcagggcattgatccgtccgtggcggcgttcatcgcccatctgaccgcgcgtcaggtggatgcccgccccgccgatggcgcggcagcagctgaggaattgagccagttggccgccaaattgccgctggaggcgtggcaataccgtttgcatgccgaacccatcggaggtgatcataccgatgccaccgctgcagcgctggtaggcaatatcgccgagcaggccccgctgaccggcgtacctgccggtgcagcaacgttcgagccgtccgtaccggcgtttttggccgatgatgtcgcaagcaataccgccgataccggtggcgccgcagacgtcaatcctccggctcctccggtcgcccccaccacggcacttgattcgtcgacgccagccgatgcttcggctccccataagacgcaaatcatggcacagtccggcagcgagacacaagtgctgcctcaggccggcgatgccttcacccgagcgcttgccctttccgatgagccggacgtcgcttccaacggcaccgggccaaagaagcagcgcagcaaaaaaccgctcatcatcgtactggtgatcgtgctggtactggctgcaatcggcggaaccgccggctggtggtggtttaccggaccgggcagctattggagtgtgcccaagccggatgacgtgacctgcgatgcgaatgcaagcaccgaatgctcgttggccggcgcggattgggccacgtatgagagcacgttgaaggctctcggcatcccctacaagacgcacaaggaatacagcgacgacgtggcggaaggcaagatcatctcttcttccgtgaacaagaccaaggccgttgtgaacagccgcataagcaagcgagccaatcaggagcttacggtggtggtgtccaagggcgtgcggatgaccatcatcccgaaggatattctcgacgcgaattcggccaatggcaaggacccgttgaacgcgctcaagaaggccggcttcgataatgtcaagcatgacgagtcgaaggatgagtattcgatggacacgccgcagggtgtggcattgacgatctcccctgatcccggtaccacggccaagcacaacgatgaggtgacggttactttgagcaagggaccgatgccggtgaccatgcctaacatcgtcggtaaggcccaggatgagatgcaagccgcgctcggcgagttgaagctcacggccaatgtcaccgaacagtacgatgacaaggtcgaggccggtcaagtcatttccgcgtctcaggaagccggagcccagctgaagtggggcgatagcgtggacgtggtgatttccaagggtccggagatggcgacgataccgtccggccttgtcggcaaacaggaaagcgccgtaaccaagacacttgaaggtctcgggttcgaggtgaaaaccgacaaggtgctcggtggcctgttcggcacggtacgtaccgtgaaaagtggcgatacggacctatccaacggcggcaagattcgcttgcgcgatgccaacggcaaccccaccgtcatcaccctcaccatcgtgtgagatttgaatgaggctccctctgtcttcagacgagggagcctcatttgttaattacttttcggcttcttcagcggcctgctgggccttgagctcggccttgaccttctgggcgtattcgttcacgaattcctgaccgctcattttctggattgcggtggaaacacgatcggtcagcgaacgcaaatcatcatgtgtaatttcatcagccggcttcttcgcaacctcaatcggcttgccatacaacaccttggtcttgcccttcttgggaatcgacgtgccaatcggctgcagcttgtccgagccgatgatggcggtcggaacaatcgggcaaccggtctcgagcgcaagtcgtgcggcaccggtgtgtcccttgtacagtcgaccgtccgggctgcgcgtgccttcaatgtggataccgaacaggtgcccatcctcgataatctcgcgtgcatgctcgagtgcgccaagcgacttgctgccaccggaacgatcaaccgggaacacgcccacggacgtgaaccaccacttcttgaacttgcccttcaatcccttgccctcgaagtattcggctttgcccatgaagtgcaccatgcgcgggcaggtaatcggaatcaaagcatcgtcaatcaccgccagatggttggctgcgataatcgcgccaccctctcgaggcacgttattcagtccgctgacagcagggctcaaacgatgatgagcaatagggccgagacctttgacgaagaaccagtagagcacttggcattcctcccgcagacgaactagccattggccggtcgcctgattagagtgacagttatgactgagaaccagaatagcaatgccgacggagagcggccaacccccacgccgggcaacggacaggattccgatacttcgtccaagtcgtcgactcccggtgccgccggaccggccacgaatggtgccgatacaccgcaatcgcatgacatgaacgatttggatgcggcgtgggccgcgttcgaagccgagcatcaggccgacttgcatgacgtggcttcctccaggcaggccaaaaagttcgagaagcaggccaagaaacgcgagaaggaagcactgctttccgtagatgacttggatatcggctcgttcaccgatgatgctcgcccgagccgtggcggcaaaaaaggcaagcagtcaggcccccgtgatttcaccggctccagctggctggataccgataatgtgatggacgcctatgatgatggcggcttcactcccccgaaccctgatcttggtccggtcaaagcatctacggtactgctgacggcgttgctcatcatcggtctcgcaggcgaaacggtgatgatattcgttcccggcttgaacgcgattcctctcttaggtgcgctgctcaatattctcttcgggctgggcgtcattttgggtctgggcggattggtggccaaaatcctcaaccgcaaagaccgccccggtgatcagggtggctattacgacgacggcgcgagggtgtagttcgcgtaggttgtgtagtccttggctcccctctctgaggccgagccgttaagcaaacagcccagtgggctgtttgtaggcgaggtgtgagcgatagcgaaccaatgtatcacaggcatggctcgtccgtaattgcggccgagccaagataggtcacgaattgaagtcgatggactcctgcaactcgaaatagttgataatgaaggaaaggtaaacatattcgagcaaacccattccatatcacgccttggacttggcggtttcgatccacttgttgaacagggcttcagccttgccggagtcgacagcatcctcggccagcttgtaggcctcggcgaagcgctcggccagtgtgccgttgccgaccagattgccgtcagccacgatggcggaggcagcgttgagcagcgcggtggtgcgggacgtaatgtccttgccggccaggaagtccttaaatgcgttggcgttgacgtccggcacgccgcccttgagctggtcgacggtaatcttggcgagacccagatccacggtcgggtcgaactcggtttcggtgaccttgccgtcgcgaatctcccagacggaaaccgggccggtgggggcgagctcatccatgccctcatgcgaagtgtagaccaagccggactgaccacggctggcgtagacggcagccatgatcgggctcaccttgcggttggcgcagccgatggccacgtgtgccgggttggcggggttggtcaacggtcccaggatgttgaagacgcacggaatgccgagcgcggcacgaatcgggcccacgaagcgcatggccgggtggaaggtgcgggcgaacgcgaaggtgatgcccacctcgtcgcccacttcgccgacggcctccggcttcaaatccagcggcaggccgaggtcttcgagcacatcggcggcaccgcacttcgaggatgcagcgcggttgccgtgcttgacgatcttcacgccggctgcagcggcggccacggagcccatggtggacaggttcacggtggcgaagccgtcaccaccggtgcccacgatgtcggtggtcccaccggaaacgttcagcggcacggcgtgggagaccatggccttggcggcaccacgcacctcgtcggcggtcagtcccagctgctgctgcatagcgagcgcggcacccacggcggccggattggcgttaccttgcatcaggtcgtccacgaaccactccgattcctcagcagtaaggtggtctcccccgaccagcttggtgagaatcgacttccatgtgatctcggccatgatgccctccttggcgtttcctacgccgtgtgatgtatgttcgccgctcattgtaatggttcgtcatttcaaggccctgaatcttccatattgcaaaatatggcgctattgctgttttcgtggatgtcggttcgtcgtcgagccgttggtttcgtaagcgtgaggggcgttcccgcgtattctgttttccgaccaaagaaatgaatcacgaagaacgcctgggcaaaagcccattcaccggattgccgaacgtcaaaggcacagttgcagaggatgcgcggatcacggattcgccgccgcgtttcgaacccgtgctcgagatccgggtgcgcccacgtgcgggcatgctccgatgctcccgatgcggaaggaggcgccgcgggcatgaccagggcggcggcgtgcggcgtcgtggtcgcttccgtgccgtgggccgagccgggcagccggttcacacgcgatttcgaatcggaatgcgcgtggccgatgagcgtcgcgaaccagaagaccgtaagcggtttcccgcacgtcgcgtggcgcaccgccggaagacgccgcccatagggccgccgaacggttgaaggcgtcgatgccgtcttcgttcggcggcctcacgtcgatcggcgtggacgagaccggctaccgcaaaggccacacgtgcatcaccgcggtcgtcgaccacgaacggcatcgggcgatatgggcgcacgacgggtacggcagggacgtgttcggcctgttcttccaaacgttgacgcccgaacagcgcgcctccatcagggtcgtcgccggggacggggcccggtggatcgactcatgcgtgcatgagtggtgcccgaacgccgaacgcgcgcccgacgggttccacatcgtcagttggacgagcgacgcgcccgacaaag

SEQ ID NO: 2163 - DNA, 15652 bp, Unknown
  R51_24m  MAG No. k141_13066
cacttccatatctgggatccggatgcgcaggatctgccatggctggcaggattgccctcgctgcaacacaagtacacgattgaagacctagccgcacagtacgccaagtttggcgtgaatttcctcggcggcgtatacgtggaggtcgacgcggccgaccatgagcttgaggaccggttgctgtacgagaatgcaagtcctctgatcttgaagcgcatgttgcaaggacgggtaagcccttggatgcgtgtcccgattaatgccgatggcatcagggaaccgctgcatgtggattccgagccgcggggccgtgcgctcgaacccgaattcatcgccggtctacgcgcgatggccgccaagggattgccattcgagctgtgcaaccgtggcccggagttgggtgacatggccaaggcgttctcgcaggttcctgaagtgacggtcatcatcgatcatctcggcaacgtgcccgggcttgatgaggaatcgtgcgccgcactcgcagcgttggccgaactgccgaattcgtatatcaaggtttccggcgacaacccggtggacccggacatcgtgaaatacgtgcgggacacattcggcccgaagaaggtgctgtacagctccaactggccggtcgtggaactcaactcgacctttgccacgcacttccaactcatgctggacacgttcggcgaggacgaggacttcttcgaaaacaacgcccgccgcgcttacaacatcgactaaacccaagccccctctgatgagggggctatcgtccgcaggacgactgggggagaggccgcaaacccggtgccgcttgtgcggcacccctattccgtaacgaaaggaacaatcatgacgagcagcgccgaattctcaggcatcatctgcccatccatcaccatcaccaaggacgacggtgacatcgactatgaacgttgggggcagcatctcgatcatctgatcgaggccggtatcaacggcgtgctggtgtttggcagcatcggcgagttctatgccttccctctggacgtcaagaagcaggcggtcgacttcgtggccaagcatgtcgccgggcgcatcaaggtgttcgcgggcgtgggcgataccaacttgaacaatgtgatcgacttcgcgcgggcagtcgaagcaagtggagtggatgcgctcgtggtcgtttcgccgtattacttcggccctactgcgggaggtgcgaaggcgtacttcggcgcggtcgctgaagcgacgaatcttccggtgatcctctataatttcccaccgcgcaccggcagcgacttgaccccggagcttgtggccgagcttgccgccgcgcacccgaacatcgtcggcatcaaggacacggtcgacacaatcagccacacccgcaaggtgattcgcgcggtcaaggccgtgaatccacggtttgcggtgttctccggtttcgacgagtactatctcgtcaaccgcgtctccggcggtgatggcgtgatctgcggcatgaccaatgtggagccggagaccttcgttacgctgcaccgtgcatatgaggccggcgactatggcaccgcaattgaggccgccgaacgcatcagccacctgatggcgctgtacgatcagaccgacctgttcatctccgccatcaagggtgcggtcaaggccaagggactgaacatttccaccctgatccgtgagccagcggtgcaactcactgctcagcagtatgaggcgattaaggcgattctcaagtagtgtatatctcaggcttccgcggaatcctacggtggatttcgcggaagttttttacggtgattacagttgccggctcagctcagcagcgccgcgatgatcgcgataaacaccgggctggtcatggtgctcatcagaatgccgtcgcgcgcgaaggtgaggcccacgttgtagcgggccgcgtagttgtacacgttctggccggtgggcagagcggcgagtaccacgcaggcgtacagctcggagccgcggaagcccatcacgaaataggcgagcaggaacgcgatgattggcatgatgatgttcttgaggaccgcgaccgtgaagatggccgggcgatcgcccttctgctgcagcggcttggtgccgtgtagggacatgccgaacgccatcaggatcattggcaccgctgaatcgccgatcatgtcgatcgggtcgaaaatgaatttcggcactgggaaccagccgcttttagcggaaatcgcagagaccacaatgcccagcagcgaaccgataagcaacggttgatgcagtggctgcttggcgatttccttgatggagaccttgcccttggtggtcacgtccagcactgtcaggcccaccggtgtgaagatggcctgctgcatgaccagaatcggtgccaccagagccggattgcccagaatgtaggtggcgattggcaggccgatgttattggaattgaggtacagcgaattcagggcgccgatggtggcgtccggggcgttcaggtggaagaacatgcggttgagcaccaggaacaccacgcctaccagcacggcggagaagaacgccacgataatcgagggatggaagatgtcgaagatcggttccttggagaggatggcgaacatcaggcacgggctcgatacgaagaaggagaaccggttgagcaccatctgagcggacggcccgccgattcgcattcgtgcggcgacatatcccaccgcaatcacgatgccgataacgcagaagccttgcatggcgctgattagacctgacataatcctccctttcgccaccccagtgtggcacataaaaatgtattcggccgcaaaatctcatgtagtgggtgtgctgggcccgccgcccacgcggtacgctgttcacatgacgcttgaattgaaccgcaccgcatccactgccgagcagctgaacagcctgctcacccagatcatggagaacttctccgtgtccgaccacgagggccccctcaccgacgaggtcgaggccttccttaacgagcaagagcacctgaccgtccgccgtcacggcgacacagtggtggccagcaccgacttcggcgagccgaaccgtgtgatcttggccgggcacctcgatactgtgccggtcatcgacaatttcccaccgaagtggctggagcccggcgattcgctgattcgcgaagaaatcgcccacgctcatcccgaagaccgcgtgctgtggggccgcggtgccaccgatatgaaggcctccgacgcggtgatgctctacctcgccgccacgctcgacggccgcacgccggaaaccaccccgaaagtcgacctcacctacgtcttctacgaccatgaggaagtcgtcgccgaaaagaacggccttcgcaaagtcgtcgaggcccatcccgattggatcaccggcgatttcgccatcatcggcgagcccaccaacagcggcatcgagggcggttgcaacggtacgattcgcttcgacgtcgtgacccacggcgtggcagcgcactccgcccgcgcgtggatgggggagaacgccatccacaaggcggccgacatcctgagccgactcaacgcttacgagccggccaccgtgaacgtggacgggctcgactatcgcgagggcctcaacgccacgctgatttccggcggcaaaggcacgaacgtcattccggatgaatgccgcgtacacgtcaactaccgcttcgccccggacaagtcgctggccgaggccaaggctctgatgatgggcgcggatgccggtgccgaactcggcaatggcgagcatgtggccactggcggcgtgttcgagggctacggcatcgaaatgaaggacgaaagcccctccgcgcgcccgggcctgaacgccccgctcgcccaagatctggtccgactggtcaaggagcgcaccggccgcgacccgttggccaagctcggctggactgacgtggcacgcttctcccagctcggcatcccggccgtcaacctcggtgccggcgacccgctgctggcgcacaagcacgacgagcaggtgcccgaatccgacctggccgccatgaccgcaattcttaccgactggctggtctgacacctctctagctcccctctctgaggggagctgtcaccgcagggaggggagccgagagaacgtcagcctcgccgggccacgcccgcacaaaatatgtggcatactaaaggatggtggttctgcataaccatcagcgtgcgagatggcgtcgatccccttgcggctctcgagaatgagacaacgcaagcgccggtgtccgccacccgcaggacagacttgagacgaagttgcctttacgcggcgcgttttcgcgcggccacggtgagagcgtggtgtgagtcaagcgtataggcctggaaataggcgtcgtgatgcagcgcgccgcgaggagcattgtgcccactgacaaccgtgaaggtttcgtcaacgacggaaccgataattcaaccgtatccaatgccgattcggctgcagccgtgaacgctgcgcctgccgccgcctcccagcccgtcgaacctgttcgccgtcgtcgtggcggccgccgcgtggtccgtggcaccggtgctgccggcgcctccctggaactgcaagtgcaggaacgcaccccgctgtttgaagcccccgcgcttcccaatgccggcaccgcggccgattccaagtcatccgattccggcgattccgatgaacccagcgattccaaggattccgccgaacgtccaacccgccgccgtacgcgccgcgtttccacggccgacgatgccgccgaaacgccgcgtcgcacccgtcgtacgtccgccgcatcttccagcgataccgatgatgacgacgagactccgcgccgtccgcgccgcgccgcttccgcagtggccgacttggatagcgaggatgatcgtccgcgccgtccgcgccgttcgcgccgcacggtcagtgccgatgatttcgatgacgatgacgccccgcgttcccgccgccgttcagtcgtggacgatgacgattacgacgaggaccgttcggttcgccgccgctctcgctcccgccagtccgacgatgatgactacgaggatcgcccggttcgctcccgcctccgccgtgcgcctatggatatggatgatgatgacgaagaccgtacggttcgccgtcgttctcgccgtgcagttgcggatacgcacgaggacaccccggatgagcgcctgttcgacgcggtcgaatccctgccctctggccacgagaccgtgcgccgtggcaagccgatgacgtccctgctgttccaggaaccggtgctgcccgccgccgtggatgcgcacgataccgctgacactcgtgatgacgatgttgacgccgacgaacgcccgtctcgtcgctcccgccgctcgcgcagccacgacgatgacgatgcccagccgcgcagccgtcgccgcgacgatcgcgacgaccgcggccgcgcctccgccgaccgtgacgcttcccgtgatgccgcgtccggcgataccaacgccgatcacgacgatttcgacgccgacgacacctcggactcccgccgttcgcgccgctcccgccgtctgaacgcccaggagcgccgtgcagccgccgaagtcgagcagattgaggaagacctcgagctggacgatatcgcctactcgccgattgccgaggaggagggcgacgaggaatccgacgtcacccgcacccgttcgcgccgtcgccgccgtcgtggctcacgcggcgaaaccggtgccaacggcgagcacgataccgccgagaacgatgccgaggatacgcgttcccgccgtcgtgacgatcgcgatgatcatgaccgtgatcgcgatgaggacgatgaggagcagaccgtcactcgccgtcgccgccgccgtcgtggcggcaagaacggcgagggcaccgacgaccagagtcagaacagcgaacagccgctggtccgccgctcccgcaagcagcagtacatcgacgaaatcaccgatgtggaaggctccactcgtctcgaggccaagaagcagcgccgccgtgacaaccgccgtgagcgcagccgccagagccagcttatggaacaggacttccttgcacgccgcgagaacgtggaccgcctgatggtggtgcgcgagaaggaacaccacacccagatttccgtggtggaagacaatgttctggtcgagcattacgtctccgacattcaggaagtacagaccgtcggcaacatctatcttggccgcgtgcagaacgtgctgcccagcatggaggccgcattcgtggatatcggccagtcccgcaacggtgtgctctacgccggcgaggtcaactgggatgccgctcgtctcgaaggtcagccgcgccgcatcgagctggcgttcaagtccggcgacccggtgctcgtgcaggtcactaaggacccgatcggccacaagggtgcccgcctgacctctcaggtcacgcttgccggccgcttcctggtgctcgtgccctccggtggcatgaccggcgtgagccgcaagctttcggagcgcgaacgcagccgtctgaagaacatcgtctccaagatcgccccgaaagacatgggcgtgattatccgcaccgcggccgaaggcgcatccgaagacgccatcgtcaaggatctcgaatcactggtccgccagtgggagcgcatcaacgccaagcgcgaggaattctggcacggcaagcgcccgaaactcctgcagggcgagcccgacgtggccatccgcgtggtgcgcgacatcttcaacgacgactttagcaagctcatcgtggaaggtgacaaggtctacgaccgtatcgaggaataccttgacaccatggcccccgacctgaaggacaagctggagaagtgggacccggccgagcacgaaggcaaggacgtgttcgacaaatggtccatcgactcccagctgcgtaagggcatggaacgtcaggtctacctgccgtccggcggctcgattgtcatcgatcgcaccgaggccatgaccaccatcgacgtgaacaccggccgctttatcggcaagggcaagtccttggaagaaacggtgacgcgctgcaacttggaggcgtctgaagagatcgcccgccagctgcgcctgcgcgatatcggcggcatggtgatgatcgactatgtggatatggtcatgcccgccaaccgcgatctggtgctgcgccgcttggtcgaatgcctggcacgcgaccgcaccaagcatcaggtggccgaagtcacctcgctcggtttggtgcagatgacccgcaagcgcatcggccagggtctggtcgaggcgttctccgaggaatgcccgacctgcaagggccgtggtttcatcctgcatgatcagccgaccgtttcggccgactacgacgatccctacgcgcttcgcggtggcgacccgttcgtcaaaaccaacaagcacggtcgcggcaccgctcccgctcccgaaccggctggttccagcgccgacgtcaaagccaaactggctcagattgccgccgctgccgtcgccgccaacaatacggcggaagagtaacaggtgtgtcgtgcttgacacgcgggcaaaaatcatttgatttagtccgcatggtggtgtagatttgaaactcggtgtctgaccgcaggctcggtgcgtgttaggcaaggtagctttccaaaacataaaaggaacgataatgtacgcgattgtgaaggccggtggccatcaggaaaaggtcgaggttggcgacgtcatcctcgtgaaccgtctcgacgccaagaagggcgataccgtggaattcccggtctccctcgttgtcgatggtgacaaggtcaccctcgccgccgccgatctggccaaggtgtccgtcaaggctgaggttgtgaacgatgaagccaagggcccgaagattgacatccagaagtacaagaacaagactggtgttgctcgccgtaagggtcatcgccagaagctgactatcgtcaagatcacggcgattgcctgagttatagaaaggaccatgaatcatggcacataagaagggtgcgtccagctctcgcaacggtcgcgattctaacccgcaatacctcggcgtgaagaagttcggcggcgaagccgtcgtggccggcaacatcatcgttcgccagcgtggcaccaacttccacccgggccacaacgtcggcatgggcaaggaccacacgctgttcgccctcaccgatggctccgtgaagttcggtgtgcgtcgcgaccgcaaggttgtcgacgtcatcgcctgagcgatatagcgtcaagctttttcaagccgcgcccgtaaggacgcggcttttttgtaaggtaatcaatatgagtgattttgtggatcgagtaaccgtccatgtcaagggcggcgatgggggcaacggttcggccggcatccgtcgtgagaaatacaagccgttggccggtccgaacggcggcaatggcggcgacggtggttccgtggtgttcgtggccgaccgtaacgccaccagcctgctcgactatcgtttcatgccgcatcgtgtcgccggcagcggcaccatgggtttgggcgacaataaggacggctccaagggcgaggacctgattctgcccgtgccctgcggcaccgtcgtctttgaggcgcgcggcgaacagggcaaagccaagcatcccggcgcacagctcgccgacttgcgccacgagggcgaccgctgcgttgtcgcccagggcggtgccggcggcctcggcaacatcgccctggccaacaagacccgacgcgcccccggcttcgccctgctcggcgaactcggcgaggaacgcgacgtgattctggaactgaagtccatcgccgacgtggcgttggtcggtttcccctcggccggaaagtcgtccctgattgcggcgatgagttccgccaagccgaagatcgccgactacccattcaccacgctggtgccgaatctcggcgtcgtcatcgccggcgactctcgatacaccatcgccgacgtgccgggcctgattcctggcgcctctgaaggcaagggcctgggactggagttcctgcgccacatcgaacgtaccgaaatcatcgcccacgtgattgattgcgccacgcttgaaccggaccgcgacccgatgtccgactaccacgcgctggaaaacgagttggcgctctacgccgacaagctcgaactgccattgggcgccatcccgattcccgaacgcccgcgcatcgtgattctgaacaagatcgatgtgcccgaggccaaggaattggccgagttcgtgcgtccggagttcgagaaactcgggctgaaggtctttgagatctccaccgcctctcatgaggggctgaaggagctcaacttcgcgttgtctgcgctggtgcatgagatgcgtgaggaagtggccaaccgcgagcaggccgaagaggagacgcgcgtggttatcaagccattggagaccaagggccgccgtccgcgtcgcgctgatgagggcggcagtgcgcttgagttcacggtcgagcgccgcgaactcggcaatggcgaagtgttcttcgaggtgcgtggcgtcaagccggagcgctgggtcatgcagaccaacttcgacaacgacgaggccgtgggctacctggccgaccgcttggccaagctgggcgtggaggacgagctgcgccgcaagggtgcccaccctggtgacgaggtgcgcatcggtcgtggtgcccgtatggtcgaattcgattgggatccgaccatctccgccggtgctgaaatgctcgacggctccaacctcggtgcccgaggcaaggatctgcgtctcgaagagcaggacccgcgcacgcaccgccgctccaacgccgaacgtcgtgcccaataccacgagatgatggacgcccgtgccgccgtgcgcgatgcgatgatggccgaacgcaaggccggccactgggccgacccgaccgttgacgacgatcgccatgacgaaaccagtctgttcggccacggtgagtccagcgaagatggtgaaaccgaggaataaatgagcactccgagtcaggccgaggtgcggcgagccgtcgcatccgctggaaccatcgtcgttaaggtcggttccagttcgctgacgcagccgagcggtcacctcgatccaggcaagctcgacgctctggccgccgcccttgcccagatacgactgatgggcgggcgtgtggtactggtttcctctggtgctattgcggccggcttcggcccgctgggctttgacgaacgcccggccgacgtggctactcagcaggccaccgcagcggtcggccaaggtttgcttatggctcgctacgagactgcttttggccgtttcggtattcgcgtcggccagattctgatcactgccgaagatacgattcgtgccacccagtaccgcaatgtggaacgcacgctggaccgattgctggaccttggtgtggtccccattatcaacgaaaacgattcgctggcgtccaacgagattcgattcggcgataacgaccgtctgtccgcattggttgcgaacctagttcgcgcggaggctttggtattgcttaccgacgtggacgcgctatacacggcaccgccttcccagcccggctcccgccgtgtggaatatgtgcccaacgttatcgatgcacttggcgacatccaggtttccggctccggctccaaggtcggcaccggcggcatggtcaccaaactcgaggccgcgcgcgtggcggccgtctcgggcatccccacggtgctcacttgcgcctcgaacgcgggccctgcgatgatgggcgatccggtgggcaccgtgttcgcaccggttaaggcccgcggttcgtcgcgtcgtctgtggattggcttcgccgccgacccgcgcggcactattgtggtcgatgcgggtgccggccaggcgattcgcggcgggcgtgcctcgctgctggcggccggcgcgctcgaagtgcatggcgatttttccgccggcgatccggtctggatcgatgccgaaagcggcgaacacctggcccgaggcctcgccggcttcgattccgaagaaattccgcagatgctcgggcgtaacaccgcccaactcaagcgtttcctcggcccccagtacgcccacccactggttcatcgcgacaatcttgtacttgtgtgactgatgggatctgtcacacgacagatcccatcaccatagtgcggctctggcgatttttcgtgctgtaggtttagcatggaagccatgactatggcgcaatggcagactctttccgaccgtatcaacactgtggcaccgagcgctacgctcgccgtcgattccaaggccaaggccatgaaggccgccggacttgacgttatcggcttcggcgcaggtgaaccgaatttcccgacccccgcaaacgtggtcaaggctgcggcagatgcctgccttgacccgaagaattacaagtacacgcctacaccgggcctgcccgagctgcgcgaagcgattgcggctaaggtgctgcgcgattccggctacgaggtgtccgccgaccaggttgtggtgaccaacggtggcaagcaggccgtgtatgaatccttccagatcttgctcaacgatggcgatgaggtcatcatccccgctccgtactggaccagctatcctgaagccgtcaaattggcgggtggcgtgccggtcgaagtattcgccggtgccgacgtgaacttcgagccctcgcttgaggctctggaagcggcccgtaccgagcatacgaaggcaatcatcgtcaactccccgaacaacccgaccggagccgtctggaagccggaaaccatggaagcgatcggtcgttgggccgtcgagcaccacatttgggttatctccgacgagatctacgagcacctgaactatgacgatgcgcacaccacctacatcggtgccgccgtgccggaatgccgcgggcagctgctggtgctgaacggcgtggccaagacctatgcgatgccgggctggcgtgtcggctggatggtcgctccgcttgaggtggccaaggccgccaccaagctgcaggggcatatgacctccaatgtggccaacatttcccagcgtgctgcttgggctgctgtggccggtccgctggatgaggtgcacgagatgcgcaaggcgttcgatgcgcgccgccgtgcgattgtgaccgccttgaacgatatcgagggtgtcaactgcccgactccgaccggcgcgttctacgcttttgcggacatcaccgctttgcttggcaagccgctgggtcccaagggcacagtgtccgatacgtccgctgactttgccgccgcactgttggatgaggcccacgtggccgccgtccctggtgaggccttcggtgctcccggttacctgcgtttctcctacgcactggccgacgaagacctagccgaaggcatgcgtcgattcaaggaatgggctaactgagaagagtcgtgtgccgcgcacatgccacgcgcgcgacacgcgatttgcgataatccaccggagccgttactataacaacttggcggtttcgccgtggcgaagcgttctctacggaatgcacgccgaggtggattttcacctagggaagtggcgcaattggtagcgcaacggtctccaaaaccgtaggttgtgggttcgagtcccgccttccctgccaagttttcaataatcaagcagctgacgcgaggtacagaatggctaagacgaacaacagcgaaaaggtagtcaagccgaatgtcttcatgcgtatcggtctgtttatcaagcagatcatcgacgagcttcgcaaggtcgtaacccctactgccaaggaactgttcttctggtctctggctgtgtttatcttcgtgctgctgctgatggccctcgtcacgggcatggacttcggtctgggcaagctcgtgctgtgggtgttcggctgatccgcacaacctaaggtgaataacaacgcatgagtgatgaactgaatctcgagaatctcgacgccgtgccggctgaggagcctgttgtcgaggcttccgaagctgctgccgatgaggcagctgccccggctgaaccggttgctgacctttccgcagaatctgacgcatccgtcgacaatgcagatgttgagtccgccgctccggccgcgactgaatccgctcccgttgcttccactcagaccgagaccgtttctctggatgaggacgaggaagaagtcaacgaatccgagcaggccgaggaaaccgatgccggtcagcaggccgttgacgaattctccaagtccctgcgttcccttgatggcaagtggtatgtgctgcacacctactctggctatgagaagcgcgtgaagaccaacatcgagtcccgcgtcgcctccttcggcatggaagatcagatcttccaggtcgaggtgccgatggaagaagtcgagaagcacaccgaaaagggtaagaagatcatcacccgcgtacgtgttcctggctatgtgctgattcgtatgtggccggatgagaacgcccgccgtatcgttcgcgaaaccgaaggcgtgaccggcttcgtcggcccgaccaaggatccagccccgctctcccgcaaggaagtcgtggcaatgatggctccgatgatcgcttccgaggcactcaaggccgctggcgacaagcctgccgccgccaagaagcgcaaggtcgaagtctcctacgccgttggtgatcaggtcaccgtcaccgatggacctttcgccaccatggccgccgttgtttccgacgtggagcccaccacccaaaagctcaccgtgctcgtgtccatcttcggccgcgatacgccggtggagcttggcttccaccaggttcagaagctggattaaccccaaactttgcagagcccgaccatcgtggtcgggctttttgcgttgtccgggtggatttgcataatgggaaagcttgtgtctggagggaagacccgctagcacagcacagcaatataagttgcgggaggagaccgaccataggccgattgcctacagcatgcacggataaataacgagtcaagaccgagcgtgatagcaggcaagcggatctgaggacggcgaccattcgaaccgcgttatagaaagaagaaccataatatggctcccaagaagaaagtctcggcgctgatcaagctccagatccaggctggcaaggccaacccggccccgccgctgggcccggctctgggttcgcatggcgtgaacatcatggacttctgcaaggcatacaatgcccagacgcaggacaagatgggtcaggtcatccctgtcgagatcaccgtttacgaagatcgttccttcaccttcgttctcaagaccccgccggctgcagctctgctgaagaaggctgctggcattgagaagggtaccgagaacccgctgacccacaaggtcggctctgtcaccaaggcgcaggttcgcgaaatcgccgagaccaagatggaagatctgtctgctcgcgatatcgaggccggcatgaagatcatcgagggcaccgctcgctcgatgggcatcacggttacggactgataaggagaaggacagatggtaaagcgttccaagaagtaccgcgaagccgctgagcgcgtcgatcgcaacaacctctacaccgccaacgaggccatcgctctgctcaagagcatgcctgcctacaacttcgaccagaccgtcgaggccgtgttccgtctgagcgtcgacccgcgtaaggccgaccagctcgtgcgcggtaccgtcaacctgcctcacggcactggtaagaccgccaaggtcctcgtgttcgcccgtggcccgaaggccaccgaggccaccgaggctggcgccgacatcgtcggtgatgacgacctgatcgcaaaggttcagggcggcttcctcgacttcgacgccgtggttgctactccggacatgatgggcaaggtcggccgtctgggccgtgtgctcggtccgcgtggcctgatgccgaaccccaagaccggcaccgtgaccatggatgtcaccaaggctgtcaaggacatcaagggcggcaagatcgagttccgtgtcgacaagaacggcaacctgagcttcctcatcggtaagatgagcttcgatgagtccgctctggacgagaacttcaaggctgtggccgacgaagtcaagcgtctgaagccgtccaccgtgaagggccgttacctgaccaaggcgaccatcacctccacgatgaacccgggcgttccggttgacccgaacaccctggcctgaggctagcgagcttcaatagctactgaaagggacttcccgtaaagggaagtccctttttgcatatgcgatgaccggttgcgagaaggtgaacctggatggtcacgcaatcgaattcttgcaacacgccggtgaacgcatgaatttgttacgcatcggcaatgcaaaacggattattctggtatcagaacagcgcaaataggctgtttgcgacacgccgaaggaaccgtgtgattgcaacgattcctgaggcttttgcgcgccttgatttgcgcgaatccaaacatgcgtgtaagttattcacctgttgccgctcggcgcggcgggttccttcttctggttggtttcctgtcttgctggtgtggtggtggtttgagaactcaag

SEQ ID NO: 2164 - DNA, 16981 bp, Unknown
  R51_24m  MAG No. k141_13989
acggtctccgaccgcctcggcatacgtcttgccggcgctgtgcgcggaagcggcaagggtgaccacctcgaaccacgggtgattctcaagcagcgtgataaaacgctgaccgaccataccggtggcgccgagaatgccgactttcaacttttcggacataacaaccttctgggtttgacggattgatttcacgttcgggcagccgtagcgaaatggccacacgtatccatcaatcttacgaatcgggcggaacaagaagaaccgggtgcccgtatgctgggccggatcgccggtgcgacgggacgccggaaccggctggaacgtcacggcgccgccctgccgcgatgctctacactgggagtcatgtcgaaggcgtcggtagaagcgcagcgccagttggaccgcatcgtggcattggggtacccggacgtggcggatgtgagcgccgcggcattccgctccctggcccgtccgctgatcgaggcgctggagcataccgattttgacgagcgcatcctgctggcgcccacgcgcgagctggtgtcgcccgaatcgctgatttcccgtacgtcgatcaaccgcatggccggtttcgccacgatgccgccgcgcgacatcgcgagctttttgccgcaggacggcttcgagccgcccgagggaccgttctacatcgtcgtggaaccgcgcaccggtaccaagtacacacaaaccgcgagcccgacgtggcccgcaagctcattgactccgacgagcgcattccgctcacgctcgaggagggactggccatcgccacgcagcatccgggctggcttcaggagaaaaacgggttcaacctgctgggctcgcgcagcgccgacggccgcgtgcccagcatctggctgagccagaacgccccgaggctcggtgcggtgtgaccgaattccaagcacacgtggcttggcaacgcattctgcatggcccgcaggggcgtctcgctgttccgttagtgagcggattgcgcggcttgtcggggccgcgccgcttgcccgctgacttgttgccgcacggagtccacatacgatttcaccggctggctgcagctaagacggtgaaatcgtatgaccgtatacggaaactccggctgggcgcccgtcagccggtgaaaccgtataagcgcatgccatttcaccggctggccgcggttagcatcccatgtcactatttgttgataatttctggttcccctccaggggggcaagcatagtaagcgaatgcatgatgctaaggtcggcaggccgagagaagacacgccgaagtaatctgcctttaacagattagatatcagatgtctgatgatagtacgataggaatgctcagcgaacccgcatcgggcatttcaaggaggaaagcgatgccatcattcgtcgtcggcgcgtacgcgtcattgccgcaggggcgcgaagcccaggaagcctattacgatctgctgggcggtcagccctggatcgacggcaccgagatccccttcccgggggaccttgccgaaaccgccgaccgcatctggcttgccggccaactgcccaggcattggaagaacaatacggtcactgccattccgggcaccatgcagcacgtatggaaggacccgaacttcggactggccagcccggacgaggacggacgccggttcgctctggcgttcttcaagcagctgcgcgacgcgctcgccgactttgcacagtggcggggcagccaggacgtcaagttcgtcgaaatccacacggcgcccacgcgcattgccagccgcgacgcgatgaccgcctcgttgcaggccctcgcgcagctggactggtccggcgccaagctggtcatcgagcactgcgacaagtacgtcgaggggcagaagccggaaaagggcttcctgccgattgaggacgagatcgcgctgtgcgggtcggccggcatcgggctcaccgtcaactggggacgctcggtggtggaggggcgcacacccgaaaccgccgtggcgcacgtggaggccgccgcgaaggccggcgtactgagcggcctcatgttctccggtgccggcccggaggagacccagtacggctacggctggatcgacggccacctgcccatgaacccggacgagccgacctcgctcatggacgccgccgccatcaaggccgccgtgcgcgccgccgggacgcaggagcgcccgctcgactatctgggcgccaaggtgtgcgtgcccaaggccgcgacggtcgaggagcgcctcgactatctcgcgcgcatccacgaggcggtcgtcgcatgagcgcgggggcggcgcccacctacctcgccttcgacatcggcggtaccaaggtcgcctcgggattcgtgacgttgcccgcaagcgcaaacgcaaacgcgggcgcggacggcaggcccgaggtgacggcccgctgcgaaatcccgaccgaggccgcgcgcggcggcgaggacctgaagaaccgcatcgtcgccttcgccgtccgccagcttgagcgcgccgaggccgagggcgtggcgatcgccggcgtcggcattgcggcggccggcgtgccggacagtgaaaccggcgagatcgtctccgccacggacatcctgcccggctggcgcggccagcgcatctacgacgcgttcgcggccgtgaccgacctgccggtgcacatgatcggcgacgtgggcgcgcacggtctgggcgaggcgacgtacggcgccggacgcggcaggggcgtggtgctctcgatcggcgtgggcaccggcatcgggggcgcgatcgtcgtggacggcacgctgttctccggggcgcatggcgtggccgggcacgccggtcatgtgccgagcggcctgggccgcggattcctgtgctcgtgcggcacccgcgaagggcatatcgagccggtcgcgtcgggaaccgggctgaaggacctctacaacgcccgttgcgatgccgaagagggcgaaccggtggcggacggctcccaggttgcggcacgcgcggccgctggggagcccctggccgtcggcgtgatcgaggacagcgcccgtgcgctgggcgagtgcatcggcggcatgggcaatctcatcgacccggacgtcatcgtcgtttccgggtcggtggtcaaggccggccccctgtggtgggacgccctgcgcgcgggattcgaggattccgcattgcagctggtcaggtccgcgccgctggtggagggcgaactgggcggcgccgctccgctgatcggcgccgcggtggccgtgcgcaggcatgtcgcgcagggccgcccgtgatccgccgccgggctgggactcccctcgggaggaccccgagccggcgctctccggcaattcgtcgcgcaatcgtcaacacccatatgaagcaatgtcaaggcatgaggaaaggaagcgcatcatgcatcaggtaatcgaaaagatcaggggcgggcttgtcgtcagctgccaggcgtatccgggcgagccgctgcgccaccccgagacgatggcccaaatggccatggccgcggtggagggtggcgcggtgggcatccgctgccagggacttgccgacatcgctgccatcaaggggcaggtgaaggtgccggtgatcggcatctggaaggagggcgacgagggcgtctacatcaccccgacgctgcgccacgcccgttgctgcgcggccgcgggcgccgacatcgtggcgatcgacgccaccggcaggcctcgcccggacggtctgagctacgccgacaccgtgcacgcactgcacgacgagggcgtgatcacgatggccgactgcggcagtttcgccgacgccgagcgtgcggtcgaggccggcaccgacatcatctccaccacgctgtccggctacaccggtgagcgtctcaagaccgacggcccggacttcgaactgctcgagcggatggtcaaggcgttcccggacatgccggtgctgtgcgaggggcgcatccacacgcccgaccagctgcaccgcgtgatggaatgcggcgcgtgggccgccgtggtgggcaccgcgatcacgcatccgacgacgatcacgcgctggttcgccgcgaagctgtgatgcctcgcggcatgcggccgtgacgctgcatgcccggtgccgcagccggaatgccggtgcggtggcatcccgtggcatgggccgccgtggtccgttcgactatgccgtcgaacggaccacggcggtcttgtcgtttggcgccatatcccgtgtttgccgcgttcgtcggcggcgaaagttgccgttatgttaacagacgtcagatgtcttattgcagaatggtaaacaaacattttcggaacgataacggtcggcgaagcccgaaatattgccgatattcaaggctggtgaagtataggcagatcagcgcggaggggccttgacgagtgaattcctcaacacgccgatttgaaatcagacatcagacgtcttaccattaaggaggttcgacaacgatgttggtggttccccgcaggagtcccgcacaaaccgcaatggtccgccgtaacgcggaaaggccgaagcggacgcaggccggggaacggtcaatgaagcaattaggaaaggatcgcgtcgtctgtcggacggtgattcgaaattcactcaatgatgaggagatcgcatgatcaagagaaacggaaagttcaaggccgccgtggccgcggccgtcgccagcctgatgctgctgtccggatgcggtggcggcacccagaccgccgcgaagaccggaactgccgtggcggacaccattaccgcccaggttgcctatgcgagccgcgacttcagcccgtccaccacctccggcgccctgccgatggccgcgaactggcacgtcaccgaaccgctgtacgcgctggactacagcacctacaagccctatgccgctcttgccaagggcgatccggagaaggtctccgacaccgagtacgtggtcaccctgcgcgacggcgccaagttctccgacggtaccgccgtcaccgccaatgacgtggtcagctcctaccagcgcaccaccgccaccggctcgctgtacatttcgatgcttgacttcatcgattccgtcgaggcgaagtccgacacccaagtgacgttcaagctcaagaaggcgttcccgctcttcaagcagcgactggcgttgatccagatagtcccgtcgtccatgagcgatgccgacctgaagaacaagcccatcggctccggcccgtggaagtacgccgagatcaccgaccagcaggtcaaattcgagaggaacgacctgtacaacggctcctacccggcccaggccaagaacatggtgtggaacgtgaccgtggacgacaccgcccgcgtcaccgccatgcagggcggcaagaccgacatcatggaaatggtcccggcccaggcgctccagaccctccagtcgtccggctccgagctgaagaccgcgcagggcttcaacctgccgttcctgatgttcaacaccaagaagaagccgttcgacgacaagcgcgtgcgccaggccgtgttctacgcgatcgacgtggacaagctgatctccaaccagatgagcggccaggccgaagcggccacgagcttcctgcccaaggattcgcagtactaccaccaggcgaagaacgtctacaccaaggacacggccaaggccaaggaactgctcgccgaagccggggtcaccacgccgatcagcttcacgctgtacaccaccgaccattcctggatcacccagctcgcaccgcagatcaagaacgatttggccgagatcggcatgaacgtcgacatccagtcgatgaagtcctccgcgctgtacccgtccatcacggacaaggacgacgctgactactcgatggtcctcgcccccggcgatccctctgtgttcggcaacgaccccgacctgctgatgaactggtggtacggcgacaacgcctggaccaagcagcgctccttctggaagggctctgacggctacaaccagctacatgagctgatggacaaggccactgccgcttcttccgattccgaacgacagaagtactggaaccagtgcttcgacctgctctccgaagagctgccgctctacccgctgttccatcgcaagacaaccacggccgtcaggaagggcgcgttctcctcttgggaggccattggctccaccggcatcaacctggtcaaggccaagctgaactgacgcaatccacatatgccatcaccggctgaaccgaacggacggcaaggcaaccggggcgtcctgcgaacgtgcggatgccccggccccgcccgcggcgcatctgaaccgccgatggcgcacgcataggagcttttacagtgagcaatctgttacgactgttgggcaggcgtctgatcgccttgccgttcatggcactcggggtcacctttttggtgttcttcctgatgtccttctcccagtacgatcccgccgtcgcggcgcttggcgagaactccacccccgaggcgctggccgccttccgccacgagatggggtatgacctgccgtggtggcagcagttcttcaactacatcgtcggcttgttccgcggcgacatgggcgtgtacggcgtcaacaaggattccgtcgcggcccgcgtggcccaggcgttccccgtcacgctgcagctgaccttcatcggcctgatcatcgccatcgtgttcgccatcgtgttcggcgtgctcgccgccctgtaccgcgacacctgggtcgaccagatcatccgcgtggtttcgatcatcgccatcgccaccccgtccttctggctcggtgtgctgctgatctacgtgctgcagatcaagatggcgtggctccccggctccggcgacctcgtcccgttcacgcaggaccccggcgcgtacctggcccgcatggccatgccgtccttcgccctcggcctgcccgtggccggccagctgacccgcatcatccgcacctcgatggtcgaggagctcgacaaggactacgtgcgcaccgccatcggcgcgggcgtgcccaagagcgtggtcgtctcgcgcaacgtgttccgcaacgcgctgatcaccccagtcaccaccctcggcatgaagatcggctacctgatgggcggcgcgatcgtcatcgaggtcatcttcgccctgcccggcatgggcaccgcgatgttcgacggcatcaacggcaaccagccgatgctcgtccagggcgtggtgctcgtcgtggccctcgcgttcatcatcatcaacatcatcgttgatctgctctatgtgctgatcaacccgcgaatcaggacggtgtgacgatgctattcggcaagaacaaggcggccgaggccgcaagcaggcccggcgtcaaattcaatcgcttcagcaagatgaccgtgggaagcaagatctccttcgtggtgatcgcgctgctcatcgtctgcgccgtcttcgcacccgtcctttccccgcacgatccgctcgagatcacgatgagctaccaggcgcccaccggcgaacactggttcggcaccgacaatctcggtcgcgacgtgctctcccgcgtgctctacggtgcccgctactcgctggtcatcggcctgagctcgatcgtcttcgcgctcatcgtcggctcactgatcggcgcgcttgccgccgtgacccgcacgtggatctccgagctcatcatgcgcgtcatcgacgtgttcatgtccgtgcccggcatcgcgctcgccgccgtgttcgtctcgatcctcggccagtcgatgatcggcatcatcatctcgatcggcgtgctctacgtgccgcagatcgcccgcatcgtcagggcgaacatcatcagcgagtacggcaaggactacgtgcgcgcggtcatcgtctccggcgcccgcgccccgtggatcctcttcaagcacgtcacccgcaacatcgccgccccggtcatggtgttcaccaccctgtccgtcgccgacgcgatcgtgttcgaggcgtcgctgtccttcatcaacgcgggcattcccgagcccaccccgacctggggcaacatcctgtcctccgccaaggccggcgtgatcttcggctactggtggcaggccatgttcccgggtctggcgatcatgatcaccgtgctgtgcctcaacatcctgtccgagggcatcaccgacgccatggtggccgccccgacggccccggtgaccaagtccgccgccgacgccgaggccgagcgcagggaggatcgcctcctgaccgacccagtcgccgcctacagggagcaggccgaatccctggccgattccctcgccgcactcaaggaggccgaacttaagcgcaccgaccggttcgagccgacgagcacggccgccccggtcatcgaggtcaaggatttgtgcatcaagttcccgcgccacggcgacgtgaacgtggtggaccacgtgagcttctctgtgcgtcccggcgagaccatgggcctcgtgggcgagtccggctgcggcaagtcgatcacctcgctggccatcatgggcctgctggacccgaaggccgagatcagcggcgagatcctgttcgacggcaagaacctcgtcggcatggatcccaaggagcacaacgccctgcgcggccacgagatcgccatggtctaccaggacgccctctcctcgctcaacccctcgatgctgatcaagtcgcagatgaagcagctcacctcccgcggcggcacccgctccgccgaggaactgctcgagctcgtgggcctcgatcccaagcgcacgctggaatcctacccgcacgagctctccggcggccagcgccagcgcgtgctcatcgccatggccctgacccgcgaccccaagctcatcatcgccgacgaaccgaccaccgcgctcgacgtcacggtgcagaagcaggtcatcgacctgctcaacgaactgcgcgaaaagctcggcttcgcgatgatcttcgtctcgcacgatctcgccctcgtggccaaggtggcgcattccatcaccgtgatgtacgccggccaggtggtcgagcagggcttcaccaaggagatcctcaccgatccccgccacgagtacacccgcggcctgctcggctcggtcacctcgatcgaggcaggggccaagcgcctgcaccaggtgcccggaaccgtgccgtccccggccgacttccccaagggcgatcgcttcgctccccgctccagccacccggacgttggcctcaacacgcgcccgatcttcgaacgggtgcccggcacgcatcactattacgccgccctgccggccgatgccgacgtcacgcccgccgcggcgacagtttccacccaggaaggaggtgcccgatgagccacgccgccgaaacccccaggaaggatcccaacgttccgatcatcgagctcagggacgtcgaggtggtgttcaccacccgcgccggatcggggctgttccacaagaacaggatcaccgcggtcaacaaggtgaacctgaagctcatgcccggccagaccatcggcatcgtcggcgagtccggctgcggcaagtccaccacggccaacgtgatgtgcggcctgcagcaggccaccagcggcaaggtgctgttcaagggccaggacgtcacccaccgcaccgccaaggagcgcatggacatcggccgcgtggtctccgtggtcttccaggacccggcgactgcgctgaacgcccgcatgagcgtcatcgaccagctgctcgacccgctggtggtccacaagctcggttccaaggaggagcgcgacaggcgcgcccacgagctgatccgcatggtcggcctgcccacctcggtgctgggcgccctgcccgggcagctgtccggcgggcagcgccagcgtgtcgccatcgcccgcgccctgtcgctcaagccggacgcgatcatcgccgacgagcccacctccgcgctggacgtctcggtgcgcgcacagatcctcaacctgctctcggacctcaagaggacgctcggcctgtcgatggtgttcatcagccacgacatccaaaccgtccgctacatctccgacgaggtgatggtcatgaaccacggcaccgtcgtggaacgcggcaagacgatggacgtgatgcgcaacccgcaggacgggtacaccaggatcctcatggacgcggcgccctcgctgctgcatcccaccgcggccgaatgcgcgtgaggccttcctcgcgttgaaatcgcgttcgcccgattccaacgccgaataatttcagcagtccattttttaatcctcaaagacaatcctcaaagaagggacacatcatcatggcaacccaattccgcggggtcattccccccgtcgtcaccccgctcaccgcttccggcgaagtggacaaggccagcttcgcccgctcgatcaaccgcatgatcgacgccggcgtcgacggcctgttcacgctcggctcgtccggcgaggtggcgttcagcaccgatgcgcgtcgccgcgagatcatccagaccgtgattcaggtcgtggacggccgcgtgccggtgttcgtcggctgcatcgacaccgaaaccaaccgcgtgatcgagcatgcgaaggaggccaaggagctcggcgcgtccgccatcgtggccacgtgcccgttctatgccctgggcggcatggccgaggtggagcgccacttccgcctgattcacgccgccgtgccggacctgccgctgttcgcctacgacatcccggtgtgcgtgcataccaagctgccgggcgacctgctggtcaagctgggcagggacggcgtgctcgcaggcgtcaaggactcctcgaacgacgacgtggccttccgcttcctcgtggacgacaacgccaaggccggccatccgctcacgctgctgacgggccaggaggttgtggtcgacggtgcctacatggccggcgccgacggctccgtgccgggcctggccaacgtggaggccaccggctacgtacgcatgtggaaggccgccgaagccggcgactggaccacggtcaggaaggagcaggactggctggccgcgctgatgcgcatcgtcaccgtgccgcagggcgtggcgggcttcggctccggagtgggcgccttcaagaccgcaatggcgctgctgggcgtgttcgacaccaaccagatgcctgatccggtgctgccgctcaagggcgagaatgtgaaacgcatcgccaccgtgctcgaggagtgcggcatgaagctggaacgcacccccgaagaggtttccgcctccactgaggcctgattgccgcacaaccatatgcgttgcgcgaatgcccgcccgcatgcaagcgcgtggcggcgttcgtgcggcgcaacgccaataggctcatacgaaaggaattgccatggctgaagtgatcatcgtcaaatccgagcaggaggccggcgaactgtatggccgttgcgtggccgatctgatcaaggccaagccggacgcggtgctgggactggccacgggctcgagcccgctggcggcgtaccgggcgctcgcgacaatcgtcagggacgagggaatcgacgtatccagggtgcgcggtttcgcgctcgacgagtacattggcctgccgctgacgcaccccgagtcgtaccatgcgaccatccaccgcacggtggtcgagccgctgggactggacccggccaaggtgcacgtgccgggcgacgcgctgaacggcaccgcgctggaggacggcgacaaggtcgccggcgccggtgcggcatatgacgcggcgatcgaggccgcgggcggcatcgacgtacagattctgggcatcggtaccgacgggcacgtgggcttcaacgagcccggatcgtcgcttgcctcgggcactcgcgtcaagacgctgaccgagcggacccgcatcgacaacgcgcgcttcttcgacaacgacatcaaccaggtgcccacgcactgcatcacgcagggcatcggcacgatcatgaaggcccgccacctcgtgctgctcgcgttcggcgcgggcaaggccgaggcggtcgcggagaccgtggagggcggcgtgagctcgtactgcccggcatccgccctgcagctgcacccgcacgctacgatcatcgtggacgaggcggccgcctcgaaactgcgcggcaaggactactaccggtattcctacgagcacaagcccgcctggcagaagatctgaggaaacgcagatgcaaaaacgctatcaggcgacgatggtcgcggatgcgctcgccgccagggcgggaaccttcgtcattcgcaatgcagtcaaggccgatgcgcgtggcgtgcagctcaacgcatgggtgagcgtgacggacggcgtaatcgacgccgtgggcacgagcgacgctgaccttgaaacccgcatcgcccatctcagcggcggggaccaggtcgccgaggtcgatgccggcggcatgctcgtgacgcccggctacgtggacatccatgcgcatggcgccggggagcgttcgttcgacgacggtgccgagggcatcgccgtggcgcgcgcgtaccacatgctgcacggcaccacccgccaggtgctctcactgatcaccaatccgctggatgtgatggcgcggaacctcgaatgcgtcaggtccgtgatggcaacgcggcccgacgtgctcggctcgcatctggaggggccgttcctggcgttggcccgcaagggggcgcatgacccgaactgcctgtgcgatccgaccccggagcgcgtggagcgtctgcttgaggccgccgacggcacgctaaggcagatcaccatcgcccccgagcgcgaatgcggcatggacgcgatccggcgcttcgccgcggccggcgtggtccccgccgtgggacactgtgacgccgactatgacgtcgcacgccgggcgatcgacgccggcgcgggcatcatgacgcacatgttcaacgcgatgaacggcatccaccaccgcgagcccggcccgattccggccgcggtcgaggatccgcgcgtcacgatcgagctgatcaacgacggcttccacgtggccaatcccgcgcttcgcctggcactgggtttcgcgccgcatcgcattgcgttcgtcaccgacgcgatggccgccaccggttgtgcggacggcgcctacaaactgggcgcgctggacgtcaacgtggtgggcggccacgcccggctggtgtcgaacggcgcgatcgccggctcgacgctgatcctcgaagtggcggtgcagcgcgccgtgcgcgagctcggcatgggcctgaccgacgcgctcgaagccgccacgctcaccccggcgcatgcgctcggccttgatcggccgaaccccgtaaccggcgcgccgctgggcctggtggcccccggctacgccgccgacctgctgctcaccaatcccggcacgctcaccgtgaccgcggtgtggtgcgcgggccgtcggatcgtgtaacgggttactttttgaaggggcgtgtcgcatgtcggtcgggccgactggattgcccgcgccaatcggcccgcggtttcgggtttactgctcctggacgatgcgacgcttgagaatcgattcgatcggctcgtaatggtcgaacacggcctcgcggtagtcgtccacattgccggccagcgccgcgttgagcatgcggtgatgggcgtcggcggtacggtcaagttcgctggaaaccgccagtccgagctgggggagcacggccatgtgcacgagccacagggagcggaccatctgcttggccacggtgttgttgagcgaatcgagaattcccctgtgaaattcgatgtcgagcccggtgaacgtcttgccttccttggcttcggcgctcatgcgctcggcaagttccgtcaggcgcggctgctcggttcccgccagggacgcgcagacctcctcggcgcatcccaggtcgaggaagcgccgcagttcgaccacgtcctgcagatcggtgaaattcttgccgaccgacgccatcgaccggaaggcgagcgtttccaccatagggtccagcgacagggaaccgacgaaggtgcccttgccgtgctccaccttgacgatgttcagcgcctcgagcttgcgcacggcctcgcgcaccgacgaccgggacgccccgatggtgtcgcacagctgcgtttcggtgggcagcacgtcgcccggttgcagacgttcgcgcagtatgtacgacttgatcgcgtccatcgtctcgtcgcatcggctgcgggaagagacctgcgtggtcgaccagttgcccagggacaggcgcgccagcgcggccagctcctgcgtactgtattggccttgcggcgcgtcgggttccgtatccgttgcgcgtgagcccgccgtggctcggtctgctgtgccgttcatgatgactccttgtcgtccgtatggttggccgcgacgcccttatcgtggccatgtgaaaaccatgcaagggggatatgcgtaatgtaaacccccgtcgtctctatttcccacaatagtcccaattgtgaaccttcacattctacgtcgtgcgtcgtttcacatattgccatgcattgatagacatgatgatgggggtgcacgcacaggctgcccgtccaggtccgtccgccgtcctcgctcagtcgcaccatgccccgtccccggtatggcaccatctggctggcgttggcgaacagcaccgcgtcagtgccaagctgcggcaccgcaagggcgttcggctggctgaagatctccggcaaggcgggatcgaactcaagctcgtcccaggtatcgccgccatcgtggctgaccgccttgcccacgcgtccgctggcgtgctggttgcggaaaaacgccactacgtcgccgtccgcgcgctgtacgaacgtcgtttcgctggtcgttgcgtcgtcgtcgcgcatggtggctggatcgacgacggtcccgttgatctcgcgcccctcgttgatcatgcgtccgcgtcgccaggtttcgcctccgtcgtcgctgatcagtgctccgccggaatagtgggcgcggctctgcccgctgcaatagaacggcatgagcagacgaccggcatatggccccttgtccagctggatgccggttcccgggcatacgcccatgaaatgcatccattcctctttgaccattgcgtcaatgaggaatggcggtgaccaggtctcgccgtcgtcgtcggaatggatctgcgcgatgtagcaggtgggaaccgcatgccagcgttgcgacgggtcggcatgcatgggacttcgccacacgtcgccggcgtcggccacggcgtccagcgtggtctcattgccctgagcgtcccgcagacgcagaacgccgtcgcggttcacgccgatgccgcgctcgcagttggtcaggccgatgcctccgggattgagatcgatcaataccgtgatgcgtccgatgctccggtccactacggagcaggagtcgagcgcgctggccccgtccagcccgtcctcgcgtccgggcatgtcgatgaccgtctgcatcggcatccagttgcgcccgccgtcggttgacctgcggatgacgaagttgatgtggttgggggcgtcgttgctgatcgccgttcgctggtcggccccggcgatcagcgtgccgcggacggtgcggatcagcgagggtatgcgatagctggccgacccggcgtatcccgcgtcgaacagcgccgtggtgaccatcgggggagtgtgagcgagccgtgcgatctgcccgtcggtaagcgcgtggacgtacaggcctccacggctgacctcgcccatgagccgcaccccggcgatattgcgccccacggtgaaagcgtcgatgccttttcggccgtggcgtggaccggccagatccgcgaaccacatctggcccggctggtgcagcacgctgacgccgtccataaagaggtcaacggcgccgcgcgaggagcggacggccagatcgtgccagcctccgtcatcccaatggcccggcgcgtggcatgcgatgcccgctccggattcgtcccgcatggccagcgtcagtcctccggcgccgatggcgacggtcatgcgctcgcttccatcgacgccggccgcgaggatcgtgccatgctgtccgcggccgcgcaggcggaatctcgcatggacgctgcccgcatccgccagggcgatgcgatcggtatccctgggggagagccggtccgaggcgaagacgatatccggcttggccgccgcggcatgctcggcgatgcggacggcgtcccaatccacggggtcgacgaggaacgcattgcaggcaatggcattgggtgagccgaggtcgaatgcgcccgatgggtggacccgtgagggattgagattgccggcgcaggcaaagcattggtatccgtccaggtagatgcgcgtgccgaacgcgccgaaggtcaatgcggcctcgtgtatcgttccaggatcgaggccgaaggcgtcttcgatgtcgaggctgacgtgggactgcgcatttgggtcggccgggtccggggacagggaccgcgccgtcagcgtgaggtgcccgtcacgcacggccaggcaaaggtatggggcggcagtgggaattccgtcggcggtggcggggacctgcgcccgccagatcggcccgtccgcacgtacggagaattcggcgatgacggtgcccgcgccgtgtgggaaatccgttgtctgccatggtgccatgctcgtcgcctcggtcttgtgatgggttgtcgtacgtctcgatatcgagacatcagacatctgataagttaatcgtatcatatggatgccaatgaaaattggcacccgttgtctatttgaaagtgcgacaccctttagattggagattgtccagataaccagtgaaggggtgtcgcgccttgggtcaagtgtattcgcacctgtcggaagaggaacggcggatcatccggatagagatcggcaacgggacgagcatacggcggatcgccggcctgatcggcagacacgcctccacggtcagccgcggaatcaaacgcaacacatgg

SEQ ID NO: 2165 - DNA, 2795 bp, Unknown
  R51_24m  MAG No. k141_14166
ctggtaccgtcagttcgccaagctggtgctgaagctcacccgcgacgaggactacgacgtcgacgagaagaagaaggtcgtcggcatcctggacccgggcatcaccaaggtcgaggacttcctcggcatcgacaacctgtatgagccggccaacaccgccctgatcggctacctcaacaacgccatcaaggccaaggaactgttcctgcgtgacaaggactacgtcgtcacccagggcgaggtgctcatcgtcgacgagcacaccggtcgtatcctgccgggtcgccgctacaacgagggcctgcatcaggccatcgaagccaaggaaggcgtggaggtcaaggccgagaaccagaccttcgccaccatcaccctgcagaactacttccgtatgtacgacaagctcgcgggcatgaccggtacagccgaaaccgaggccgccgagttcatgaacacctacaagctgggcgtactgccgatcaagaccaacaagccgatgatccgcaaggaccaggacgacctcatctaccgcaccaagaaggagaagctggccgccatcgtcaaggatgtggccaagcgtcacgccaagggacagccggtgctgctcggtaccgcctccgtggaaagctccgaagtggtctccactctgctcgacgtggccaagatccctcatcaggtcctgaacgccaagcagcatgagaaggaagccgccgtggtcgccgtcgccggccgcaagggcgccgtcaccgtggccaccaacatggccggccgtggtaccgacatcatgctcggcggcaacgtcgagttccttgccgacgccaagctcaagtccgaaggctactctccggaagacaccccggaagagtacgagaagcgttggccgggcaccctgaacgagatcaaggcccaggtcaaggacgagcatgaggaagtcaaggagctgggcggcctgtatgtgctcggcaccgaacgccacgagtcccgtcgaatcgacaaccagctgcgcggtcgttccggccgccagggcgatccgggcgagtcccgcttctatctgtctctggaagacgatctgatgcgtctgttcaacacccagctggtggcccaggtcatggccaagggcatggaggaaggccagccgatcgaggccaagtccgtcaccaagggcgtgcgcaccgcgcagaaggccgtcgaatcccgtaactatgagattcgcaagaacgtgttgaagtacgatgacgtgatgaacaagcagcgcaccgtcatctactccgagcgtcaggccgtgctcaagggcgaagacatccacaaggacatcctgcgtttcatttccgacaccgtcgagtcctacatcaagggtgccaacaagggatccgagaaaccgaaggactgggattgggagggcctgttcaaggcgctcaacaccgtgatccccaccaaggtcgacgaagacgaggtcaggaagatcgtcggcggcctcaagggtgcgaaggccgtcgaggccgtgcgcgacctgatcgtcgaggacgccaggcagcagtacggcgaaatggaggagaccatcggcgagaccggcttgcgcgatctcgaacgccgcgtggtgctcgccgtgctcgaccgcaagtggcgcgagcacctttacgagatggattacctcaaggacggcatcggcctgcgtggcatgggccagcgcgacccactggtcgaataccagcgcgaaggctaccagatgtacaactccatgatcgaggccattaaggaggagaccgtccagctgctgttccacatcgacatcaagcaggtcgccaccaccgacgaggccgttgacgaggtcgaggagaccgccgaaagcgccgacaccatcgccgtggcctccggccccgacgagaacggcgaatccgtggtcgaggccgccgagggcgaagtcgaggaagaggacgaggatacggacgccaagcaggcgatcgccgaatccgcagccgcctccggggccggcgagtccacgctgcctgttgccggaccggctccgatcagccacgccgaaggcaaggtcccggtttccaagcgtccgaagagcgaagagctcaagacgccgtgggccgacggccgcaccttccctggcactggcaagaacgccccgtgcccgtgcggttccggccgcaagtacaagatgtgccacggccagaacgagaagtgacgcatcgctagttagtaactagctcatggctccccacacggggagccattttctatgcggttcatcagcatgtattcgtgcggtgccgtacgcgcgggacggcacgcgattttcgcggattttgacgtcgtatcccacactgttgcgggatggcacgagtgtcaatcgattgactagcgtggcgtcccgcagtacgaattacggaatcgttgaaattccgccattctcggtgttatggtgtcacggtccgcaaagggtgatgtgggacggcacggctcaaacggcgaaaaagagctgccgtcccgcagttttacgggatagcacaaaaaagaggcttctgctgttttcgtgggttgggttcttggttgtggtgggcgtatgtcgagtccgccgcagcggagcatgacgagggcgatgggattgttcgcgtggtggaagccgtaggccatgcggatggtgaccttgatcctgttgtcggacgcctcgagcctggcgtttgaacagcccaattcgattgtcccgaggatgtcgggcccatgacggcggatctttcgggcgagttcgacgatctcggggatgcggctgtgggacgcccggaaca

SEQ ID NO: 2166 - DNA, 38887 bp, Unknown
  R51_24m  MAG No. k141_14181
tcgaccttggacgggtccttgccggagaacgcgccaccgccgtggtgggcggcgccaccgtaggtgtcgacgatgatcttgcggccggtcagaccggcgtcggccgccgggccgcccaggatgaacgaaccggtcgggttgaccagctggcggtagttgtcatgcggcaccttggaacccagcacctcatcaagcaccgggtcaatcacgtgcttcttcagctcaacagcaagccaatcctgcgtaacctcaggatcatgctgggtggagatcagcacggtgtccagacgaacgggcttatcgttatcgtcatactcaatggttacctgggtcttgccgtccgggcgcaggtgcggcacttcaccggacttgcggacctcggtcagacggaaggcgaggcgatgtgccaaatagatcggaagcggcatcagcgtcggagtctcgtcggtggcgtagccgaacatcacgccctgatcgccggcaccctgtgcttcgtaacgttcttcgcggctggcggcggtctcctgatcgccagtcagacgggcaacgccctggttgatttcggcgctttgctcggtgatggccaccacaacgccgcaggaatcggcgtcaaggccgacttcggaggaggtgtagccgatgttgcgcagggtttcgcggaccttggactgcacgtcgcagtaccccttggacgtgacttcgccgaagaccaggaacacgccggtggcggcggaggtctccacggccacatggctggacggatcctgggccagcagatcatcaagaatggcgtcggagatttgatcgcagaccttgtcagggtggccttcggtcacggattcggcggaaataagccgatgttcttctgtcatatcatccctttcttcaggacttatcgccccgcgggatgcgaggcacaatgatacggtgtcaatttttacttgtcactgcggaagcgggcataaataaaggctcgtgccaaccagcgcggtggctcgagccttacgtcttgttcgctcctgatgatgagttatagctgattgcgataactcaggcaagcgtgtcgctcaaaatcagttgtgagagaactctcacaccatcattcggcgacgaactgtccaaacaatccaaacgaatcgtctgaatcgatcagttgccctcgttggcgtcgtcctcgcccaaggtctcctcaagcagaccctcgtcgatctcgcggaaggcgatggacagaggcttctcgttgttctggtattcgaccagtgggccgacgttctgcagcaggccctcgttgagctgcgtgaagtaggagttgatctggcgtgcgcgcttagcggcgaaaatggccagcgcgtacttggaatcggcgtgcttcatcagatcgtcgatcggcgggttcgcaagaccgtcgggtgtcgggtcagtaccaaaagccattgttcttatctccaaacattggaaaatctatctcaaccgaagcaagtgtagccgtttggggggacttctgtcagccctataccggactctcgccagaggaatgtattccaaaaaaatgtgtgagaaacattacgtttttgcaaattccattattcgactcttgacaaatggcgtgtccctcgcaaaggcttgaatagaaccatgactgaaatgcgatctgcaaaaattatgtcagggcgcgtctttgcaggcgcccgagccctctaccgtgctgcgggcgtcagcggagacgacatgggcaagaagcccatcatcgccatcgccaactcgttcgatgagttcctgcccggccatgtccacctcaacaaggtcggccgcatcgtttccgaggctatcaaggaagccggcggcattccgcgcgagttcaacacgatggccgtggatgacggcatcgccatgggccacactggcatgctctactccctgccttcccgcgacatcatcgccgacaccgtcgaatatcagtgcaacgcgcactgcgccgacgccctcatctgcatcccgaactgcgacaaggtcgtgccgggcatgctgatggcagccctgcgcctcaacattccgaccgtgttcgtctccggtggcccgatggaggccggcaccacggtgctcgccgacggcacagtcaagagcaccgaccttatcgacgtgatgtacgccaccgctgacgacagcgtctccgatgaggaactgctcaactatgagaagaccgtctgcccgacctgcggctcctgcgccggcatgttcaccgccaactcgatgaactgcctgaccgaggccatcggcctggctctgcccggcaacggcaccatcctcgcctcccactcctaccgcaaggacctgttcaagcgtgccgccaagcaagtcgtcaagatcgctcaccagtactacgacgattccgacgattccgtgctgccgcgctccatcgccaccaaggaagccttcgagaacgccatgaccatggatgtggccatgggcggttccaccaacaccgtgctgcacatcctcgccatggcccagtccgccgacgtggacttcaccctggacgacatcgagcgtatttcccacaccgtgccgtgcatctgcaaggcctcgccgtccggcaagtgggagatttccgacgtgcatcgcgccggcggcatcaccggcatcctcggcgagctcgaccgcgccggcaagctgcacaccaacgtgcattccatcgactacccgacgctggaagccaagctggccgattgggacatcatgcgcccgacctgcaccgaggaagcccagcagatgtacaaggccgctcctggccacatcatctccccggagccgtggacgcacaccaccctgttcgactcgctcgaccgcgaccgcaccaacggcgccatccacgacatcaaccacccggagattcacgaaggcggcctcgccgtgctgcgcggcaacctggcccccgacggctgcgtggtcaagaccgccggtgttccgccggagatctggaagttccgtggaccggctctggtggtcgactcccaggagcaggccatcgaggtcattctgaacgacaccctgaagcctggcatggcgcttgtgattcgttacgagggtccgaagggcggcccgggtatgcaggaaatgctgtacccgacctccttcgtcaagggcaagggcatcggcaaacaggtcgccatgctcaccgacggtcgctactccggcggttcctccggtctggccatcggccacatggcgcctgaggctgccaacaagggcccggtggcgctcatcaagaacggcgacatcatcgatatcgatatcgaagcccgttccgtgaacgtcgaactgactgacgagcagctggacgagcgtcgtcgcgagcttgaggctggcgacggctacgtggctcaccgcaaccgccacgtctcccaggcgctgaaggcgtacgccgccttcgcccgctcggccgacaagggtgcgacgcgtgacccggagctgatcaacaagctctccggtctcaactgatcgccgattgcatagctgaaaggcccggcatcttctttatgaagatgccgggcctttactgtgcttccgaaggcgggagcgatattgcttgttatcgcacgcaggcggcgggggagaggcgtgcgcctcgggcccagtcggcggcgcgcatggccttcttgccttgcgccttgacttgggtgagttccagcggcgtactgccggtaccaacccacacgttcttcttgcccaccttcagctcgccgggctgaagctcggccggagtgttgggattggactggtcggccggttgtgcggcgagaatatgcagggcgagggatttagcggttgactcgtcattatcggcgattggcccttccgcaaacagttcggtccatgccccgggatgtggcgtgcaggcgcgaatctgacggtcgatggcctcggcctcgtccgtccaactgatgcgggcgtccttcaccgtgatcttgtgcgcgtattccaggctctcggccggctgcgcggtgaatgtggcggtgccttcacctacggcggccagcgcatccacatacatgggcgcgccttcctcggccagacggtcaagcagttcgccggaagtctcacggccagtcagttcgatggtcagggaagcgacgatcgggccatcatccaaaccctcgcccaccttgaacacgtcggcgccggtggtcgggtcgcccgcccaaatcgcacgctgggcgggagcggcgccacgccacttcggcaggttggagaaatgcaggttgtaccagcccatgggcaccgcatcaagcacgttcttgggcaggatattgccataggcgatgacagcggcgatatccgcatgcaggtcgttcaacgcctccatgaattcgggggagcggggtttgagatcgatgacgggcaacccgagctccagagccgtcgccttgaccgggctgggcgtgagcttgcggccgcgaccggtaggcgcatcggggcgggtaatgacgccgaccacatcaaaacgtggatcggtggcaaaggccttgagcgagggcaccgccacgtcgggggtgccggcgaacacgagtttgagcatggtcctccttgaaatgtcgatgctcactgcacggccggaatgttcacgccattggcgatgagcagttcacgcagcttgaccggatcctggaaacgtacgccacggatgccggccgcattcgagccgacgatgttcatggccttgtcgtcgatgaacaacgcgccatcggccttgatgccgaactggttcaacgcggcctcgtagatttccttgtgtggcttgcgcagcttgacaaaaccggagacgagcttgccatcaagctgctgcagaatatcgcactgttcctcggccacgtggaacagactggattcccagttgctcaggccccacacgccgatgccggcagccttcaggtcattgaccagcacgcgcgcgcccggcacgatgccggtcagggagtcgcggaagttcttgatgtagtagtcgaggatgtccgcccacttatcgcccttgtcacggcgcatgatggcgatggcctcgtcggtgctggtgccgccgtccatcaggtcgttgacatcgtagaagccggagatgtcgttgtcgaggaattcgtcgatggtcttctggctgtagcgggggatgagtacggcgaccggatcccagtaaatcagcacgttgccgaaatcgaagatcacgtcggtgatcggcttgccggcgttcgcagcggcctcgccatccgcgaccagcacgtcgtaatccatatccggctctccaggccaacccttcatagtgtcctccttctagcgatgttcattctgtaattatcgtttcacgtgttgaagacgattagatcaggtccttgggatctactcggaagcgaagctcgccgggttcgcgggacgccacatgacgagcggtttcccggtgcagtcgggccgccagctcggctcgccgactctgcggcacacggattactgccttcacccggtcggccgtggcttcgagctcccgggcgtcgaccgtgtccggttgcgcgatcggcaccgggcccaacatgccgggcagctcgccgcaggccgtccaatcgccgcccagggcgccgatacgctgcatcagcatcatcaccgcatcacggcggccccacacgcaggcggcggccacggccggcggcataccggtctccacacgctcctcaagatccttggctgcaagaatcctcgaatcccagagcatcagcgattgggcgatggccgggtcggtttcgccgagaatcaacgcttggccgccacgggaacgcggcgcgcacaacgacaccgcacgcatccacgcggtcaacgtatccaaccgagcatccacgcccaacgcatacaggctggtccaagcgtcgagcacggccactgcgcgatactcatggccagccgatccctgctcggcactgaccggacgcacgcgcggttcgaaaccgggagtggcgatgacgatcatcggctggcaagccacatcgcgcaccaggccctgcgtcttgctggacaaaactactggcacgccgcggaacaacccggccagttcagccgcagtgcctgcagcacccacgcgcaccacgcgcatacgttcatgcccacagcccgggcacttccagttgatggcggcagccccgcaccagcggcatcgcggtgtggagtcccggcggtcggccggtagttgcaacggtccggaacacttggcgcagcgcgcctgacgatggcatttcgcacaactcagagtctcactgacgctgtcttgcggaatggacagcagcacggggccgctctccaaagccttagatagcacgcggacggccgtatgcggcacgcgcgccccgatggacgggtcggcaagacgcgcaagctcatcgcgattgagccaacgtacccaaggcgtcgcatccttcagcggcgaggcgagcgggtgaatcgcggtggaatagccgctcaccggggtctccaccgtatccgggccggtgttttcccactggctttgcggggtgcgcgcattggccatggccacgaacacgccgccatgggacttggagcgcagccgcatcacgccacgggcctgtggatatggcatcataccgtccatgttctgataggcggcatcctccagaatggcgaacagtgccgggcctgcaaccggcgcatacatcaccgcgcgggtgccgatcaccaccttcacctggcccaacgccacggccagatacgtgcgataccggtcggccgcaggcatggtctccgcattgagcacggcgacgtcgcccacccagccgccggcgggtgccggggcgaacggtttgagtccataattgcgcagcataggcatcaggtcttcgacctcgcgcatggtgggcaattcaaccacggcagctttaccggcactcaacgcagtggccaccatccatgccatgtttcgttgccactcctgtgcaccgggcaacgaatcaaacacaaaagattggaaacgttgaccggtaagcgcgtcatgaagcacattgacatcggcgtaattggcggtcagacgacgatacccctgcgcagctccctccgaaacggtactggcaacggcaaaggtagagccagcaggtttggtcccatcgggattggtgccacgcccggcaaaaccaccctgcgtattatctggtagggagccgccgaccggtcggcggaacgacgcggctaaccgctgttcggcctccaccttggccacgcgcggtggcacggcgaaacgcagaatattggcccgtgtgccgccataggctttggcaaccagaccgatatcctcacgcatcgaagcgggaaccagtacatcggggcttagcactcgctcgatatagcgaatcgaagagcgcggcgtatcgctggtatcggtgcgtgcccagatcacgccgctgaccctctgaccgccaaaccgcacgcgcaccagcacacccggttgtgcggcctcgctgtctttttcatcaatgaagtagtcgaatgtctggccgaggtggagcgcctgcacatccagcacgacttgcgctatgggatgctgctcggccggcgtatgctccgcaggcgcacgtttacgccgcttgcggggagccagccccgcaagcgtcaactgttctgcgcctgaagtagtcatggctcaactataagtgccggagccgaggtcggtaaaattttaccggcgcagataatcgagcacgtgggttaggtcgcggtcgttgatggctttgtcggcggcgagctgggtctttggcttggcacagaacgcgagacccagaccggcggcctgaatcatcggaatgtcgttggcgccatcgcccacagccacggtctggctcatcggaatacccaaacggtccgcccacgcttgcaaggcgtgcagcttcacggtcttgctcacgatttcgccgagcaccttgccggtcaagcacccatcggcaacctcaagccggttggcaatccaatagtcgatatggccctcggccgccagcatatcgaccacttcatggaagccgccggacaccacgccgaccttccaaccgtgttcatgcagcgtgtcgataagctccagcgcacccttggtgaaatgcagcttgtcatgcaccgtgtcgaacacggagatcggcaggccctccaacagggccactcgtgcgcgcagcgcatcgcagaactccagttcgccgcgcatggcgcgtgcggtcactccggcaatctcctcaccgcagccagccaccacgcccaactcgtcgataacctcttcgtcaatgagcgtggagtccacatccataaccagcaggccgggcttgctcagcgtcggcacagaaaccgcagaatcagccgggctcccaacttcgctctcggcggacttgtcaacaaaatgcacatcttcttgcgtcatgcttctgattctgggaaaaccttgggacaatgccctctatgaatttttccatggcagccgccactattcttgcaaccgaccccacacccatctgcaccaccaccgaacccggcctgatcggcaccatcaccgactggctgatcatgctgatggaaaccatcggcggtatcggcgtggccttggccatcgccctcgaatccatcttcccgcccatcccgtccgaagtcatccttccgctctccggcttcaccgccgcacgcggcaccctgagtctgccgggcgcaatcatctgggccaccatcggctccgtactgggtgcctggaccttgtacggcatctcccgctgggtgggcctgcatcgcatcaatctcgcggcagacagaatccccggcgtcagccgcaaagacgtgagcaaagccaacgactggttcaccaaatacggcacatggtcggtgctcatcggccgcgtgattcccgtggtacgctcgctgatttcgattcccgccgggttcaaccgcatgaacttcctgcacttcaccggctggaccctgctcggctcggccgtgtggaacaccatcctcgtttccgccggttacctgctcggcgaccagtggtgctcgattcaaggcgcgctcggcgtgttcgaggacgtggtcatcgcggccgtgattgtggtcatcgtatggttcgtggtgcgaaaagtgcgtactgttatacgtaacaggaaatccgccgacggcaacgaatagggtctgccgactgccataagttgccgaaaatcccggatagaagggaagcgaagaacccgcatgagcgacaccgaagatctcgccgcgctgaacgatcgcctgatggccaagaaccatgcgctcgccgaagcgctgagccgcgccggcaaggaactgaccaaggcgaagtcacagctcgcccagctcgctcagccgccgctcaccttcgccaccatggtcaaggtcgattccacccgcaccgatgaagacggcatccagcacgcgtcggccgaagtcatttccggcacccgccgcatggtggtgcctgtggcctccaacgtcaacgccgcccgcctgaccgccggggccaccgtgatgctcaacgagaagctcgtgctggtcgagcagcgcgatgctgacaccgtgggccagattcgcagtgtcaagcaggtacttgacgacggtcgactgatcgttaccgacgcctccggcaatcccgtgctcatccgccgttccggcgcgctcgcgtatgcgggcatcaatcagggcgaccgtattatcgtcgatccgtccgtccgcctcgccatcgaagtgctgcccgccgagggcgacaaggatctggtgctggaggagaccccggatgtcacgttcgccgacatcggcggcctggatagtgagatcggtcgtatcagggacgccgtccaactgccgttccagcatcgtgcgctgtttgagcgctacgatctgaagccgccaaagggcgtgctgctgtacggtccgcccggcaacggcaagacgatgattgccaaggccgtggcgaacgccctatgcgagggtggttacgattcgaatggcgacggcgcaatcagcccggccgaaacccatgtcaagggcgtgttcctgtccgtcaagggcccggaactgctcaacaaatacgtcggtgaatccgaacgactgattcgcctgattttccagcgcgcccgtgaacgcgccgcggacggcaatccggtggtcgtgttcatcgatgagatggattcgctgctacgcacccgcggctccggcgtctcctccgatgtggagaccacgattgtgccccagttcctctccgaactcgacggcgtggaatcactcgacaatgtgatggtaatcggtgcctccaaccgcgtggacatgatcgatccggctgtgttgcgaccggggcgtctcgacgtcaagattcgcgtcggccggcccaaaaccaatcaggccatcgccatcgtggaccattacctcaccgacgacctgcctctggaagatggcgtcgacgcgcacgccttgtccgccgtgctggtgcatgacatctacggaacctccgaacgccgccatctatgcgacgtgcaggaggagaacggccagtggcatgcgttgttcctggccgacgtggtctccggcgcgatgctcaagaacatcgtggaccgggccaagacccgagcggtcaaggaatccatcgaaaccggcttggacgtggcactcaccgtgccgctgctcgctgccgccgtggaagacgaataccgcgagacccgcgattccatggccgacgtggaccccgaacaatggtcgcgcatcaacggcatggacccgatccgccgcatccgcaccgccgaatagctcaagctcaaggagcactacatgaccgttaaacgagtgatgggcaccgaaaccgaatacgcggtatccctgaacaccccggaccgctacaatccggtgcaactgtccttcgacgtggtgaacggcgccgcggacagccacagcaaatccatccgctgggactaccggcaggaggacccggtcaacgacgcgcgcggcacccgtctcgaacgcgccgccgcccgcccggacatgctcaccgacgccccgcagctcaacatcaccaacgtgatcgcccccaacggcggccgcgtctatgtggaccacgcccaccccgaatactcggcgccggaaaccaccgacccgttcgaagcggtccgatacgaccacgccggagacctcatcatgcaggccgccaccgaacgcgcccgcaaacagactggcactcccattgccctgcatcgcaacaatgtggatggcaagggctcctgctggggcacgcacgagaactatatgatggcccgcgcggtgccattcgacttggtcacacgcctgatgaccctccacttcgtcacccgccagatctacgccggctccggccgcgtagggattggcgagaacagcgagatcccgggctaccagctcagccagcgcgccgactacatccacgccaaagtcggcctgcaaaccaccttcgaacgcccgatcatcaatacgcgcgacgaatcccactccaccgatgcataccgccgtctgcacgtcatcgtcggcgacgccaatcgcatggaggtgccgcaggcactgaaactcggcaccacgagcatgctgctgtggctgctcgaacatgcggacgaggccggattcgacctgaacgccttcctcgacgaactcgaactgtctgacccagtcgaggccatacacaccgtttcccgcgacctgacgctgggggcaatcttgccgctggccaacggcggcgaaaccaacgcatggcttatccagctcaaactgcgccaagccgtctaccaggttgccgcactggtcgaaggtaccgacaccgccggcgaacccgcctggccggacaaatccaccacatccattatggcgatgtggcagcaggcgctcatcgactgcgcctccatccgccatgccgccgacgatgacgaacgtctggccatgaccggcgaggccagccgcatcgaatggctgctcaaatggcagctgctcgaaaaactgcgccgcaaaatcaccacaacgtccgcacccggcgtggccaacggatggaatgatccgcgactgaaggtcatcgacctgaaatgggcggcgctcgaccccgcggacagcatcttcaccaaactcgaaccccgcaccgaacgggtggtgagcgccgccgacatcgcacgcgccaccaccgaaccgccggaagacacccgcgcctggctcagggcaaaactcgtggcgcaattcggcgatgaggtggccgccgccagctggtcccgactcactgttcgcgacccgcgcgccgcagacgagggcgaggcggtcgaattctacggcaatgccggccatatggccgctaccgaccatcacctgttctccctcgacatctccgatccgctcgccttcaccaaggcgcactgcgaaaccgaactcaattcagccgaacacgccatcgatctgctgaagtcgctggccatcaacgccgaacgatagacttggtagctatggaagaaacacgcgaagagaccccacaggacctgcgcaaccttgcgctcaaagtcgccggcctgctcgaagaagccggccagcatgccctccacgaccaactcaatccgcgtaacctcgcccagccgagcaccgagaacgcggaccgtggcccccgctacaagcttgaagtggacaacaagatcatgcgcttcatgagcgccagaatcgccgacatcgcccacttcgacggcttctggaccacccgccccgccgaaagccgccctggccagcgttactggtacatcggcaagatcgacggtgtgatcaactacgtacgtcgcatgagcgaatggacggtgaccgccgccctgttcgaattcggcccggacaacgagcccaagccgatcatcggcatcgtgcacgccccggccctcggcctgacctacctggccgccaggggagcgggtgccgtgcgcatccacaaaaccgcggtcggcgagaagcgcgacaaggtcgtgccgtcgatgacctcctcgctggatggttctgtgctgagctacggcatgtccttcatccccagcgaatcgcagcgtgcgctcgacgtggcctcctcgctcgccggacgcccggccgacatcaagcgcgtgggccccgtctcgctcgacctgtgcaaagtggccgacggcacctatgacgcctacttcgagccgatgctgcacgtgtgggatatcgcgggcatcgccgccggcaccgtagtggtctgggaggcacagggcacgctgagccgttgggacggcgaacgcatccactggcgtcacgataacgatgtagtggcctccaatggactcatcatccgcgaactgcagcattacctgcagcagtatccgtggctcgactccatcaaccagcgataattttttgactcctccggctcccctcgggtgaggggagccgtcggccgaaggctgactgaggggagtttgacagcccaaaaagaagacaacatgccacaacaattcgaacaacctcaagcacagcaggccgcgacccaggaagacgacgccctcgccaccacgcaggccgccgcccaaaccgagtccaccgaccaagccgacgtgttggacgacatcctcgacgacatcgaatccgccttggaaaccaacgccgaggaatacgtcaacagcttcgtgcaaaaaggcggcgagtgatgccccaactgcgtgacagcggcacccgctccctgcacgccacggaacccgtaccatccgccgagatggacgggttctgccgtattttcggcgtcgaaaccgaatacggcgtggcggtcaccggtgccgaacgccccgtggacgccggccaggtggcgatgaccatgttccagcccatcgtctcccgttcccgctccaccaacacgtatctggccaatggctcacgtctgtatctggacgtcggatcccaccccgaatacgccaccgccgaagcgcgcgacccgcgcgaggccctggcccaggacctcgccggcgaacacgtgatgcgcaacctagccctgaaggcccagcgcaagctgcgcgaatcctacggcgcacacgccacgatccatgtgttcaaaaacaacgtcgactccgccggccacgccttcggctgccacgaaaactacctggtccgccgcttcgtgccgttggagaccatcgaacaccagctgctgccgttcctcatcacccgccagctgtacaccggtgccggccgcatgaccccggacggcttccagatcacccagcgcgcggacttcctggacgaggccgtctcctcgtccaccacccgctcccgcccgatggtcaacacgcgcgacgaaccgcacgccgaccccgactccttccgccggctgcatgtgatcatcggcgactcgaaccgttcgcaatggtccacatggatgaagcttgccgtcacgcaccttgtgctgtgcgcgatcgaagacgccttccgccatggcgttccgtccggattcgagcagtatgcctttgctgatccggctgccgccaatcgcacggtcagtcgattccttgacgatccgcgcgccgaactgacgctcgaatcaggcgaatccgtgtccgcactgggtctgcagcgccggtattatgcggcggtcaaggccttcatcgaaacccatggcgatgcgctggcaagttcgctgccggccaccacgatcgacacgattatgggggagtggagccgcgttctggacgcgctggagcgtggtgcatacgatgcgctcgccgaccgcgtggactgggccgccaagaagcgtctgttcgacgcgctcaaacgccgtcgcccggacgtcaccttcgcccagatggaacagcttgagctcgactaccacgacatcgccaacggtcgcctgtacggttcgctcgtagcccgcaaccagatgcgtgagctgctgacaggagacaacgtggaatacgccgtgcacaatccgccgaccgacacccgtgccgccctgcgtggccggttcgtggacgcggccctgaacgtcggagcccagttctccgccgactggacccacctgaccctgaccgcccccgaacgccgggaagccatactcctcgatcccttcgaggccgagcccaccctgggattcgagcagcttatggaagcgctgaactagtccggaataatacggttggacaacacgtcacagcaccacaacaaaaagaccccgaccatctcggtcggggtctttgtcgtcagtaatgctcgaagtaatcgctacgagcagaaggtcactcggtgacggccttcttcagcagggagccagcggagatacgaacgccgtaggaagccggaatgtcaatctgctcgccagtgcgcgggttgcggccggtgcgagcggcgcgcttgacgcgctcagcggagaacaggccggtgagcttcaggccttcgccggacttcatggcctcgacgaacacatcctggaaggcgttaacagcagcctcggcctgagccttggtcaggttggacttctgggcgatcttcgaaacgaggtcagacttgttgtatgccataaagcatccttcttgggtcaggggacaagcacttttgcttagtccatgttgtcatcaatgatactagcgcatgtttctgcgaaaacccgcgttttataagggttttcacatctatttccccgaagggggtatgaaaatagacgaatcagacaagattatgcttgtcaagccacttcatggccgccgcgcccagcggaatgcgcagccagtagaacaccacgcggtgcagcaaagtggcggaaagcgccacgccctgcggcactccgaccgccacgaacgcgaatgtcagcgccgcttccacaccgcccagaccgcctggagtgggcactgcggaacccaatgcataggccagcaggaagacgaacgtcgtttcgatcggattcgatgaatggccgaacgcttgcagggccgcccagaaagcgagcccagtggtcgcgttctggaacagcgcgcccaggcagctgactgtgagctgtcggggctgggaaagcacgtccagcagctggttgatatacgtcttggccagcggcataagacgacgggtcacccagtggcgcaacggtggaatcatcatcgcaatggacagcaccacgaccacaacgcccagcacgataaccaacgtgtttgtcgggattgcgccggagaacatgttgcggccggtgaacaggccgatgatgaccagcatggagaagtacacggcgtaatacaccacgagcacggcgctcataattgcggtcgcctgggtgttgcgatagccggatttgcgcaggaactgcaggttgacgaacgaggggcccacgccggctggcatggatacggtggcgaagccgcctgccacctggctcatgaagacgcccatattgtcacgcttgtgccgcgccatcagggaaccgagcgaaatcgacgagccgatccagccgcagacaccgaacgcgagcgtcaccaccgccatcaacgggttggcgttggtcagcgcggtgatgatctcctcgggcttcagttgggtgaagaccacgaccacggccacgatgaccagcagcatggtgatcatcgaacgccaggagaatcgggccagcgtcaccggttcggcggattccaccgtctcctcgtcagccagcgcggtgatacgactcctcaggcccttgagcagctgcttgtcccaggattccagcgcgcgcgtgggggaggggaccgcgaccttctgaatgaacggggccaaggccgtcagagtcgtgtctccccacgcctcgcgggcggcctccaccgccggttccacgccgatcagcgcggcgaacagcactagcagctgaactttgtcgagcgcggtgttggccggaccggaagcgttgtcgccgttgagccagccggcaatcacggcggtgccgtcttcaagccgggcgagcgtgtccggcgtgatgcgccggtgcgtatagccgcgccggctcgccacggacaggtagcgcatgtaggccacggcatccgccttggtaagcgtgttcaggttggcgggcagttcgatggtgtgtgcatccagcaccagaatcgcggattcgtcggtatcggcgatgccgtagggtgcgggcgcgggcagtttgatattgtgcagacccagcagcatggcgaaatgatgctggacggcgtcacgcacggaacggtcacgtcggatggacacactggtgaaacgcacccagtcccacaactgcttcagatagccgacggtatgggtctgcgcgtcgatgacggaaacgatgaaacgacggttgtccgtggtatccagatcgtagatgcgcgagccttcggccagatcgtcgtccagcgtgacggccagtgaaccgtggccgacgccgggctcctgatgccgaatcagcgaggcggtgtccagtccgatgcctttcagggcggcgaccagatcttggccccacacgcccttgttctgcgtgccgaccacgaatcggatcagcatgcccactgtgcggccggcggccatcgacaccagcatgccggtgaccgaatgccacgacagcaccaccatcaccgcagcgatggcatacaggatattccagctccatttgaccgtggagcgggtgcggcgtggcccggcggcggtcaggaaggacgccatgccggcgtagatgtcgggcaacagcccggagccgtatgaggtggcggctgagactagtgccattggcagggtgaaatcgttcagactgctgattgccgtcgatacgacccacaccatgccgtagccggcgaacatggccagcgcggacaccgcggcctgcagccattcccgggccagtagcaattgagcgagcacgatgatcacgatgacgatggtggccagctgcgtcagcacggtggaggggaagtcagccaaccagttgatgacctgggctgcggtgtgtgcgtcggattcgacgccgcgcgtcatgccgcccagatacacggcgaacaccatgaccacggcggccatcaacagcgacagaccggcccgggtcagatcgccgaagtcgcgcgtgcggcgcggagcgatgtcgtcgatgtacggtccggaatcgttgctgtcgtcggttgccgggctgtccggtccgctgacagcaaaactggccgaccggccgtcaccagaggcgatcggccggtcggtagtggaggaggtcgccttgtccgggcgatcttccgtagtggactgctcctgttcagtagtcatgaaatggttacctgacgcctgtccttgttcggttcagtttgcggtttggtttgtgactcagcgcagtagtgtggtggatgcgatgggctcgagggactcgcatcgcacctatttcagcggtcgaaagcgacgagctggctggccacaccggtgtaggtggcgggggtcagagccttcaagcgagcggcggtttccgggtcgaaggactgctggtcgatgaactgctcgacctgttccttgttgatggcgtggccgcgcataagctccttgaccttctcgtacggcttgtccatgcccggcaggcccttgagctcgcaggcgcgcatggcggtttggatcggctcgccaagcacctcccagttctcatcaagctcacgctcgatgacgtgggtgttcgggtggatggactcaaggccgcccatgaggttggtcagggcgagcaaggagtagccgagcgcggaaccgatgttgcgctgggtggtcgaatcggtcagatcgcgctgccaacgggattccaccagcgtggcggagagggtgtcgagcagcgagcagctgatttcgaagttggcttcggcgttctcgaaacgaatcgggttgaccttgtgcggcatggtggaggaaccagtggcacccttgaccggcacctgggcgaacactccacgggagatgtacatccacacgtccacacacaggttgtgcatgatgcggttggcgtgggagacggtggagtacagctcggcctgccagtcgtggctttcgatctgcgtggtcagcgggttccaggtcaggcccatgcggttggtgacgaattcgcgggagacggcgacccagtcgacatccgggcatgcggccaggtgggcgccgaacgtgccggtcgcgccgttgatcttgcccaagtactcctggttttcgatgtgcttgagctgacggttcagacggtagacgtagacggcgagctccttgccgagcgtggtcggcgtggccggctggccgtgggtgagggagagcagcggcatatccttgaattcctcggccttgccggcgaggtggtcgatgatgcgcttgaactccggggtccacacgttttccatcgcgttcttgacgcaacgggcgatggagaggttgttaatgtcttcggacgtgcaggcgaagtgcacgagggtcttcagctcgtcgttgatgttggccagctcggccggagccttgtcgatctgatcatcgatgtagtactccacggccttcacatcgtggtgggtgatggcctcatgagcggcgtgctgcttgatgccttcggcgccgaagtcctcgggaatggcgcgcaggaaggcctgctcttcggcagtgaacggcttgacgccgtcaacgattggctggttgccgttgccctcaaagccgttggccagaagaatcatccattcgacttcgacacgcatgcgttcgcggttcagggcaggttcgctcatgtattcgacgagcggggcggtggccttgtggtaacggccgtcgagcggggtcaatgcgattgcgggggaaatatcggtaagcttcataacctccaagggtacttccagccgtgaaccgagcggctacactgtggtgtggcgttcccgcccgagccgcacaggtcaaggaacgcccgtgattcgattactgtgtgcggcctttaaggctaggagatcaccatgcctgcaaccaccattcatactcttccgaaacgttcggtcgccgtatcgtcgctgaaatggcagccgttggacatcgcggtcggtgccacactgggcgcggcctgcggcgtgatcttctggggattcaacttcgcgtacatgccgatctcttcggtgtttggtgcgattctgcccggtttcgccagcatcgtgcacgccgtctggtatttctccggtacgctggcggtgctgattctgcgcaaacccggagcggcgctgtacgtgaaccttatcggcacgctggtcgaaacggtgattggtagccagttcgatttgggcttcgtgattatctcggcgctgctgcagggtgttttcgctgagattccgttcgctttgacccgttaccgcatgttcaatctgccgatttccattgcatccggtgcgttggtcgccttggaatacggcacatatctgatgctgtttcgctacgtgggtgtgtcattcgtcagcccgcgtggcatcgtgcacatgatttccgaggtcaccggcggcgtgcttatcagcggcgtgatggcctggtatctgatgctggccatcgccaaaaccggtgtgctcgaccgcctcgcatccggccgcgcactcatcgagcgacgcgcctgacactctttgcgcgccactttcccgggaatgttgcgctgatagagggggtttcgggcatgctagcgcaacaatcccgggaaagtggcgctagccgcgtctctgcggtgattgcattgtgggggtagccgattgatgctaagcattgacagcattgacaagttgatgtgcccgttgccgtgagaccccgagtatatcgcctatttgctgtagggcgagacccatgccatgtagttcttgtgccgcggcgcgagtttcccgcgctgcgttcgatctgcattccgcttcttccttgcgcagtcgccgagcttcatcaaggtgctcttgtacggattgcggcagttttgtctctatggtgagtgcgaaatcagcatcttgcgtcatgacggtgataaggtcgcgtgccgtactttcaatctctgctgttgttcttgcctgcgtgaaaccgataccgggaatctcgagaatccagtatttttcgccaggacgaacgatgacctgatatgttttcactgctgataccagcctttcccgagtttggcttctgcttccttacaaatgatgttcgcgaggtcgttgtcgatttcgttatggcgtgggatgggaatcatgagtccatcgagttggaatatctcatgactccctctttgcctgatactctcaaacgtaatattcttgcgtttcgccgcttgcttcatcagtttgatgagccatctcctactcgtcattatattgttaactcctttcttgacaactctgtcaagtgtggtatttacttttaaccgccgaacgtgctgaactcggtggtgcgctcgccgggagcaatggttgtggactgggtcatgcggccttggtaatagcgggtttccttgagttctccgttgatgacttcctgaaaatgcgcttcgtggcgctgcacggcaggggagccgaggtcggtggcgttctgataagcggcctgatggtatttgagccaatgcgacaactccctgccgttggtcgaaccagccacggatgcggcgtcatatggggtcagaccgttgatgggcgttgcgccgggagtgcatgagacgtccgaatgcactgtggatggtgttgccgcgggcgcgggcgatacatgcccttgcacggtgagccaattatcggtgaccgggttggcggcaccatccagcgcggcgaccagttcatcatcgatttccacgctggtgacccacgtgcgttgcggaatcgggtgattggccaccggcgatccggctgtcaccacatgctcgatggtatattcctctgcccaatccgaggcaagcgtggcggcaacgatgccaccttgggagtggccgatcagtgccacgggctcgtccttgccgataccagcctgacgcatcgcctcggcaaccgtgcgagcgctgtccgctttcctgcggcgctcctgatcggcgctcatcagttccacgttctgcgcccagccgaatggtgagtcaggttgtccatcggtacccgggatggtgaccagccaggagttggttccatcagcccgttcatagcgttgaatggcgatggtcccatattcgagtccgctgttcagctcgattttgccgagccgttcttcggcgagcctgcgcagattctccattgactcggccaccgatccgcttgcacggacgacgtcggcattcgcctgcacctcgcgcacgttcagatgattgccttggacgacgtctttcgccgggccggagaaattggcgattttccccgcagccttgttgacctcatcggtgtgcgcaatgctcttgccgataggtacgccgccaatgattccgcccgcgccgctgagcactccttcctggaacggataggtgaacgtggacatccatgctgggttcggtttgccgtcaatagcccagccggccagaaagccgcccgccgccacagcggcaacacccaccgcggcatatcccggtttggcctgtgtaccggcctgcaataattcggtaaacatgcgccgagccgtcatctccgcctgagaatacagagagtgtgcgcgaatcagcagatcggccgcgccacgcaggtcatcgctcaaccgctgacatgccgttgcatggtcataacaccgattgcccagcgcggcatatggtgcagtgacatggccgggaacaacggcgctcggatcgcccgactgcaaggtgacgcacatcggcgcactatgccgatgtgactgcaactgtaatgcggccgattcccaagccgtggctatggccgcaaatcctgccgcctcgtcatcgagagccttggctatggcggcatattcttcaagagtggctggcgcatatcccactccgccgtaaacggacgattccacctgccagtaatcgtgctcgctcatgatgacccccaagccaatcggtgggtgatctccatgtcttgcgcgagactggccgaatactgtgcggtgcgactgagccgcgatcggaataggtcggcggctttaccggtccacacgatgttgcgggagcggttcacggccaccgccatctggtccgattgcgccagtgtggccgcacgttggacggacacgaggtcgcgactacgctgtaccgccgcatggcaagggcaagtgccgtaatcgaacggcgtcaccgtattgccggcaaagccgccggcgggatcgatgggtgctggggtgctggtgtaggtattcatatatccagctaaaaggacaggactcatgcttgtccagccggaacgaccaatgtggttctagcttgccgattttgggcgaagttattcacaagtgttgtgtatagccgtaacgattatccacaaatagcctgtttgggcacaccttggatcagccatgggctatcgggatcagacaaacgccaaagccgacagccgaaaccgggaaacagccgcgataaggccatgacccgtgaggatgtgagaaaaagagcaaccgtgaacgactgcttaccacggcttggtggccccggtacccttgttctgcgtcgctttctgcttggattgggtggtgttcgactgggtatcggtggattgctgattggccttcatcagctcctcgacctgcttcttctgctcgtcggtcaacgcgccgccctttttggcattggctgaggaactctcggattgctgcgccgactgggcttgcccggaatcggaaccgctgttctgcgcctcggcctgtttcagggtgatcttcgtcagctcggaagaaatcgaagcattggtgtcgatggcgtccttgacttgcggcaacagaagcgtacgcattcgcccggcctcggcgaattgcgcatcggtctgctgctgttgcgccttgagcgtggtgatatcagtcgactcatcctgagccgctttgatattggcattcaatgatgcggtggcctgattgaacgtaatcgaagcggacaggtttactgccgccacgccggcaaccagcagcagcaatacggtgccacaagccaggacgatacgtgcccaaagcgggcatttcgcccgcatccgaatattcgccgagccatcgttcttgtggatttcgttactgtttctcacagcagcctccttgaggtcgcgatccatgcaccgacttccatggcaagcaatatcgccaacgcaatggtcaacggccataccaccggcgtggtgcgtgtgcgttccttgaccgtggtggtcatgcgccactgcttcgacgacttggccgaaaccgaatccgccaatgtctgtgaagcgtccacggccacatatgtgccgctgatctcgtcggcaatgtctttaaggttcttctcatccatcttggagatgccgggttcgccggtatccgggtcgaccacccagtggtccgtggtgttggaatcgccggcactgacgccatcggcgatgacgggaatcttgccgccctcggtcgagccgacgcccacggtaaacccatcattgagatactgtcgcagtgacgagaacgtacgacgcgtcacattcgaggtctgttcgccgtcagtgatgaggtacagcacaatcgcatcatccgggtgcgcttcacgaatcgacttcgcggtcagcagcaattgatcgatcggagcatccagactggatcccgccgacacggatgtggcttccaccgccaacgtgttggcccaattatcgatggccggcgcatccggggtcagcggcacatcaagtgttcccgaagcaccgaaccgtaacgccgcgaaactggcgtccgggtaagcagcggtcacatcatgcacggcctgacgcgcggcatcgatgcgggtaatggtcttctcggacccgtatgtggcatcagccaccgccatcgacccggtggtatccaccgccacgatgacgtcggtggcattgatgacctgtgaggtggtagacgataccacgctgggagtcagtaccatcaccgcgacaatgagcagcataagcgtacgtcgtatgcaagcccacacggtctcgtcactggaagcacggcggcgaacaaacaatacgatttcgagaatggccagtacggcgagcccggccgccagcagtccgccggcgacccagcccaaggcgggggagaaggtgaatccgttcatcgcctcaacctccatgcacatacgatccagataatgagtatcacggccagagcaagcgtccacagactgggagcgtccaccattgaggatttcgccttgttctccacatccgtatctctacgcgactgaatatcccgtaccagctcatctatcgacgcgccgttcgattgggtgaggaagatgcctccatgcgactcgatcgcggacttcatatccgttgtggtttggtccgattcactggctttcggcccggaatacaggccgtccacggtgattttggtctgctgggtcaagtccaacgcttcggtcagcgaataggtgggtttgcctgacacgacgttgtcggtggccagcacgatggatgccgcacgctgacggtcggcattcgcatgattggcttcgccataagcgaaaccggggagcatcgccgcgcaagacaccacgccgtcgccaatcaaggaggtggcgtccttgcggttctgcgtgccttcgagccaattggcgatgtcctgatattcggcatcggacatcttatcgatgtcatcctgcgactcgacgcctttcagcgccttgctggcggaggtcaactgtttggtgaccagttcgtagtcgtcggtcagcgggaacaccgtgcgtgaggtcgagttgaagatactcaaaccgatacgttccccctcgaaatgcttgaccagttccaaataggtatcgatgacctcgcgatcataggggagcgtggatcccgacacatccagacacaggacgatatctcggctggaagcgcgttcgtcaccggcatccacttggctggggcgagccaccagcacaatggccagcgccagcgcaagcaccagcacgctgatggcgagacggcccaaagcgcgccattgacggaacagacgggaagcgtgctcggtattgagatcgtcgtccatcgagaatacaggggtgtcgtcggcggcgttacggcgggcgaacacgacaatcagcacgataatcgccagcgctgccaagacgccggccagagcggcccaaggccaatgccatgccagcatcatgaacgccacctttccaccagattcgccacccactcggcggcctgctgcacgctggtcgtctgggcgattcggttgcgggcatcatcggcaaattccggtggatacaacgcgctaatggtctgcttcaatgcgtccaatccttggcgattcgcgggcgtgcgattcaggtacgccaaatcggtcagcgtactggaactaagctccttgcctgatgcggcaccggcgaaatcacgggcgatgacggccaattcgacgaaagcctcatgccggggcagtgctccggattcatgacgggccaccacatcgtcgatgcgggcacgccactcggccttggagctggcattgctatgagtgccacgcgcacggtcgctgttccgaggtttgcgtgcggggcgagccagcatgatgatcaacgcgatcagacctaccgccagcaacaggcatgcgacgatggccatcaccaggggagtggtcaaggccaacgactccacgggcctgagatcgccgggatcagtggcgagcgggatgatggggaacatgctgtgcatcatagatcacccgccaaagtcagtccgaccagttcgggtgcagtgcccagtctattgcgtgtggtgcgggccaatgcccgggacaccagggcgacgaaacgatcgaacatggattcgctggatgcggctcgaatgatatgggaaccggcacgggtgagctcctgttccaaagccgcggccatatacgcgcgatgagtatcgacctcggccgctgccttggcgttgcgcaggaatgccggcacacgccgtgcactcaagccgtcggcgggagcgtggcgggatgagacggccttgaacggattcatcgtcgccacatcgatcagcaccatcggatgggtgcgggtaatacgacggatcgtggtgatatgccgctcttccatcgcatgctcatcggtggccaatacgatcaatgcctcacgatccttgatacggcgcgcatattccagcagcgcgtcgatattacggtgatgatcccaatcacgatcaagcgccttgtccagcgtgcgttcgaactgcgcgaacccaccgttgaacggcacgcgggtgatgctggactcatcgccgaacaccagcgaaatatcgtccgaccggcgcaacgacagtgcggcgaacatacgcagcgcattggcggcaacctgccatgcgcgttctccggaagggcatacgccagtcatctccaggcctacgtccatcagcaaccagacccgtgacgtcgacaggcgctcgcgctcgaccaccatggggcggccttggcgggcgctggtcttccaatcgataagacgggattcgtcgcctggctcataggcatgcacatccatcgcatcgccgctgccgccacgacgtccggatgcgtgttcgccctccagcacgcccaaagccttccttacggtaggcaggctcagctgagtgccaagggcctcgattttcttgcgaacggaatcggaactcacggaacaggaaccgtttcgacgatcttgtcgacgatctgatcgctgaccacgccatcggccagtgcctcgaacgtcagcataatacggtggcgcagcacctcatgagcgaacgccttgaggtcctcgggcaccacatagtcgcgcccggacagcaacgccttcgcctggccgatacgggtcaaggcgatggtggcgcgcggcgaggcacccaaacgcaccaaggacgacagtcccttgatggggcgggagccggcacctcgtgacgtggcggtgatatcgaccgcataacgcatgatcgcgtcggaaacgtgcacgcggcgtgccgccttgcgcagaaaatcaacgtcagacacggaaatgcgttcgccggtgatggtgtcgggaccgatcatatcggagccacggtgggtgagcatggccagcatgcgagcctcttcgtcgggcgaaggataggtcatgacggccttcatcatgaaacgatccatctgggcttcgggcaggttgaacgtgccctcctcctcaatcggattctcggtggcgatcaccatgaacggcttgggcaaggcgatacgctgcccgccgatggtcgtggcaccctcggccatggcctcaagcatggcggactgggttttggcattcgaacggttgatctcgtccagcagtacgaaattggcgtgaatcgggccgatctgcgtggtgaacttctgcgacgcaaaatcgaagacctgcgtgcccaccagatcggatggcatgagatcaggagtgcactgcacgcgtttgaacgagccggatacgcaggtggcgagcgtctgggcggccgtggtcttggccaagcccggcacggattcgatgagaatatgcccgccggccaccaaggtcacgataagcgattcgcgtagattatcctgacccaccagtgtctgggcgaacctcgcccgaatggcgtcggccaggatacgtgcgcgtttggcgtcatcggcacccagcggagccgacacgccgggcgcgggaacggtgaccggtcgtgcggcggtggtcggcgaaggtatgttcggttgcgtggggaacaaagtcatgccctcactgtaactactcacaatgactgttggtctgtctaaagagtccaatccaccgggtcggcacccatggtgactagggcttgattggctctggagaatggtttggagccgaagaatccgcgggaagcggacagcggactcggatgaggcgatttgataatgaaggcattggtcagcaatggctcgaggctttgcgcattacgcccccagagaatcgccaccagcggcttgggcttgccgtcggcgtccgtgcgcgcgttcaacgcacgaatcgcggcctcggtgacttcctcccagcctttgccctgatgcgaattcggccgcccgacgccgacggtcagacatctgttgagcaacatcacctcacgttccgtccacggtgtcagatcgccgttggtgggcatgggcaccccaaggtcgtcaaccaattccttataaatattgaccaggcttttcggcagcgggtgaacattcggcgccacgcagaagctcaaacccaccgggtgacccggggtcgggtaggggtcctggccgacaatcagcaccttgatggaatcgaacgggatggtgaacgcgcgcagaatattgtggcttgccggcagccacgggcgcccggcggcgttttccgcacgaagaaaatcgcccatatggtggatggcgggctccacgtcggccaaggcatgggcccaccccggctctaccagttcgctcaatggtttgatcatgactcaccactgtagtcaaacgtgcatatccggtgcacgaggcgtggtgtggtggactgatgagttgtttgccgattacactcatgggtagttttgacaggaagaaagggcgattatggcacgcgacatgatgacctacgaatcctatgaaccggattccttcgacaatcctccgaagggaccggtgggagttcaccgtggcgctcgttcggcagtggcccgcctctgcccgttcatcgtcgttattctggtggccgcactgtgcggtgtcggggtctgggcatggatttccggggaatacaggaatgcaataggaggatcgtcccagactgcgaccacgtccgggactgcttccaagtccgattcgtccagcaaggctgggaccaaaaacagcaccaaggatgattcctcgtccacttcgaccgatccgtccaaggactcgacttcggattcggcaaaatccgataccaacagtgatacgacatcctcgaatgagaatcaagactccgatcagcagtctcagcagtccggagccaccgcgactgtgaataaggccacgcaggtgcgtgtggtcaacgccacaggaatccaaggatatgcaggtcagcaggccgatgtgctgcagaccgccggttacaccagcgtcgaggcgaccaatccgcgcggcacattgccggcttcttccgtggtatggtatcagaatgaagccgataaagccaccgccgaagatgtggcgaccacgcttggtatttcggctgtggaacaggtgcaaggactcgccgttcccattacggtggtgctgctcaactagcgttgttgatgcgcccctgatatcggcgtggaatacatcgaaaactgtgagcgttctcacgtctatgaaataattcgtaccgaaaatgtgccactgcggttgggattgttccctcgtcactgtacaatcgtcatctagtcgcgaggtaggggagcgcgatgcggttctttctacgttccctataggttttgtgtcgcgacgcctaagggaacaaaggaaagatcagatatggcacaaggtaccgtgaagttcttccttgccaagaaggggttcgggttcatccagccggacgacggcagcgaggacgttttcgtgcactacgcggaaatcaaggacgacggcagcaccaataagttcaagatgctgtacgagggcgatcgcgtggagtatacgcccgcttcgtccggcaaaggcacgcaggcaaaggatgttgtcaagctgtcttcgggtgaagcccgctccgagtgagcaacacgcacgcaaggatgtgcattgaaggccctgaccgtttcgacggttggggccttttcatgcccaaagcgcaatcgccgccgatgatgttggcactcggcggttgcgagtgctaatgtctgggttagcactcggaggtcgagagtgataatcggcagctgacggctggtcgtcacgactcgacgcttgcgagtgataaccggtatacctagccatttggaggaatacgcaaccatggcaaagatcatctcttatgatgaggaagcccgtcagggcatgctggagggccttgacaagctcgccaacaccgtcaaggtcaccttgggcccgaagggccgcaacgtcgtgctcgacaagacctacggcgctccgaccatcaccaacgatggtgtgtccatcgccaaggaaatcgaccttgaagacccgtacgagcgcatcggcgccgagctggtcaaggaagtcgccaagaagaccgacgacgtcgccggtgacggcaccaccactgcgaccgtgcttgctcagtccctggttcacgagggtctgaagaacgtggtcgccggctccaacccgatcgccctgcgtcgcggcatcgagaaggccaccgaggtcatcgtcaaggaactcgtcgccgccgccaaggacgtcgagaccaaggaccagatcgctgctaccgccaccatctccgccgccgaccctgaggtcggcgagaagatcgctgaggctctggacaaggtcggccaggacggcgttgtgaccgttgaagacaacaaccgcttcggcctggacctcgacttcaccgagggcatgcgtttcgacaagggctacatcgccccgtacttcgtcaccaacgctgacgaccagaccgcagtgctcgaagatccgtacattctgctgacctccggcaaggtctcctcccagcaggacatcgtgcacgtggccgagctggtcatgaagaccggcaagccgctgctgatcatcgctgaggacgtcgacggcgaagcactgccgaccctgatcctgaacaacatccgtggcaccttcaagtcctgcgccgtcaaggccccgggctttggcgaccgtcgcaaggccatgctgcaggatatggccatcctgaccggtgctcaggttgtctccgacgaactgggcctgaagctcgagtccgtcgacacctccgtgctcggccacgccaagaaggtcatcgtctccaaggacgagaccaccatcgttcagggcgctggctccaaggaagacatcgacgctcgcgtggcccagatccgcgctgagatcgagaacaccgactccgattacgaccgtgagaagctgcaggagcgtctggccaagctggccggcggtgtggctgtcatcaaggtcggcgctgccaccgaggttgaggccaaggagcgcaagcaccgcatcgaagatgccgtgcgtaacgccaaggccgccatcgaggaaggcctgctgcccggcggtggcgtggccctcgttcaggctgctgccaaagccgagaaggccgaggccgtcgcctccctgaccggcgaagaggctaccggtgccgccatcgtgttccgcgccatcgaagccccgatcaagcaaatcgccgagaacgccggcgtgtccggtgacgtggtcatcaacaccgtccgctccctgcctgatggcgaaggcttcaacgccgccaccgacacctacgaagacctgctggccgccggtgtgaccgacccggtcaaggtgacccgctccgctctgcagaacgccgcctccatcgctggtctgttcctgaccaccgaggccgtcgttgccaacaagccggagccgaagcctgctgccccggccgccggtgccgacatgggctactgatccgcaagcgatcgctagctgattgagctgaaaggggactccttcgggagtccccttttttgtattctggctcccctctttgaggggagctgtcgaacgcagtgagactaaggggagctgcggtgtagggatactccctcagtttcgcttcgcgatcgagctcccctcagggaggagagccaagaaactagctggcgaacaggcgcgaagcttggatttcggcgtcagcatacacggtggaggcttgcgtcagcgagcgttggatggactcgagtgaggcctccatctgctgttgggccgcacgccactgttcggctaccgcggtgaactgggtggccgccgaacctcgccatgcgtcctgcaaggcattgagattggtgtacatgccgcccacggcctgcctgatctgcgagatcgaagtggccactgcggccgaggatgattggattcgctcggaatctacctgatattggggcatcgttgctccttttctagagggttaatggtatgtatggcggccgcttgccaataccggccgctaaggtggaggatatgtcaacaacgaatcgggaagacggaaaaacaactattgtggtcctatcttcggagccgtcctgttcggccttcgggaatatggtccgaaaatggcttgtttgtgccatttgcgcctttgctgcagtagcgatgaacgcaatgtggataaccgcaaatgcctatggggataactcgggcgacagctctgacagctccagcagcagcaccgacagcggcgtgaccatcaccgagaacatcacggatacggaaaatctcctgggctcccatgcggccgaagtcgcggatgccatcgccaaaaccgagaaggaaaccggtgtacacgtgcatctgctgtatctttccagtttcaatagtcaacagaaaccggaagactgggcggcaaccgtgatggagtccatgaatcccaagccgaacacagtgatgcttgccgtggcctcgaatgacggcaacctggtggtcgtcgtgtccaagaactccgataagtggcttctcgataacaaaaccgtcgataagctatccgaagccgcacagcagccgttactggaaaacccgccgagctggtctggcgcggcaacggcaatgatggatcaaatcgtgaaatccaaaaaagcctccacctcatcatccacggtgaccgtaggcataatcatcatgggtgtggtgttggtggcgctggtcatcatcatcgtggtcatggtggtgattcgtcggcgcaaggagatcaagaaggattccaaggccgaactccaagatgacattcaggaaacgcccagaagagcgcgacactctaggaagcatgagtaagcctattgaagcatcgattgttgttgtcgacgacgagccgtccatccgagaactgctggtcgcttccctacacttcgccggattcgaggtaaacaccgccgcttccggttccgaagccattgaggttatcgaaaaagtgcagcctgatctcatcgtgttggacgtcatgctgcctgacatcgatggatttaccgtcacccgccgcatccgccaggaaggcattaacgcccctgtgctgttcctcaccgctcgtgacgacacccaagacaagatcatgggcctgaccgtcggcggtgacgattacgtcaccaagccgttcagcctcgaggaagtcgtggctcgcatccgcgccattctgcgccgtacccgcgaacaggtggaagacgacccgattattcgcgtcgccgacttggaaatcaacgaggactcccacgatgtgacccgtgcagggcagccggttgacctgagccccaccgaatacaagctgcttcgctacctgatggacaatgagggccgagtattgtccaaggcacagattctcgaccatgtctggcaatacgactggggcggcgacgcagccatcgtcgaatcgtacatctcctacctgcgcaagaaagtcgacggcatcgaggtcgacgacggcgaaggcggcaagcgcaaggtgactccgctgatcgaaaccaagcgcggtatcggatacatgattcgagaaccgaagaactagtcgccccatccataacgcatcgcaatctcatgagtatccccgataagcagtcaggcggcgtaccgccgagcagcacgccgaacgccgccccgaacacgaatcccatgcctgcaatgccgccgttcgccgcccatttccaagagcggcgcgagcgtaagaaaaacatactgatgcggcatatcgaccgtatctcgttgagcagcaagctggtggcctgcaccatcgccgtgctgcttatcggcgtgtcggtgatttccttctccatccgcgcgttggtgaacaactacatgctgcagaaaaccgacacccagttaagctcgcaaagccagctggtggtcaacaatatcgatctgctgtcaaaaaatgactcatcggggccgaactcgtactttctgcagattcaatacaccgacggcaccaaagacaaagagggcaatcctctggtcgtgaccccgctgatgccgcagatgcaggacggtatcgtatcggtgccgattcttcctacctatggtgataccagtggcatcacgctcggccaggcattcactacgcaggcagtggccaagcagatcatcacggtgcagtccgacagtgcggacagccagaacgatccggccaacggaaactccaattcctctgacaccatcaccaaggtactggccaaccccactgtcaatgccaaccatgccgccatcgtcacggcgagggcaccatggcgtattctgccggtgaccttccagcaaaacggcaaggaccgtgccgtggtgtacatcggcttgtcgctggccgaccagatcgacaccgtcaacacactcacccgatactgcattgtggtcggcatcgccgtggtgctgctcggcggctccctgtccacgctgatcatccagcacacgatgacgccgctgaagcgcatcgagaaaaccgctgcaaagattgccgccggcgacctgagccaacgtattccttccgcgccggaaaacaccgaggtcggctccctggccgcatcgctgaactccatgctcacccgaatagaatccagtttccatgaacaggaggagaccaccgacaagatgaaacggttcgtctccgacgccagccatgagctgcgcaccccgttggccgccatccatggctatgcggagctgtataagatgcagcgcgatatgcctggtgccttggagcgtgcggacgagtccatcgaacatatcgaacggtccagccagcgcatgactgttcttgttgaggatctgctgtctttggcccgtctcgatgaggggcgcggcatcgatgtgaccggcacggtgaaactctcgtcgctggtcaccgacgccgtcgacgacttgcatgcgctcgacccggaccgtgccgttcgccgcatgcagatttccctcgaaccggcgcgcgatttgaaccatcccgccgaattcaaccttgccgaaggcgattggcccgaggtcgtgctgcccggcgacgcctctcgactgcgccaggtggtgaccaacatcgtgggcaacatccaccgctacacgcctgccgattcgcctgccgaggccgcgctcggtgtgatgccggccgccatcgatccaagacagctcgctcgcatgcccgccagcgacgcatcaatgcggcggttcatcgacgccgccgaagtaggtgcctcgatgcagaccggctatcgatacgccgtattgcgtttcgtggaccatggccccggcgtgccgcctgaatcgcgctcgaagattttcgaacgcttctacaccgcggatccatcccgtgcccgcgaaaagggtggtaccggtttgggcatggccatcgcgcaatccgtggtcaaagcacatcacggctttatctgcgccaccggcaccgatgggggaggcctgaccttcaccgtggtgctgccgattgagcagatcgtcgctcctgagcccaagcggcccaccggcaaaaccaaggacgccaaacagaagacttcttggttcagctctgagcgtaagactcaggcgactcagcccaaagcgtgaggtcaagccctgtgaggtaaactgtaccttcggtttactatttccattgaggattaaggaaggttcgcaatgcccaccggtcgagttcgttggtttgacgcagccaagggttatggcttcatcaccagtgaggaaggcaaggacgtgttcctgccggctcaggccctacccactggcgccaccacgttgcgcaagggggccaaggtggagtattccgtggtggacggccgtcgtgggccgcaggccatggatgttcgcctgatcgcctccactcccagcttggtcaaggccacccgcccgaaggcggatgacatggccgccatctgcgaggaccttatcaagatgcttgatgcggccggcaatacgttgcgccgtcaccgttacccatctgctgccgacagcaaaaagctggccacgttgctgcgtgcggtggcggatcaattcgatgtacaggactgatctgatctatgactgataccaccgaaaccatcgtgacaccggaccctcacgccatcgcgcgcgccgtgctgctcgaagtggccgacgagagcgatcaggtgggggatttcgttacctcatatgatcttgaggatcacgtcactgacttccgcttcgccgcgaatatccgtggctacgaaggatggcaatggtcggtgacgctgtatcacgacgaggagatcgactcctggaccgtcaacgaatcctccttgatccccactgagggcgcgttgatgccgcccaagtggattccttggaaggatcgccttgagcccacagatctggctcccaccgattcgatcggtaccgatccggatgacgagcgtatcgaggaaggcgaagtcgaggaatcctcgctgcaggatgtcaacgatgccgtcgagaccttccgactgacccgccgtcacgtgctgacctcgttgggtcgtgcgcaggctgccaagcgctggtatgaaggtccgcgaggccccaaagcgttgagcaccaaaaccgccgaaggcaacctgtgctccacctgtggtttcttcgtgccgctcgcgggcgaactcgaccgtatgttcggcgtgtgcgccaacaagtggagtccggatgacggccgcgtggtctccctggaccacggctgcggtgagcattccgaaatcgaacctcccgagccaagccagctgtgggtgcagtccaagccagcctttgacgatctgcatatcgacgtggttgccaaccgtccgtgcaagcaggagcaggttgcccaggacgaggccgaaggcgaaaccgacaagacaggcgagcctgccggtgatgatatcgaagcacagaagactgttgacgggaacgccgtcgatactgagcccgctgaggaggcggcaggcgacgggacctcgcaatcccagtctgccggtgatgagtctgttgcacagaacgcatccgattccgttgtggatgttgatgcagctgattccagcgacgagtccaagtctgatgctgacgacgaggccaccgaagaggacatcctcaacaacaccgttgccgatgatgatgaggatgatgagatggacgacgaagaggataacgttcgtccttcagacgatgtgactcctgaactcgaaaccgtcatcgatctcattgagcagctgcgccagaacagggcggacgaggaataaaataaacgccaatcctgctccccaacagcagaatgtactctcggatcaacttataggtctcagcgaagatgtttcctaaaaagtagatggtgatggggttataacctgctagattgattatttgctttagtttgttttcgtgtgatataattaagtcatgcgtgtcagggaatgggcgaggcgtgagggcttcaacgagcagacggtgtggcagtggtgtcgcgagaaccgtatgcccgtcccgttcgagcgcatgaacacgggcacgattatcatccacgacccgaaatacgagaaccagcccgccgcccccacggcgaacggcaggacggtgtgttacgcgcgtgtcagctcgtccgaccaaaaggacgatttgcaacgtcaggccgaccggttgaaggcgttcgccatcaacatgggcgtcaagagccccgaggtggtca

SEQ ID NO: 2167 - DNA, 5924 bp, Unknown
  R51_24m  MAG No. k141_14219
atactcgtcgttcaacgcaatatcctcaagctcggtggccacatcgaacaacgcacgctcgtcggacggcagtttctgcgtatcctcgcgctccatgatcttctcaagatacttcttggcaatcgccgcacgcggatcatacgacttgtatacacggtggccaaggccggaaatcttctggccatcctccttggcatcacgcacgaactcggccacagacttgccggaatcacgaatcgccttcaattggcgtagtacggcctcattcgcgccaccgtgcaacggtccggacagggcattgacgccagcggccaccgccgaatacaggttagcgtgggcggaaccggcgatacgcaccaccgaggtcgagcagttctgctcgtgatcggcatgaataatcagcaaacgacccaaagcatgcacatacaacgggtcagattcgaacggctcgtacggcacagcgaagcacatgcgcaggaagtcgtctacatagccgcgcgcgtaatcggggtacagcatcggctcatcgcgacgacggcggaagatgtacgacacaatcgtgcgggccttggccatgatgatcttggcggcctcatcgagctggtcggtgtcggagatatcggtggtgtccggatagaacgtggccagcgcattgatggcggaggcaagcacgctcatcggatgagcggagcgcgggaacgaacccatgaaggtacggaagtcttcgccaaccatcgtcttgtggttgatgtccgcgcagaactgctcatactcagccctgctcggcagctcgccgtggcgcagcagccacgccacttccagaaaatcggagttctcgcacaactgctcgatggggtagccacggtagcgcaggatcgaatgcttgccgtcgatgtaggtgattttcgattcgcactgtgcggtggtgaggaatccggggtcgagcgttacccagccgtcattgcgcagcttggaaacgacgatgccatccggccctgcactagccttcaccacgggcaggttgaacttgttcgaatcgacatcaagttgtgccgttgccattcgcgcaccttcctcttcatgaaccacttaccccaaacattaacgttcacgcgttcgcgaacgctagtgttcggtactttatgtcttctgtgttaccgccggcagacaccggtcgatacacgaaagccgaagtgcgctcatgctatcaaagcaaacgcacttcggcttgttacgtctcgaattcgcgggaaaaccgcgaatatatagacggttgatgagatgccgatcgcccatcacaggccaatcaggcacccgccatacgccaaacgccaatcagaggttggtgcgatcggtgaagatgatcgggccgttctcggtgatggcgatggtgtgctcggagtgggcaccgcgcgagccgtcggaggcacgcagggtccagccgtccttcggatcctggaagatctcgtcggtggtcttgaggaaccatggttcgatggcgatgaccaggccttcgcgcagcttgtagccgtggtgggcgcggccgtcgttcggtacgtgcgggtcgccgtgcatgatgtggcccacgccgtgaccgccgaactcgaggttgatcgggtagccgtattcgcgcgcgatgtcgccaatggtgttggagatgtcgccgagacggttgccgggcttggccacgtcgatggcggcggcgagcgcttcctcagtgcacttgatgatgcgcaggtcttcggggtccgggtctttgccgaccacgaagctgacggcggaatcggccacccagccatccacggagatggcgagatcgagggagacgaggtcgccgtccttcaggctgtaatcgtacggcacaccgtgcagcacggcgtcgttgacggaggtgcagatgtagtgggcgaacgggccggtgccgaagtcaggagcgtagtcaacatagcaggattcggcgcccttgcggtccacgatcttcttgtggacgaactcgtcgatttcgagcagattggtgcccaccttggtggtctcctgcagttccttcagaatgccgccgacgaaacggccggccggcttcatttcctcgatttcacgaggggtcttcaattcgatcatgaggttctttctaccttgttgagacttgttctcaactctagcccagcccggggtcaaccgccagagcatcacccgtggtctgcctagggtccgctagtagcctatcaacggccaaggccgagaaaaaagcgcccggcagatacataacctgcacgggcgctttggattgattgtctggagactggttgcatgaagcgtgagattacttgcaacgcttgccgaaagtgaacgcgcgaatcactgaagcaatccccatcaccaccatggcgcatccgccgaagataatcatgaatacggcggagctcagcgggctcatcagcaccacgaagccggcgataatcgagatgatggcataggcgatggcccagccggagcgcgggatgcgccatgattcgactagagccatcacgccttccataatccaaccgaaaccgaccatcagggtgatgagtaatgccaaggtctgaccggtcataccgtagtttcgtacgactacgacgcctccgaaggtcagcagaatgccgacgaacacgtccagcacacgccaaccgcccggcagacccggctccacgagagcgctgacgatgcgcaccacgccggaaatcacgaaatacacgccgagcaacaatgcggccaaagccagcgtcttgttcggcaccaacaacagcgcagcgcccaaggcgatggcagccacgcccaccacgccgtaaatgatgcgaatcttggtcttggccttttccggcagccattcctcgatcaggtggaatggactgaaattgccgacataccagttggtctgctgccagccgggttgactttgatcgccccatgaaccattcggctgcccgtccgcttggctattcgattggccgtccgcctgataccgccgaccgtccggaccccatgctggctggccgttcgggccatagttcggattgtaggcgtacgggccgtagtacgggttctggttcggtccgccttgtggctggccgttctgcgcctgctgattctgagtgtcttgcgctcccggcgcaccttgcggaggatattggccgccatgattgctgtcatacgcgccatactgcggttggcccggttggcccgccggattcggctggctcggctggctctggttgggctggcccgtctggccattccactgaccctcgtttggattgctcatcgtaactccttaactcaaggtccatattcaggttccacataccatgttaggcaagttacctaatttgaaccatcactacagttaggcaatccgtctagttcactgacagcgcaatacccataacgcaatatctgcatcaccaacgcttctcccccgccgcgattaggcttagggccatgaccaacgaaaccgaaacgctgacgtcgggcatcgacccggcatcgttctcctccgtcatcaagccgaccaatgacctgttccgctacgtgaatggtccatggatcgacacctaccgcctacccgacgatcgttcgcgctacggctccttcgacaagctcgccgaagacgccgaaaaccaagtgcgcgacatcctcgacgccgacgactgcccggccaccaaatcgcaggctctgtatcattcgttcctgaacaccgacgccatcgaggccgccggccttgacccgatccgcgatgagcttgacctcatcgattccgccatcgacaaggccgctctcacgcgcgtgctcggcaccatcaacccagccggcggccccgacctgttcggcttggccgtttacggcgaccccggcgacccggaccgcaatatcgcccaccttgagcaggccggcctttgcctgccggacgaagcctactatcgtgaggaccactacgtccccgtgcgcgaagcatacgtggcgatggtcgccacccagctggtgaacgccgggtacgcgcccgccgccgaatccaacggtggcgatgaactgccggccaacaccggcgatgacgagagcaatgctcccaccacggttcccagcgaagccgcacttgatatggcccgacacttccttgccgtggaaaccaagatcgccgccaatcattgggacaatgtggccacgcgcgattcggtgaagacctacaaccccaccgattacgccgatttggccgccacgctgaagaacttcgatctcggttcctggatcgacgcctggcagaccgcctatgacgccaccgaggctgccaaggctcagccgatcgatttcaagtctgtgttcgcgcgcgtcattgtgcacgagccgagcttcctcactggtcttgatgcgttctgggccgaggccgatctggccgaccttaagctgtgggcccgtgttcacatgattctgggcttcgcctcctccctgtctcgcgacttcgacaccaccaactttgacttctacggcaaggtgctctccggtgccaagaagcagcgcgatcgttggaagcgcgcggtgagcctggtcaacggcgtctgcggtgaagatgtgggccgcgagtatgtgcgcctgcacttccccgaaagctcgaaacgccgcatggaagagctggtcgccaatctgattgacgcctaccgcgtgtccatcaccaattccgattggctgggcgaggataccaaagccaaggctctggagaagatctccaagttcgcgccaaagatcggctacaccaaccactggcgcgattattcggcgctgagtgtctccgcggatgcgctgcccgccgagaacgccaaggccgcgaacctgtacgagaccggctaccagctggccaaggtcggcaaggcggtcgacaaggacgaatggctgatgaatccgcagacggtgaacgcctactacgagccaagcatgaacgtcatcgtgttcccggccgcgattctgcagcccccgttcttcgacccgaaggccgaggatgcggcgaattatggtggcatcggcgcagtgatcggacacgagatcggccatggcttcgacgatcagggttcgcagtatgacggcgacggcaagctcaacaactggtggaccgacgaggatcgcaagaacttcgaggcccgcaccggcgcattgatcgcccagtacaacagctttgtgccgctgcagctggcagagaagtacgctgacgagcctgataaggcgccgcacgtgaacggcgcgctgaccatcggcgagaacatcggcgatttgggcggcgtgaacatcgcgctcaaggcgtatgcattcgcgctcggcaaggcggcaggtaagcccgacgccgaagaagacggctcccccgccgccatcaaggcactgctcgataccgcccccgaaatggacggattcaccggcctgcagcgcttcttcctgagctacgcctccatctggcgcaccaagaaccgcgacgagctggccgaacagtacctgcagatcgacccgcattctccggccgaattccgcaccaacggcatcgccagcaacgtggacctcttctacgatgcctttggcgtgaccgaaggcgacgccatgtggctcgcacccaaggaccgtgtacgcatctggtaatccccgttatgtaagagaaaaccgctgtgcttgcctcgattacaggcgaacacagcggtttttcatgatgtatggttggcactcagaattcggattcgccgggatcggaagattcggcgaaaccgtcgacataggtttgttgggctgcggactgtggctgattagcgccagcgtccggttgcgacatgacggcatcggccatggacgcagccgctgactcggttgatggcgacggtgattggccggaatcggaggtgaccccaaattcgacg

SEQ ID NO: 2168 - DNA, 6329 bp, Unknown
  R51_24m  MAG No. k141_14238
aatgaggacgacgaccgcagccatgtccccataaccgaggattgcgggtgttcggctcggcggcggctccctatggtggcgtccataaggaccaatcccagggagggcaacgatggcaagtgatacggaattatggcgggggactgattacggatggtggctggctgcggacacgtccggcgcggtcggtgccagcctgatcgcgttcgcggtgccgctgatcatgctcgccacgacaggatcctctgccgccgccaccacgacggaaagcatctgcgtggtggtgcagacggtgctgggccttgccggcggcgtgattcaggaccggtatgatcgccgtacgctcatgctgatctggggtgcgtccggtgtggtgctctcggcggtggcggcggcagcggtgatgctgttcggcaatgcgccgaagacgagcggccatggggttaacggggcaaacgctccggcattcggcggaccctatgcccacgtgcttccgatcgcgctgctgtgtatcgtcgtgctgttttcggtgcgcgatggcctgttggagaatacatcgaatgccatgctgcgtggcgtggtgccggatgagcagctgcctcacgcgatggcgttgaacgacgccagggattcgacggtcacgctggcaggcgggccgttgggcggtctgctgatgaccgtgggacatgcggtgccgttcctgaccagcgcggtgctgagcgtgctgggcatggtgtccgcatggcgtatccgccgctattggaaacgtgcgactgtgagcgatagcggccgtccgggcaatgttgataccggttcggaggtcggggccgtctcggacgccgatgatgccgatgactccgccccacgctggcgcgacgcactggacggcatgatctggctgctgcgcgaccggttccaacgccatctcatcatcgcagcggccatggtgaccggtgccagcaatgccttcctactgctgaccgcgctggacatctcccaaggtggcagccagctgatatccgccggatccatcaacgccgcctccgccgttggcatgttgctgggcgcactgatggcctcgcaactggtcaaccgtgtgcccggcggcgtactggtgggtgtgatgttcgtcttgctggctgtaggattcaccggtgccgcgttggtgccctccatagttggcaaggccatatttgtggcctgctcggtactggcattgcccgcgggcaacgcggtgcttggaggcctcagcaataccttggtgggcaaggacaagctcggccgcgttggagcgggcagcatggtgttgcagtacggtgcctatggcgtggccgtggcactcgccggctggggtatgcagaccatcggctacggtccgacctgcctgattctggccaccgtactggtagctgccgccgcttacgcgctgacgatgcgcagcctcatcaccctacccacgccggaccgctgggccgagcacatccagcgttggagcatcgcacagttctgataaagggcatccgataccgggcatccgacgatttacagcggcagcaggtcgctcagatcgtcgcgctctccgaccgcgctgatgtggccggcgtccttttcctctgcccacgtggtgatgccgcaggccagccgtagccagacctcgggctccagttcgatgacgtccggtggagtgaggttgtgcgggtccgattccgggccgtccaggattttgaccgcaccccacggcgcaacgcgcacctccacgccagggccgggcgcgcgccgctccagcaggaacagcgagtagcgcacagccatcgcccacaccgggcgcggcagaacgggggaggtggtcaggcgatgtggtgtgttgtcggccagttccagggctgcggcacgccattgcaccagtgcgtcgtgccctcgtttcaagtctttttcgagaattactgccatatgctccatcatggcaccggcacgcgaaaccgcaaggtatgcaaacgatggcatactgtaggatgcggaaccgtgagatatgtgatacgctctcaatgagaacgtatgcaagaacgctccgccatcgtcgttacggagagttcatgcttacgtctatgcgacgatacctatcgcgcggcataataaacacgggcacttatcccggaaggaaagtcagaatgaccgaaatcaccgcaccgaagtctcctgtcacggcggaacaattcgccgacgagattcgtgaacaactgaaatacactcaaaacgtcaccgccgagcaggccacccctgctgacgtgtatgtcgccgcatccaaggccgtgcgcaaccaccttgccgactcctggttcaagacccaggccgacaccgtcaacggcaacaccaaggccgtcggctacctgtccgccgagttcttgatgggtaagcagctggagaacgcactgctgaacgctggcctgaccgaccagttcgacaaggctgtggaagcccttggcttcaagccgaaggacatcgtggacgccgaatacgagccgggcctcggcaacggtggcctcggccgtctggccgcctgcttcatcgactccctcgcctccctcggcgtgccggccttcggctacggcatccagtacaagtacggcatcttcaagcagaagttcgacgagaacggcaagcaggtcgaaaccccggactactggctggccaacgaagagccgtggggccacaccgactacaaccgtgatcagaaggtctccttcggtggcaaggtcgtcgaaaacgccgacggcaccaagacctgggaaccggcctggtccgtgcgcgccgtgccggtggactacatggttcccggctacaagtcccagcgtgtgaacaccctgcgcctgtggaccgccaagagctacgacgagttcgatctgctcgccttcaaccgttccgagtacatggacgccgtggccccgcaggtcaaggccgagaacatctccaagattctctacccggaagactccaccaaggtcggtaaggaactgcgcctcgagcagcagtacttcttcgtctccgcatccctgcacgacgccatccgcgtcttctacccggggcaggacaagccggacctgacgaccttcccgaacaagatcgtcttccagctcaacgacacccacccggtgatcggcatccccgagctcatgcgcatcctcatcgatgagtacggctacgactgggataccgcgtggtccatcaccaccaagaccttcaactacacctgccacaccctgctgccggaggcccttgaggtctggccggccagcctgatcggcgagctgctgccgcgtcaccttgagatcatcgagaagatcaacgcgcagttcgaggccgagctcaaggccaagggcgttgccgccgacaccatcaaggacatggccatctacaccggcgacgccgtgcgcatggcctacctggccacctacggcggctcccacgtcaacggcgttgccgagctgcactcccagctgctgaaggacgtcaccctgaagaacttctccgacgtctacccggacaagttcaccaacgtgaccaacggcgtgaccccgcgtcgcttcgtcaagctcgccaacccgcgcctgtccgacctcatcaccgagggcctgggcaccgacaagtgggtcgccgatctggaactgctcaagggcctcgagccgctggccaaggacgatgagttcgtcaagaagttcgccgccgtcaagaaggccaacaagcacgcattcgtgggcttcgccaaggaccactacggcatcgatatcgacgagaacaccctgttcaacaccatggtcaagcgtctgcacgagtacaagcgccagtctctgaagattctcgccgtgatctccaactacgccgacatcaagtccggcaaggtcaaggccgaggacatcactccgcgcaccgtgttcttcggtgccaaggccgctccgggctactacctggccaagatgaccatcgagctgatcaacaacgtttcccgcgtgatcagcagcgatccggccgtcaagggcaagctcgccgtccacatgctgccgaactacaacgtcgagatggctcagaacctcatcccggccaccgagcttgacgagcagatctcccaggccggcaaggaagcctccggtaccggcaacatgaagttcgctctgaacggcgccctgaccgtgggtacgctggacggcgcgaacgtcgagatccgtgagcgcgtcggcgccgagaacttcttcctgttcggcatgaccgtcgacgaggtcgagaagaagtacgccgagggctacaatcccgcctcctactacgaggccgatccgcgcctgaagcaggccatcgatctggtggccgacggcaccttctccaacggcgaccgcaacgcctactccccgctcgtggccgactggctgaccaaggactggttcatgaccctggccgacttctccgcctacatggacatccagtccgagatcgaagccctctacgccgatgagctcgaatggaaccgcaaggccctgctcaacgtggccaactccggctacttcagctccgaccgctccatggaagactatttggaacgtatctggcacactgctcctctggcctgacggccgccggagcagcgcgccggctacgtgctggtttctacctcgcggctgtcgccgctcggcgtcgcctacgggaagcccgccgggcttcccgcttaacggctccgcatatctggcacactgctcctctggctgactgagtcggtggggcggctcccctcggagaggggaaccagaacataagaagccccgcaaccgacatccatcggttgcggggcttcttgcgttgaaaaactgtgctatcaggcttcggccggggcggcttccgcctcgtcatcggcctcatcctcggccttgttcagacccaggtcgaccggcgaggagctgttctcccacggctcctcccacggatcgtaatctgggttctgctgcttgtagatgtacaagccaacaagcgcggcgagcaatccgccgaacagcagcgcgaagaacttccaaccgttagaagacttgttctccatgacggctcctttccctagggatcgtctggtcggtatgcccattcagaccgactctgctccctattctaggccgctgtttgtgacgattgggtggaatgacattcgtgggcgattcatccacgcccgtctgccctcggccggctcagcatcttcgcggcgcgtggaacgcatccgagaccttcgatacagtggactgcatgcatattcctacacagcgggagattcgataccagtgggagcgcggtggtccggtgatgacctgggcgctgattggtgcgtgcgtggcagtgtggctactggaggtattgctgggatttattgccccgggcctgaggacttggttgatgtacctcggcatggcggctccggtcagactggtggctgagccgtggacgctcatcacttcgatgttcctgcatgcgccgaactcgctattgcatatcctgttcaacatgatcgccctgtattccgtgggcccagtgctggaacgaatgatcggccactggcggttcttgggactgtatgtgatttccggccttggcggctctctgggacttatggtgtgggctgcggtggctccgggaggcatcggctggcagatggcagcctatggggcttctggagccttatttggcctgtttgcatcattgctggtggtatatcgccgtatcggcgccgatatccgctccatgttgatctggatggcggtgaacttcgccttgccgttcgtggtcgggggcgtggcgtggcaggcgcatgtcggcggctttgtagtgggtggaatactcacatggctgctggtgggtggtgtgccggcgtggcgaggtaaaagcctgaaatggcgtatgcaggtttacggctgggccatggtggtgctggtcgttgtgttgattctgttgtgcaatatggccaatccttatgggtggatgagtttcggctccctgcactgatatggcttgatatggctgtaaaaaacgattgatgccgggtattgcggaacatgcagtgcccggcatcagtgtatgtgcggaaagcgtcgatgtggatattagcgatgtggatatcgtcgttcggtgagtgggtgtgtgccgtatgaagatatccacagtagtgagatgcgcgcaatgacgagttatccacgataacgagttatccacaatggtgacttgtgcacaagtgtgtagaaaagtgcataagactgtggataacttatgtggataagttaggaatgccgcggtattactgggtttgt

SEQ ID NO: 2169 - DNA, 21357 bp, Unknown
  R51_24m  MAG No. k141_14316
atctcggacgcggtgagttggggcgccattggtgcgcgcaacacggaaagccagatccaccgccaattggccagcgggctttccatgccggtcggctttaagaatgccactgacggctcggtgaaggcagcggtcaacggttgcttcgccgctgctcagcagcacacgttcttcggcattgaccatctggggcgtgcctgcgcagtcgagacccttggcaacccggactgccatgtggtgttgcgcggctcgattcacggcccgaactacgatgccgagtccgtggccaaagccatggaagacgtacgcgccgaaatgcccgccgaatccgcagcctcgcacggtctgattgttgattgctcgcacggtaactccggcaaggacgagcatcgtcaggccgaagtcgtgcgcaatattgccagcagaattgcagctggcgaacagggtattaccggcatcatgatggaaagctttattgaagggggcaatcagaaggccgcgccgcttgatcagctggtctatggcaagtcgattaccgacaagtgcatcagctgggaagaaaccgaggccttgctgcgcgagcttgcggaagccgtggccacgcggcgttggcactgagttgcgtcatcggctctctcggggggagcaatgtgacgaaacgtctgactacccctcagcccgccattcggcggccagctcccctgacaagggagtcgaaagcgttgtgaaaggaacttacgtatgggtatgaaaactgtagctattattggcgcattggatgaagaagtggcactgatcgccaaatcactcacgcatgtgacgcacaccgccaagggcagccttgacatcgtgtccggcacggtcgactccttcggttctgacgtcatcaaggttgccgcaacggtaggcggcatgggactggtcaatgcggccgccaccacgcagctgctgattgacgagttcgccccggacgccgtgattttcagcggcatcgccggcaacctcaacacccacctgcacatcaacgacgtggtgctcggcggcaccctgcgctacctcgacactgacatgcggctcgtaggccagtggaagcccggcactgcggacgctccggtggaggaattccactctgatgaccgtctgctggaagttgccgacgaggcgcttgccaatgcgggcattacccacatcaccggcatcatcgcctctggcaactacttcgtggacacgccccaaaaggtcgaggaggtcatccgactcaccggggctgacgccgtggagatggaaggcgccgccgtggcacaggtcgccgcccgcaatgacgtgccggcactggtgattcgtgccctttccgacaacgccgacaccgattacgaggtattcaaggagttcgacatctccgagtacgccgataccgccgcccgtctggctgtcgacatcgtcaagcgcctgtagtcggcgggctggcccatctcaccatccacgttttgggtatgatgaccacaatatgagcgttttcaaactattgcttataacctgagccatactcggtgttcggcacagcgatgtgcggggttcatcgctggggccacaagccgtaccagttcttctcccgcatgccggtcgctgtgctcaattcgttaagcgacgacaacaccgtcgcgaagcattgaatacacaatgcgcacgctgcactggggtttatctgcagcatgaggagagaaaaaatgactgcaagcgcaaccgcggctgtgaccaaaccggtgaagaaggattcggttcctgagatcatcgccgcttccatggtcggtacggccatcgaattctacgataactactgctattccattgccgctgctagctacttcggcatgatcttcttcacggacgtcgccaagtccaaccagaccctcgccacgctgatggccttcgtgaccttcgccgtttcgttcctcgcccgtccgttcggctccatgctgttcggccacttcggtgacaagctcggccgtaagaagacgctggttatcgccctgatgaccatgggtatcgccaccttcctggtcggctgcctgcccggttatgagcagattggcgcatggtccgtcgtgattctgtgcatctgccgtgcctgccagggcgtgggcctcgccggcgaatggtccggtgccgcgctggtcgccactgaaaacgctccggccgacaagcgcgccctgtacggttccttcccgaaccttggcgccccgattggcttcttctgcgcttacggcctgaacctgctactcgaatccaacctgagcaaggaacagatgattgccttcggctggcgtatcccgttcctgtgctccgccgtgctggtgatcattggcctgtacgtgcgtgcccgcatgtctgagaccccagtgttccagaaggccactgaagagaagcgcacctccaagcacccactgcgcgacctgctgccgtactggaaggaagtcgtgctcggcaccgtagccatgggtatcacctataccctgttctacgtactcggcacttggtcgctggcctacggcgtcaagggcttgggcttccagcagggcgagtacctgctcatgcagatgtgctccgtggtgttcttcgccatcttcatcgtggtctcctgcgtgtacgccgacaaggtgggccgcaagaaggtcatgattgccgtgaccgccgccgccttggtgttcagcttcttcgtgccgatgctgctcgtgcactccgccgcccatatcatgatcttcctgtgcgtcggcttcatgatcatgggtggtttgttcggcccctgcggcgcctacctgcctgagctgttcccggtgcacgtgcgttactccggcgccggcctgagctacaacctcgccgccatcctcggtggcgcattcgctccgaccatcgcccaggccctggtcgcctccaagttcggcgttgccggtgtgggctggtacatggccatcatggccgccctcgctctgctcgctctgttcctgattaaggaaagcaaggacaaggactacgagctgtaaatagagctccccatattatgctcccgctggcgggagctgtccacgaaagcggactgagggtggccaatgggatttcggttctttgaccaccctcagtctcactgcgttcgacagctcccgccagcgggagcattttgttatgtcgtcccaccaaaaatgaacaatagacgaacttacgtagtttgggcatctcactacgccttgcacgttttactctggaaatcatggatatctggcagatcgtcgtgattgtggtgctcgccgcgctgatactggcgtgggttgccgtcatcgcctacaacaaaggccgcgtttcaggtcggctcgccgccgaacaggacctgtccggcgacgaggatacgcgttctctattcggtgatgatgcgcccgtgcgccccaccgagcgtcgcctgattgaagtcctgcccgaagccctgattgttaccgaccgcaacggcttggtccaatattcaagccccggctcagtgccattcggcctggtctccggcgaccgactcaactcgcgcgaagtcgaggacatcctcactcaggccgccgccgacggtggcgtgcgtgagcgtgaggttcagctgccggtcaatcgcaattcctatccgtcctctaatggccgaggactggaggccggccagtcacgcccgtccaacatgctgtatttgcgtgtgcgcattggcgatatcggcgatgacctgtacgccatcttcatcaacgacatgtccgagcagcgccgtttcgaggccgttcgccgtgactttgtgaccaacgtttcgcacgaactcaagactccggccggtgccatctcgctactggccgaaaccgtgaccgacgccgccgatgatccggacgccgtacggtatttttccggccgtatctccaaggaatccgcgcgcctgaccgaactggtacatcatcttatcgacttgcagaaagcccaaagcccgcaaagtgtgattgatgcgcggcgcatttccgcgctggatgtggcacgcgctgccatcgccgccaatcagacccaagccgactcccgccatgtggatattcgactgagtgtcaacggacagtcagtgcccacgaaggtcgaggagctggccgatggcgaaggttccttggaagaatcaggcagcccggccacgagcggtccgatgatcaaggccgacaaagaggccatacaaaccgccgtcaagaacctcgtagagaacgccatccattactcgcccgaacacaccactgtggcggtcggcgtgggggagcgcgatggcaaagtcaccattcgcgtggtcgatcagggcatcggcatccccgccaaatcactggaccgcattttcgagcggttctaccgggtcgacccggcccgttcgcgcgagaccggcggttcgggactcggcttggccatcaccaagcactgcgtgcaggagaacggcggtcggatttcggtctggtcgcgtacgggggaggggtcgacgttcaccatcgagctgccggccgccccggatgaggatgacgacgaggcccggccggacgagtcgacacaagcgtagggccttggttggtgcccgatatggtgccattccattgccgcacaatcacacagtgggcgaggtgcgcacaccgtgcgtagcacaattacgcaattacgtactttcaggaaacagcaggctaacggagaacaaatggttacgatagtatcggaaaactttgcgcctatgcgcacgggaacatacccaagaaaggctactatggcacgcattcttatcgtcgaagacgaggaatcctatcgcgagccgctggtataccagctcacacgcgaggggtacgacgtgtccgccgccgccactggcgaggaaggtctggaactgttcaccaagggcggcatcgatttggtgctgcttgatttgatgctgccgggcattgacggcactgcactgtgccgtcgcattcgtgagcagagccgtgtgccgattattatgctcaccgccaagagcgccgaaatcgataaggtcgttggccttgagattggtgcggacgattatgtgaccaagccgtactctttccgtgagctgctggcccgcatccgtgccgtgatgcgtcgcaatcaggccacggcccaggcttccggcactgtggatgacgatattccgctggtgtgcggcgatatcgccatgcaggtaggccagcatcaggtcaccgtacgcggcgaaaccgtgttcttcccgctcaaggaattcgaactgctcgaatacctgatgcagaacaagggccgtgtgatgacgcgtcaccagctgatcgaccgcatctggggttcggattatgtgggcgacaccaagacgctcgacgtgcatgtcaagcgcgtgcgctccaagatcgaggaagatccggcgcaccccaagtatctgactaccgtgcgcggtctcggatacaagatcgatactcccgcggagtaaatggaaggcggccttcgggccgccttttttgttgtggattgtgggctcgccgcaggcgagtccactccaaaaactacgtagcctcaacgtagcccacaaacatccaagtgttcatcttctgtttactgatttcggttttgggcccttgaaaccaccaatacgcttgtagttgtcatgaattgaccgggcagcgctgagccgcccgcgaatagttgatagagggattaagtaataatcatgcagaagaacatcctcattcgctccattgccgctctgtccggcattgtgatgctcgcttccgtggccgcctgcggcgataacaccgccaccacgaccgacaacagctcctcctccgattccacttccaagtccaccccggtctccggcaacttctcgggcgccggcgcctcctctcagcaggccgccgttgaagcctggatcgccggcttccagggcaccaaccctgaagccaagatcgcctacaacccgtccggttccggcgctggcgtgcagaccttcctgaccggtgccaccgcttgggccggctccgataaggcccttgccgatgacgaagttgagcagtccaagtccgtgtgcactgaaggcaccgccttcgatgtcccggtctacatctccccgatcgccgtggtcttcaacctcaagggcgtttccgatgccggcaagcacatcaacatggacgctgccaccatcgccaagatcttcgacggcaagatcaccaagtggaacgatccggccatcgccgatcagaacaaggacctgaagctgcccgacaccgccatcaccgtcgtgcaccgctccgataagtccggcaccacccagaacttcgtctcctacttcaaggacgtcacccctgacaactggacctacgacctctccgagaactggccgaacgaggttggccagggcgccaagggcacttccggcgtgatctccaccgtcaagcaggccgacggcaccatcggctacgctgacttctcccaggtcggcgacctgggcaccgtggccgtcaaggtcggcgacaagtacaacgagatttccgccgaggccggctccaaggtcatcgaggactccaagcaggacgacaccgttaagggcgacaaccgcatcgtcatcaagatcaaccacgccaccgaggccgagggtgcctacccgatcgtcttggtctcctacgacatcgtctgcccggcctacaaggacaccaagcaggctgagttcgccaaggcttggctgacctacgtgacctccgacgagggccagaaggccgctcaggatgccgccggcaccgctccgctgccctcctccctgaagtctaagatcaccaagtccatcgaggccatcaagaccaagtgatgacgtcggcccgcaagggtcgtgtggactggacctgacaactgaacgatagactgtagtagtaagagcagtcgccgccaactttaagccgcagtcgtaaaccatacggctgcggcttaaagcgggtcaggacccgaacggtttggcaaagtcacagacgaaaaccgcaccacttgaatacttgataaccaccctatataaggagaatccgtgagttcgcaagacaaaacggctgtgcagccagttggaggcaagaccgccgacaaggtgtttcgcggtgtggcatacgcctgcggcatcctgatcctggttgtacttgccgctgtgttcctgttcctgtttttccgcgcctggccactcatcggtggcgatcaggccgccaacagcgacaccgtgtccagcttcaccggcggcaaggccagcagcttctggggctacgtgctcccgctgttgttcggtactgtgctcgtgtctttgctggcactgctgattgccttcttcgtgtccatcggcattgcgctgttcatttcgcactatgcacctaagaagctcgccaccgcgctgagctatgtggtcgatctgctggctgccatcccgtccgttatctacggtttgtggggcggcctgattctggtgccggccatctacccgttctggaactgggttgccaaccacctgggcttcattccactgttcgagggcccggccgccaacccgtcgcgcaccgtcgccaccgtggctgtggtgctcgccgttatgattttgccgattatcacctccatgtcccgcgatatcttcatgcagaccccgcgcctgcacgaagaggccgcgctggcgctcggcgccaccaagtgggagatgattcgtctggccgtgctgcctttcggcaagtccggtattgtgtccgcctccatgctggctctcggccgcgcgcttggtgagacgatggccgtgttgatgatcctgtccccgggcctcaactactccatcaagctgctgcaggcctcgcagaaccagaccatcgccgcgaatattgccgcacagtaccctgaagccaacgatctgggcgtctccacgctgattggaaccggtctgattctgttcctgatcacgttcgtggtcaacttcatcgcccgtaagcttaccgagaaagcgactgcgtgatgactgctgctgagaacactgaaaagactccgatggacggcacgcccgaaatcgacttcgatcgtttccgcccgacccgttccgccatccagcgccgtaatatcatggaccgcttcatgtgggccctgatcgcggtggcgtttgtgatcgcctgcatcccgctgatctccctgctgtggaccactatcgtcaacggcatcaagcgcctgaacctgaacttcctgagctacaacatgaccggtgtggtcggtggtagccagaccccgtccggtggttacggcggtgtgctgcacgccatcatcggtactctcgaaatcaccgctggcgctatggttatctccattccgatcggtttgatgtgcgccgtgtacctggtcgaatactcgaaccgcggcaagctcgccaccacgatctccctgctcgtcgacgtgatgagcggcatcccgtccatcgtggccggcctgttcgccttctcgatgttcacgattctgctgggccccggtaccatcaacggtttcgaaggctccgtggctctctccctgctgatgctgcccaccgtggtcaagtccagcgaggaaatgctgaagatcgtgccgaacgatttgcgtgaggcctccttggctctgggcgttaccaagcagcgcacgattaccaagatcgtgctgcgcaccgctctgccgggcatcgtctccggtgccattctggccatcgcccgcgtgattggtgagaccgcaccgttgctgatgaccgccggctacatctccagcaccaacgtgaacctgttctccggccagatgaccaccctgccggtgttcgtctaccaggagtactcgaagctcagcgcgaactgcccgcccaacgccgacgccacctgcgtgaccacgattccgatggaacgtgcgtgggctgcggctctcgtgctgatcgtcatcgtgctgctgctgaacctcattggccgaatcgtggcgaaggtcttcgccgtcaagaccgagcgctaagccagtcgctaagcctaagccttaagaacacaaggaaatataaggaaacatcatgggacaacgtattgacgtcaaccacgagaacatctattacggcgactttctggccgtggaagatgtgaacatcaacatcgagccgaacaaggtcaccgccttcatcggcccgtccggctgcggcaagtccaccgtgctgcgcaccttggaccgtatgcacgagatcatccccggcgctcacgtcgagggcgaggtgctgctcgaaggcaagaacctgtacgacaaggacgtggatccggtggccgtgcgccgcgacgtcggcatggtcttccagcgcccgaacccgttcccgaccatgtccatccgtgagaacgtgctggccggtgtgcgcctgaacaaccaccacctggccaagtccgacgccgacgatctggtcgagtgggctctgcgcggtgccaacctctgggaagaggtcaaggaccgtcttgacaaccctggcatcggcttgtccggtggccagcagcagcgtctgtgcatcgcccgcgccgtggccgtccacccgcaggtgctgctcatggatgagccctgctccgccttggacccgatttcgaccttggctgtcgaggatctgatcaacgagctcaagagcgactacaccatcgtgatcgtgacccacaacatgcagcaggccgcccgtatcgccgactacaccgccttcttcaacctgaaggcagtgggccagcccggtcacctcgagtacttcgcggacaccatcacgatgttcaacaacccgcaaaacgaagaagccgagcgctacatctccggtcgcttcggctgatcgtttcctgcgcgcagcgtaatgatttgtgcgtaggagaaacggcaaagcccgccgcaaggcgggctttcgcatattcaacgcgagtattgccgagtattatcgttctcgcaacggagcgagctggaatacttcgtcggactgggcggcgacttcccgcttcggtcgatcgacgggagaacggcgggtaaagcggtacaagacaagtccgcacgatgaatactctgtgatgaatcttctgtttacggtgcgagtgtggaagaatggtcacagcaaggtccagcaaaggagcataggtgagtactggtctgatcgtcggcattgtcgttgtcgttattatcgttgtcttgattggttggggcgtcagcgcctataacaacctggtgacgctgaagaaccgtgtgaagaacggttgggcgcaaatcgacgtgcagttgaagcagcgcgccgacctcatcccgaacctggtgaataccgtcaaggggtacgcatcccacgagtctgaagtcttcactcaggtgaccgccgcccgcgccggcgtagtggctgtggccagcaacccgagcacgaccactgctcagcgcgccgccgccgaaaaccagctgtcccgcgccctgttcaacctgcaagccacggctgaggcatatccgcagctgcaagccaaccagaacttcatggatctgcagaaccagctcaaggaactggagaacaagatcgcctacgcccgtcagttctacaacgacgtggtcctgaagctcaacaccgccatcgaaaccgtgccgacgaacatcatcgccggtctgttccactttgagcaggcgcaatacttcgaggccgatgacgcttcccgtcaggtgccacaggttcagttctgacccgcttcaggcccgtccggtaagccgccggccgggcccgtattgtcttaagagagggaagatatgcggatacgattcattcgcgccggaatcatcagcattgttgccacggtggtgttggcagttatcaccttggcgataatcgggacttccgcgttcggcgattcggccgacctcagctaccgcacgctggactatgacgtgaccgccaccgcgaacggtgatttgaaggtcacgcagcatatcgacgtcaagatgcgtgagcgtaccgacagtgacgacaacaccaagccgtggaagcagctgttccagcaatacacgctgaactccggcaccttgactgatatcagcgatatcagcgtgcgcaacgtcaccgacggcatcgactacgcacaacagagcgagcccaagctgcccagtgacgtctcttccgacaaggaatggaacagcgactacgccaaccattggtatgtcgccgatgtgagcgatggcagcgaccgtccaaaggcatacacgcccggtaccgatggcctcaagcccagcgcctccgccaccgaagatgacacaaccgtggagatcggctggaatattccggtcaccaccgaggccgacagcatgaagttcgatgtaagcttcaccatgcacgatgtggccaccaaatggaaagacgtggcctcctttcaatgggagccgttcggcaagaagaaccaagtgcctatcggcacggtcaccggcaccgtccatttccccaacggcatcaccggcaaaacctcatggacatggctgcacaccgagcgcacctcggaaaccaagcgcaacagcgacggcagctacacgttcacggcctacaacatccacaatggcgactacctcgatgtggtcgcggcgttcgatgccgccaaagccaagggcatcgcccgcaagggaaccggcaatcatctcaaggacctgaaacaggacgaatataagcaacagcagcgctggctcgacaagcaacgattcgctgccagagctcgtctcgtgttctggattgtcagcatcgtgctcggcatcgcgttgtgcgcgtggggtatctgggctgtgatctccagcaaccggcgtgcgcaatacagtggcagcgtcgaatactggcgcgaccagcccggcatcagtccggcttccgcagcccgtctgattcgcgtggtcgatccgtcgacgcgccaatccgatgaaggccgccagctgaccgccaccatgctgtcgctcgccgtcaagaaggccatcgccatttatccggggccgtcggacatgtatcgcggcatcgacatgagccaggccacgccggtgggcttgagccaaatgattgccgccgaccaaggcaagcagtatgcggcaggcatcaccagcaccatcgtgattctgccgctcgccattgatgaggcacccaacgcgcaacagttgggattgagcgaatcggaagatgcgctgctgaacctgctcatcgtcatttctcagcgcgtgggcagcccggtattcgacctgaaccagatgaaggcgacctgccagaactggcaagacggctatattgagctcggcaaattcaccggtgcatgcagcatggaataccagcggctgggtgccacgcgctctgtgggctggcaatggatcctacccggcgtattggccgccgtgctgggatttggttcgctgctggccaacagctttatcggatacccggtggctggtcttatcgggctgccgatattcctggtcggactgttctgctcgatggccggcgcgatgaccgtgctcactgatcaagggcaggatatcgccggccggactctgggccttaagcgttatatggaagacttctccaacttcaccgaccggggtaccgccgatttggccttgtgggattggtatatggtctacgccgccgcgtttggcatttccgatcgcgtgatgcgtgaactggccaaagcatatcctcaggtcaacgacccggcttggctggatgccaacgcctccaactcgttgttctactggaactaccgcccgtatggctggtacagccaccgtcataatggtccattcgaccacgatgctgccgggcagatggacctaggcgttggcggcccagctccggcttacggaggcacgtcgtttgccggcggattctccgacctcggctcgcagctgaactccggtctggcggacatcagctcgaccatcagcgcggcagcaccatccgccgattccggtggcgatttctccagcttcggttcgggcggcggctccggtttcggcggctcgttcggtggctcaggtggcggctcgttcggcgggcggtagcgcatgcctatgtcgaaacgcattgttcgtgccctgggcttaagccttgtcggtgcgctgattcttgccgcactctgtgccggtgccttgattctcggcacagatggtgccgacctgagctaccgcacgcttgattacgatgtgaccgccaccgccgacggcgatcttaaagcacggagcatatcgatatcaagttgcgcaaacgcaaggatgacgatggcaagaccaaaccgtggagatcggctggaatattcccaccaccgtaaaaaccaacagcatcaagttcacggtgagcttcaccatgcatgacgtggccaccaagtggaaggacgtggcgaccttccaatgggagccattcggtgagaacaatcaggtgccgattggtacggtcaccggcacggtgcatttccccaaaggtgtgaccgcgagcaactcgtggacttggctgcacactgaacaaacctcggaaaccggccgaaccaaggatggcagcttcaccttcaccgtaaatgatgtgaaaagcggcgagtacctagacgtggtggccgctttcgacgcggccaaggcgggagatatggctcgtgtcgagaccgacgatcatctgcaggagttgaaggaagacgaagccgacgacgaacggttctggcgcaatctggaacgccaacgcgccacaaggcgcctgaacaactggatgaccaccatatcggccggcctgatattcgggattattggtgttgttgcagccttacgctcctccggacgttcacgttaccgtggctccatcgaatattggcgcgatcgccccgagctgagccccgcatcggcggccaaacccatcgatatcgtgacttccggcgacaaacccgacatttccgagcgccaactcgtcgcgaccttgctttctctggccgtgaagaaagtcattgctgtgttccccggttcggcggacctgtatatcggcgtggatctgaaacaagtttctccggtggagctcagtcagcgaatcgggtccgatccatacaagcgcaataatgcgcgtaccaatagcacgattgtgatgctgtggcagtccgattacggcgtatctgagggatttgatgaatcagtattcgtcgaatccgtatttgatggatctggatctggcggatctggatctgctgcatctagcgtgtccgatgcacaccagcccgatctcagtgcttctgagcgggcattgctctatctgctcaccgtgatttccgagcgcgtaggtcgtacggcatttgacatggatgacatcaaagacgcctgcaaggattggaaagacggctacaaggaactcgagaagttcaccaatgcgtgcaagaccgaattcgcggcggcggatatcgcgccgaaaaccgagaacggatggctcattcccggggcaatcaccgtgctgatcggtggcgccagcatattcatcaacggtttggccggatatctggtggccggggccctcatcggcattcccctgatgacggtcggcatattctgcttcctgatggggaattcctacgtgctgaccgatcatggtcagcagatggccgggcaatgcttgggtctcaaacgatatatgcaaggcttctcgaacttcaagtaccgtggagtcgcggatttgacgctgtgggattggtatatggtctacgctgccgcatttggcatatccgaccgggtgatgcgggagctggccatggcctatccgcaagtatccgatccggaatggcttgatgccaatgcctccgacacggtgttctattggaattatcgtccgtacgactggtatgggttgcgtttctacaatggctcggcgttcgcggattccgtggctgacagcggattggccggagcggtgccagcgttcgggggcacgtcgttcgcggctgggttctctgacctcggcacgcaattgtcgtacggatttgcggatatcaccgcgacaatcaatgcggcctcgccatccggtggctcaggcggctttggcggtagcagcggtggttccggcggtggttcgttcggcgggcggtaagcggtgtgcttctgaaagtccctatagctttgaaagtaaaaggtccggtgtcataagacatcgggcctttctctcaaaatcgaggtgaggaaacctcaacagtcaggtccaacggggcgaaagtctgtggcgccgccgagaagattgcctcgaagctagcgtgacctttctgctacaacacagcataccagcctccaccgaagctcaccagtacactggactgaccaaaccaaggtctactagcgtggcactttggcgcggtgtcgttgtgtcaaccggcataatgacgtctcaaaattcaagaggaggttctcatggtaggcaacgaccatgacaaccgtccgagacaagaccggcaataccgggaaggtctgatgaccggcctgttgatcgccctggccaatcaagttggacaggggcggtcgacggccatcatcattgccgcactggtattgctgggaatgagtctcagacgaggccactgatctatcagcggaacagccggaatccatggggttccggctcctcgttttcgctgaactgggtatgagtaagttgcgttttctattccgtgaagttgcggaaatttcatagattgattgtgcgggcaggccgagagtgtgaaatccaacgggatgcttaggcttgattgcggatatcgagtttccataagtttcacgaagggaatcaccatggcattgttccgtaacctcggaccgttctccaccaccgccatcggccacggcgaaatgccgctgaccatcgaaaacaaccgcggccacgaggtcggcatcgaaaccctgcatgcctcgctggacgccggctgccgccacatcgacaccgcttgggcctactactgctccggcggcgaggagcagaccggtgaaaagctggtgcgcgaggcccttgagacctggaaggggccgaaggacgaggtgctggtggccaccaaggtgggccacttccgcaacttcaccgacggccgccccacgtgggatgtggacggtcgcccggagaacctgattcggcgcggcaaggagagcgcactggcgctcggcgtggacaccatcgacctgctgtacttccaccgcccggacccgaaggtgccgtacaacgagtccgtcgaagccatcaagcagctggtggacgagggcgtggcgcaggaggccggtatctccaacgcctccatcgagcaaatcgacattgcgcgcggcattctgggcgacaagctcgtggccgtgcagaaccagtactcgccgattcacctggagacccaggacacgctcgactactgcgccaaggtcggtctggccttcgtgtgctggagcccgctcggcggctaccgtcacccctatgatgagaccaagttcgacccgttccgcgaggtcgcggcggcccacggcgtgagctaccagcaggtcgtgctggcatgggagctcgccaagggcgaccacatgttcgtgattcccggcgcccaccaccccgagaccatcctcgactccctcaaggccgaccggctcgagctcacccccgaagagctcgccaagctcggctgattgcccattccccatcctcccgaatttgtgccgctgacgttggcttaacgtcacaaattcgggaggattgattcgtcttgaaggaaccgccatgcgcaaaaaaatcatcctcgacctcgataccggcatcgatgacgcgctcgccatcgcatatgccctaggcagtgccgacgagatcgatctgatcggtatcacggccacctacggcaatgtcgcggtgccgctggccgcgcgcaacgcgctggcggtggtgcacttgttcggccgtgacgacgttccggtctatcccggagtcgaccatcccatcgccccggcaacattgccgaaaatgcgtggcaccacaccagacgagcggacccaggcctacgcgcgctggcagaacggcggcgcggacggctggcaaacggacgcttcgtgggcaccaactcccggctcggtggcggtccaccatcccaacggcatcggcggcgcaatcatccccgactccccgcgcgctccggaagcaccaggctcggcggtcgatttcatcatcgccgccgcgcgcgaatacggcccggacctgaccatcgtacctacgggcgcgatgaccaccatggccaccgtattccgcaacgctccggacctgaaggattccggcgtgaacgtgacgttgatgggcggtgcgttgacgctgcccggcaatgtaagcccggccgccgaagcgaacatctcccaagacccagagtcagcagactatctgttcaagtgtggcgcacgcaccaccatgatcggcctcgacgtgacccaccagaccgcgctcacccgtgagaaagcctatgaatgggcgtctctggggacgccggccggcgacttcctcgtcaccatgaccgactactacatcgacttctacctgaagaaccagccggagattcgcggatgtggactgcacgacccgctggccgtggccgccgcgctcgacccatcgctggtcaccacgttcggcttcaacttacaggtcgatctcgagggcccgttccgtggccgcaccatcggcgatcgttcacggctccaggaccccgacaaacacacccaagtcgcattgggcgtcaacgtgccggaattcctcgaccgtttcatgacccgcgtcaccgccgccgcgcgcgggtgaacgattacgcttcggcagggaatagagttctgcgtcaagtgcgtctgcgactcgcatgatggtgttgaacgagggctgcgaattcgggcgaagcgccttatataaggattcgcggccgaggccggattttcgggccacattggtcatgcctcgtgcgcgtgcgaccacaccgaacgcatcttgcacaaatgcgggatcatcctcttcgagtgcgccattgagatatgcgatggcatcctcgtccgaattgatgtatgagaatcaccaaaactcaaccacctatttcacatacccgaaaaatcagaaaaagaatcagatggtcgctggattttccctgctcttttcgatctgacgtttgagatattcgcccagcccatctacgcaccaaagtgggatgttcgtcagccaagattgctccctatagcctatttctcctatacggataccgtggagcccgtatctgttgcagacatacgagagacttctcgcacgaatattggaagaggacttcacttcgatgggaaaaacctcgtctccctgttccattacgaaatctatttccgcatttccttgaggatttgggttagcccaatagcggggtctgattccttgagctaccagctgctgacatacgtattgttctacgaacgcgcccttgaattcggaaaagagcttcgacttgttcaccagagtattcacgtcgagaccggacagtgcgcccagtatgcccgtgtcttccagatagatcttgaacgtgttaagactctcatatctgggcagaggaatatgcagagcatcgaggcgggggactttggtaatgatcccgtagtccgtcagccaagtgagcgcttcctcatattcgcgggcgcgggctccttgcctgacaacaccgtaaacgaatttgcggttctccttggcgagttgtgatggcagtgtgttccatacaagccggatacgctcgcccagcgtatatgcggcatgcttggaaaaatcaagatcgtaggcgttgagaatatcttgttggacagttcgcacatcctgcggaatcccgttatccaggtgagcgcttaatgctgctggcatgccgccgacccacatatatgttttgagtaggtcattcatctgaggttcgagagcttgtggaatgtcctcgaaccggccttcacgtatggtgtcggcgatcatgtcttgtccgatgctgtccagatattcggcgaaggagagcggatgtaggttcatcatggtgacttttcctacaggaaaagaggttttgccgtgcttggatattcccatgtaggagccggtggcgatgatgtcatagtcaggtgcctgctcggtgaagtatttgagagaggtcaacgcgagcggactttcctgtatctcgtcaaagaagagcagtgttctgccggggagtatccgttgattggcggcgagttcgagctgacggattattcgttgcgggtcaagatcctgctcgaatatcccggatagggatggccgctgcatgaaatcaaccgagacgatgttgtcgtattgtccattcgcgaactcgttgacaagccatgtcttgcctgtctgccgtgcgccacggatcaggagaggcttatggtcaggtgtggtcttccactgcttgagcgttttcagtgcttttcgctggagcttcatgacgaatatcctatgataaatgtgcgatgcttacacatttatcatatcataaatgtgtaagcatcgcacattttttatagtttattgcagtcgcagtagttttagcgcaacggataccagctgatcggtacgggtcttgatcgcttcggcatcccatttggttatctgtgaggctcagccatcttacgcggtataaacgttaaggagcaaccaaagggcggtctttctgagactaatctcagaaagaccgccctttgcgatggaataaattgagtgtggaactcggtattggtttgaaagactgtttacagcccgggaatcagaccgccgggcggatcgagcgtgaggtattgctcctccagatcgatgtcggggaccaaggcctccacgaacgggaccaatgcggtcttctcgaccacatcctcgcccttggaattctggccggttaccaccggctcggtcaaacgaatcttgagcagggactgagcgggggagtcgaccacatccaccactttgccgaccacttggccggcgggcagtcccagaccgttgccctcgactagacgggcctcaaggccaataagatccttgggataccattcgtcggcttcgagcatatcttctgcgtcgtcgacctcgccgtagagttcgacaccgtttagggcctcggcggcattgcggtcgtcgacgccctcaagcttgagaatccaacgatccttgaacgtgcgtgagccctcgacgatgtactcggtctcgccatcttggctgtagagcacggagtccggctcgaagcgccactcgggatcatcggtgtacaggcgcacggtgacttcgcccttcaggccctgtgcgcggccaatacgagcgaccctcagcaactcgagctgctgagggtcgtcgtgcatgtcttgctgtgccatgctgtgaatcgttccttatcggttatcgacggacgtccatgatgtcaacgcggaccttgtggtcagacagtgcctggatcacggtgcgaatcgcgttggcggtgcggccgccacggccgatcacacggccgatgtcttccgggttcacgcgtacgcgaagcagttcgccacgcgcgttctcatgggacttgacggaaacatcgtcgggaaaatcaacgatgttcttgatgaggtgttccacagcctgtgcaagcatagctagcctttcgtttccgctcaggcctcggccggagcttcttcggcggcctcttcagccggggcttcctcagcggcggcagcggcttcggcttcagccttggccttggcggcagcttcggccttggcggccttcagcttctgagcctggttctcaacggccgcgatgcgggcctcggcgtccgggccagcctcaacggtcttcagggtgccttcggcaccttcaaggcccttgtacttctgccagtcgccggtgatgttcagcagcttgaagacgggctcggacggctgagcgccgacgccgagccagtactgagcgcggtcagacttgatctggatggtcgagggctgggtgttggggttgtaggtaccgatctcctcgatgaccttgccgtcacgcttcttgcgggaatcgacgaccaccacacggtagaaggcgtagaacttcttgccctgtcgcttcagacgaatcttggttgccaaaatggctctccttgtaatgctaggtgtgcgggttctcggtttgccatgtggggcatggccggccggaatccacgtgtcctcgcggctcggggtgtagagggcgccacgcgcgcgcgaataaccgtactagtgtaacgcggaagccggatattgcgcatcggtccggtcgtgacgcacggaatcgccggacggacggcgtgtcggcggcgc

SEQ ID NO: 2170 - DNA, 3292 bp, Unknown
  R51_24m  MAG No. k141_14523
caacaggaggagtgtgaccaatgcggctgattgagacatggctggcggaccaggaacgcgcgtttgacttgttcgcgaaattcccggcggaggagacgggattcgagaacccagcggccggcatgaatcgtgaacggttcgccgcatatgtgcgagggttgcgtgatgagtcgcttggcgtcggcctgccggacggctgggtgccagccaccaaatacattctcgtcaacgatgagggcgactatgtgggcatcttcaacctgcgtcaccggctcaccgacttcctgcgcaacggtccgggccacatcggctacggtgtcgcccgcgaataccgcggtcacggctacgcgaccgccgggctcaagctcacgcttgccaaggcccgcgagctcggcatcaaggaggcttacctgagtgtccacaaaaccaatccggcaagtcttgcggtgcagcagcattgcggcgcacgtatcgaccatgaggacaagacggaatactacacacgcatcgccacctgcacggagagcgatggcctctatgcgcgaggcgattgacggcgcctcttgcgtgtaaatggccgattatcaatcggttttaatcgatttcgcctcggtcgataaagtcgccgtcgaggaaccaataatcgtgcggatttccgcgtaacgccatgaacggcgtgagttccacgccctgtgtctcagctctgctcagcagataggctcggataatccacggatactccagcacgcccgacttgagggtgatgatttgctccactctgctgccgctgacgccaaaatccctgccgccgttcggcggtcagacccagccggctcatgttctcctgaaattcgcggatagtcgccccgcgttgctcactgttcaaagacatggcttcatgaatgttgcattggcgccttaatcatccatagttaaggcaccacgcaacatacgattcgcttacgcagccatccgacgatggttgggatagattgttcggcgaagcggtctatggcgtcggcggtgacgtaggcgtgggcggtgaggcgcaggtacagttcgccgccgaccgcgctggccgcctcggatacccgacgctccgcgtaatcggcaagatcggacatgtaccggcgcacggcatcacagccccacagtcgctcgatatcacgcaaggactcgggcgcggcgatcggaccgcataaatcctgggtgccttgctcatcgaatcgctccgggaacgggtcagcgaaaccccacgagtcgatcagtggccacaaatcctgaccatcctgaccgccttcgggcggaatcaccagcaatgccgtgccacgcggcgcacacgggaacttatgaaaattgccgacccaccaatcggactgcagtccgccggccggatcggccagttgggcgggagcgtgcgcgccatcaaccaaaatgcggatgccgcggcgatgggcttcggcggcgatgcgctgggccgtaaacagcatagcggtggcggaagtaatctggtccaacacgatgaacgacgtacgctcgctcatctgcgcggtcacggcgccgaccacgccatcctcgtcggcgtcaatggtaactggtgcatcttcctcatccatgcgaatgagacgaatcgcctttcatcccaatgatttcgctctcatggctgatacccgcatgccgtcatgttccgtaccttggaatcagaagtcgagagtcatggtccaaaaccgaatggagcggaccgaagcagggagcattgaagatgggatttctcaagaacttttccgaaccgtttgcgttcgcgctggcattgtggccgtttgtgtccatgctgctgacggtgccggtgctggcgttgctgtatcaccgcgacaatcgcatccgactgtcgtcggccatagtggcgtatggcacggtgctgtacctgctcggcctgctgtgcttcacactgtatccgatgccggccgactcggcggcctattgcgccgcgcaccatctgacgccacagctcaatccattgcagttcatcggtgacatccgtaccgatggtctcaccgccgtactgcaaatcgcgtttaatatcgtgttcttcctgccgttgggcttcatcatgggccgtatctggcgttggccgctgccggttaccgcagtactgtcgttcgccacgtcgctgtttctggagacgatgcagctgaccggcctcatgggcgtgttcccgtgcgcctaccgtctgttcgacgtggacgatctcctgtggaacacgaccggcgcgctgatcggattcgcgctggccatgctttcgctgcgcctgattccggcgcgggtcgccgatacgacgccgaccaccacacctggcttcatgaggcggctgatcacgttcatcatcgacatgacgctgatcgggttcgccgtgatgccgacgcatctgttcgtcatgatcgtccgctcaaacctgccctcgggctccaacggctcatggcagtcgatggaaccgttcgactggaccggctcgatcctcttcctggcggcgctcatcctcttcgagggcgtggtgccatggttgcgcggcggctgcacgttcggcggcagcttcacgcacatgacgatagagacccggccgcgcgaagggtggcttcgcgtggcgttctatgtggcgcgcatggcgacgctgatcgccgtggtgtggtggcatagtggcggattcaatctgctggtgttcatcggcctcggcatcttctggctggtcaagcgtcagatgccgtacgacctgatataaaccggcgctccgctgcttggcgttacaggaaaacctccgaccactggtcgggattcggaatgctgcgcagcgggccggccaacgatacggccaatcccgctacggaacagaccacggctacggccatcaccgccgtgaaaccgagatctggctgttgcaacagccagccgaccatcgccgggcatgctgcgcccagtatgccgaccgtggtttcaaatacggcagaagcccgcccctgcatgttgtcgggtgtcttgccgtagagaaagcccagcagaccggcgttcaacgtggggaacggcaggccggccagaatctggcagatcagaatggccgcgtagctgtgcaggaatagcagtggcatctggctgaccacgaacaacgccagcgcgcccgcaatcagtttccctgtgggaaccatatcgactagcttgttggccaacagcgagccgaccaaagtactcacgcccattgccgtgccgagcagtccgatcatgaccgcgttggcgccacggg

SEQ ID NO: 2171 - DNA, 3343 bp, Unknown
  R51_24m  MAG No. k141_14801
ccgcgaggccagcctggagaccaaggaaaccctgaagacccaggtgccggtgcccggcaaggtcgagaccatcgccggtttcaacgagatggacgccgaagccggccagaagttcatcgacgagcgcggtctggccatggacctggccgacctcgaattctgccagaagtacttcagcgaggagggccgcgaacccaccatcaccgagatcaaggtgatcgacacctactggtccgaccactgccgtcacaccacgttcggcaccgagctggacgaagtgaccatcgatgacgccaccgtcaaggccgccttcgagcgttatctggcgatgcgccacgagctcggccgcgacgccaagcccgtctgcctcatggacatgggcaccatcggcgccaagtggctcaagaagaacggcgtcctgaccggcctcgacgagtccgaggaaatcaacgcctgcaccgtcaaggtcaaggttgacgtgaacggccacgacgaggactggctgttcctgttcaagaacgagacccacaaccaccccaccgaaatcgaaccgtttggtggcgcggccacctgcatcggcggctgcatccgcgatcctctgtccggccgttcctacgtgtatcaggcgatgcgcgtcactggcgccgcggacccgaccgtgccggtctccgagacgctggaaggcaagctcccccagcgcaagctcgtgaccaccgccgccgccggctacagctcctacggcaaccagatcggtctggccaccggtcaggtcgacgagatctaccaccccggctacgtggccaaacgcatggaggtgggtgcggtcgtggccgccactccggccgaccatgtgcgccgcgaaaccccggcccccggcgacaagatcatcctgctgggcggccgcaccggccgtgacggcatcggtggcgccaccggttcgtccaaggcgcataacgtggaatcgctcgaactcgacggcgccgaagtgcagaagggcaacgctccggtggagcgcaagctgcagcgtctgttccgccgcggcgatgcctgccgtctgatcaagcgctgcaacgacttcggcgcgggtggcgtgtccgtggcggtcggcgagttggccgacggcctgttcgtggacctcaacaccgtgcccaagaaatacgagggcctggacggcaccgagctggccatctccgaatcccaggagcgcatggccgtggacgtagccgccgaggacgtggacgagttcctgatctacgcccgcgaagagaacctcgaagccacggtgatcgccaccgtgaccgaggacccgcgcatggtgatgacctggaacggcgacaagatcgtgaatctgtcccgtgagttcctggcctccaacggcgcttccaagcaccagaccgtgcatgtcgaggcacagcagtcctacgagaccccgtggggcgagggcacgctggccgagcgtatgaacaagctggtcaccgacatcaacgtggcctccaacaagggcctttcggagcgcttcgactccaccatcggcgcgggcaccgtgctcatgccgttcggcggcaagcgtcagctcaccccgaacatggccatggtcgccaagctgccggtgttcggcgagaccaccaccgcttcggcgatggcgtggggcttcaacccgtacatcatgtccaagaaccagttcaccggcgcctacctgtccgtggtcgagtcgctggccaagctggtcgcggccggcttcgagcatgagaaggcctacctgagcttccaggagtacttcgagaagctgcgcgacgagccggaacgctggggcaagccggcggccgccgtgctcggcgcactgatggcccaggtggacctgggcgccggcgccatcggtggtaaggactccatgtccggctcgttcgaggatctcgacgtgccgccgacgctgatctccttcgccgtggccgtgggcaacatgaagcgcgccacctcccccgagttcaaggacgccgatcaccgtatcgtgcgcatcgcgccgcgctacctggccgacggtctgaccccggacaaggatgcgctgcttgaggcgttctccgtgatcgaggagctcaccgacttccacgatgccctggccgtctctacgccgggctatggcgccaccgccgaagccctgttcaagatgacgctcggcaaccgcatcggcgtgactctgaacgacagcatcgccgtggacgacctgttcaccccggcatatggttcgttcatcgtcgagctggcagacgatgccaagcttccggccgtctccaatttggtcgagatcggcgaaatcggcaccaccacctccgagtacgtgttcaaggccgccggcgagacgctggacctggacgctgtgcaggaagcttgggagtccggcatcgaatccgtgttcccgtaccgttccaagggcgaggacaagggcgcgaccgtcgagaccatcgacttccacgcgccgaagaagaccgtgtacgtcggctcttccgtggccaagccgcatgtggtgatcccggtgttcccgggcaacaactgcgagtatgattccgccgccgccttcgagcgcgccggcgccgacgtgaccacgctgatcatcaacaacctgacaccggccgccgtcgccgaatccacgcaggcgttggtcgatgagatcaacaagagccagatcgtgatgatcccgggcggcttctccggcggcgacgagccggacggttccgccaagttcatcaccgcgttcttccgcgcgccggccgtcaccgaggccgtgcgtgacctgttgaagaaccgcgacggcctgatgctcggcatctgcaacggctttcaggcgctcgtcaagctgggtctggtgccgtacggcgacatcgtgccgatgaccgacgcctgcccgacgctgaccttcaacaccatcggccgccaccagagccgactggtccgcacgcgcgtggcctccgacctctccccgtggctgtccaagacttcggtcggcgacatccacaccgtggccatctcccacggcgagggccgcttcgtggcctccgacgaggtactcgcccagctcagggccaacggccagatcgccacgcagtacgtggacgagaccggcacccccggcatggatctggatgtgaacccgaacggctcgctgctcgccatcgagggcatcaccagcccggacggccgcgtgtttggcaagatgggtcactcggagcgttccggcaacggcctgtacgtcaacgtgcccggcaacaagtaccagccgatcttcgaggccggcgtggaatacttcgccgcctgataatcggcgcgtatcgcgtctgatacggcacac

SEQ ID NO: 2172 - DNA, 3145 bp, Unknown
  R51_24m  MAG No. k141_14877
atgggttcaccggacacggatgagatgatcagtttcacctatgcccctttcgattgtggttgactagcaccccagctgtttagctgttatacaacacagtataactgttctgcttaactgtcaaggtgtgttacataacagctaaacagtgaacaaacaccttgccaacatacagtgtcgaaacatgggccgcgcctacaatggcctcgggaaggggcacctatgccaaacaacgccgttacgccgacagccccgccagcgggggtgtaatttttttatcacagcacgcgcggagcgtcgtggaagtcgaagaggacgccgtcggccaggtggcagatttcgggccaatcggaggcggaggagtcgtcgtgcatggcccagaccttcatgccgaccgatttggccgacttcatgccgaccagcaggtcttcgaacaccgtgcagtcgaccggcgcggcgcctaggcgcttggcggcaagcaggtagacgtcgggctggtccttgccgacgtcgttcgcgtcatcgacggagacgatatcgttgaacagatcgaacatgccgacgtggcgtagcgccggctcacgcagatgcgggggcagcgaggtggcgacacccagtttgacaccggaggctttcagatcgcgcagatagtcaagcgcgccgggtttggcttcgaccgtggtggaataggcgacgctggccatgtcgtcccattcctgcatgagctcttcgggcgtgtctgtaaggccgaagcgtgcgatggtgtattcggcgatctggcggaattgcatggcggagactttggtcatgtagtcgggcggcacttcgattccgcgcttgttcaggaagtcgatgtcgacttggtcccagactcccatggagtctaggagggtgccgtcgaggtcgaatatggcggctttggtcatttgctaatccccttcttcttcaaccaccctcagtcgcctgcggcgccagctcccgccagcgggagcgtaagccgagaatcggatagcagttctcgggcgtggtctagggaggcttcggattcgctgccggagagcatgcgggcgatttcgtggacgcgggcttcgccgttgacttcggcgatggtggtgaccacgcccaaatcgtcgtcatcggcatccggcggctccttggtgaccacgaactgcgcgtccgcccacgaggcgacctgcgccaagtgggtgacaacgatgacctgcgcgctgcgggccagccgtgccagacgtttgcccagttcgaccgcggccttgccacccacgccggcgtcaacctcgtcgaagatgaaggtctggtcggcaccgccgcgcgtgtcggcggccaccagctccaaggccagcatcagtcggctcagttcaccgcccgaagcgcttttgcccatcggcaactgcggcgacccctcgaacggcgtaaacaggaacgcgatatcgtcgcgaccatacgggccgagcggatcatcggccttgtctcgcggcgtgacgcgcacttccaaggaggcgcccagcatggcgagcgagccgagttcttcagtgacgcgcgcgcccaagtcggcagcggcagccacgcgcgcggcgctcagcacgtcggcggcggcgagggccgcagcgtacagcgcctgccgttcggattcgagttcggcgaccttttccggcgaggcgtccagatcttccagatcgaacgccgccttgtcccgccaagcgagcacgtcggccaaggtggggccccaccgacgggtgaggtcgccaagctcgtggatacggccgttgatctggtccagatcctccacgctgccttcgtcgcccagctcccggctcagggcgaacaccacgtcgcccaaatcggcattgatggattcaagccgatcggcctgctcggcgaacgtgccgccgacgcgaatcgcgcgcaacgaggtcaccgcatgattgatgagttccacggccgaagcgccgtcggcggcgtccacatccacctgcgaggcatccagcgcgcccagcgccgaacccacgccttgggcgatgtcagccgcgttttcgatgcgttcgcggcacgccttcagctcctcgtcctcccccggctgcgggtcggttcggttgatgcggtcgatggattcgcgcaggtagtcggcctgttggcgggcagaggattcctgcgagcgcaggcgttccagccgctcatccatggcggccagcgcatcccacgccttgcggtaggcggccagttcggcttcgtctccggccacccggtccagaaactcgcgttgccgtgcggcggccgcgattttcagctgatcggtctggccatgaatgatgaccagttcgccggcgatggcccccagcaccgaacgcggtacggacttgccgccgagcacggcccgcgaacgtccggaagcgcgtacggtgcgggaaaggaacagttcgccgtcttcggggtcgacgcccgcgtcgtgggctttggccacggccgcggcagcaccggtgagcccgctgtcagaatcgtcagaaccggcatcgtcaccggcatcgttggtgtcgccggaatgttcagatgcgacggcatcatccgcgagcgcgaaaatcgcctgggcccaagcctcgtccgccccggccgagacgcgcgaggattcggcggccccaccggagaccagtcggatcgcggagagcagcatggatttgccggcaccggtctcaccggtgatggcggtcatgcctgcggccggcgcaatggcggcttctcgaatcggccccagattgcggatatcgagttcttcgagcatcaggctcctgccttgccgtcgcgttcgcccggcttgtcgggctcggtaccagcgacaccagcgtcaccggcaacgccagccgcatacgcggccgccgggaacgtgtgcccgtgatgcagtggctggctcgaggcctcgttgcgcgcgtgctcgcgccaaccgaccacgggcagatcgaacttggagaccagacggttggtgaacggcacgccggagagtcgggcgaggcgcaaggtatcgcgcgattcgcgcaccatgacgcgcgtaccctgcggcagggcgcgctggcggcggccatcgcagcaaatccagccttcggacatggaatcgtccagaatatcgatggtgaag

SEQ ID NO: 2173 - DNA, 3047 bp, Unknown
  R51_24m  MAG No. k141_15090
atgcacgcaacgaattcatcgtcgcgtgtcgcattgatatttgcccaacgggatcgctctccctcttctcatacaataatgggccgcgcccaaccgtatggcagagccggtctgttccggttccgttacggttgggcgcgacccaaaatatcgagcctagacccaatatcccttatcggcgaatacgcagcgtggcgagctggaagggcaccaacgaaacgaccgcaccgtcggcgggcattggttcgtcgccggcgagcgcgcgcggcaattcggtgtccagttccggctcctccatgagattcacctcctgcacgctggccttggcatcggcgagagcggcgtcaaggcgcagtgtggccgtggcattgccgccggcggcctcgtacaggcgcacgatcagatcgctggaaccgtcatcggcgagcttgatccagtccaatacgatgacgccggtggcgtcggcgagcgagaccagcggcgccatatcaggcaactcccctattacggggctgttgagtcgcgccgcttcgtccagcaccgcattcatatcggcgtcagcgaccagagaccacgcgaaggagtgtgcgccttggtcggtgcgtgggtcggggtacagcggtgcggacagcagcgagagccgcaccatggtgccgcggccggtgccatgtgccgcatcggcgtggatggggctgacgtcggagccgtaggtggaggcgttgaccacagcggcggcatagtcggcgtcggcgatccgcacgaagcggtgcgtgcagctttcgaatttggcatcatcgctgcgcgtgttcttgttgatggggcgttcgaccagaccgtattggcattcgtattgcgcgttcagcgcttgcacggtgaccggcatatccactttgaggaactgttcgacggcatgccagtccacatcggcggtgaagtccagtgtggcggagcccggccttaaggcaatgcccgtacgaatttcaacgcccttcgcgcgagtgacagcatgcacgacggccccaccgttggcggtttcgtccacgcttgcaatcgatgcctcgctgagcgcgttggcggtgaggaacgcatcgcgttgaatatcccaggcatcccagtggaagggttcgtctttgagcatttcgtagcggcccagtcgggtgccggcgggcaccagttcacgattggttcgctgatcgacgattgacgaaacggtgccgtcggcttcaatgcgcacgtgcagtcggccgttgtcgagcacaatcgtatcgccgtcatgggtaacggcgacccgagccatggatgcggttcccgcttcggctcggctcgaagccgggcgtaccacccacgtctcacaggcttggcgggaatatggggcgattacggcgtcggttatggttgcgtcatcgggttccacggctgcgatcgcgcgcccggcttcaagggcgatctcgttcagccgagcgatgtcacgcgcgtattcggtccgcgcctgacggtgtacccatgcgatggccgaaccgggcagaatgtcgtggaactggttgagcagcagggtcttccagataaggtccagttcctcacgaggatagacgtaacctgggttcttgatactggccgcggcgcacaggtattcggtgacgcgcagcatcgactcctcctggcggcagccgcgcttcatgtcctgctgggcggtgagggtagcgcggtgcagttcaaggtacagttcgcccttgaacaccggggtctccccttgcgcatcgtcgacgatatccttacgcacacggtcgaacagttggtcgggagtaccgaattcgatcttcggcgcgccggcgagatcatggtcgcggcggatgcgcgcggtcatctcacgggtggggccgccaccgccatcgccgaagccgtacagcagaatcgcgttacgggagaggtccttgtccaggaagttgcgctgcgaatacatcagctcgtgcatgctcatccacgagcagtaggtatccgagggcgggaagtgcgtgagaatacgcgtgccatcgatgccctcccacatgaacgagtggtgcgggaacttggtggtgtcgttccacgagatcttctgcgtgaggaaccagtcgaatcctgcacggcgggcgatctgcggccaagagccggtgtagccgaaactgtccggtagccagatgccgcgcggcgcgacgccgagatgctccttgaaatatcggcggccgaacgtgatctgccgcaccaatgattcgccagaaggaatcatgttgtcggattccacccacatgccgccgaccgggatgaagcggccctcttcgatgcgccgcttcattcgtgcgaacaggtcgggatgctcctcttccagccatgcgtactgttgggcggaactcatcgcatacgtgaagtccgggtcttcgtccatcaaagccagcacgttggatacggtacgggccaccttgcggcgggtctcgcgcaccggccacagccatgcggagtcgatatgcgcgtggccgatggcgatgtgtttgattgcgctggaggcggccggttcggcgagtacgccggcgagcgccgcacgggctgccgacacggtttccaagtcgcgttcatcgtagatgttcagggagcgttgcagtgctttggcgagctgccagtagcgtgggtcgtcatccttgagctcacgaatcagcgaggagacggtttccagatccatgtagtaggcgaacacgtcttcgttgaagatggtgacgtccatacgactcagtgtgtatggaaaatcacaggtgccggtggcctcttcgccgagttcagtgggtgagaacggggtggggccttcgacgaatgggttggcggcggcttcgatatagacggtgaagtcgccatgttcatcgagttctacggtgctgctgccgtccgcgtagacgagtggaatccagtggttgcgtgggttcgcggatttgatggcggtgccgtcggcacgatagacaagtccctcggattggaatccggggccgcggtgatcgagccagccgaggtctaccatgagttcg

SEQ ID NO: 2174 - DNA, 12247 bp, Unknown
  R51_24m  MAG No. k141_15338
cgtggcggatagtggattcgaaccactgaagcacgaagcggctgatttacagtcagctccctttgaccgcttgggaaatccgccagtctgtttcccgccgcggtgtttgacctcaacaggcaacttggctatataaccacatattttccaagtacgcaaatcgacctctacgcgaaccttgttttaccgcggaattctgcggttttatcggcgtgtctcacagcgtggtttcagggtccgcttcggccctgcaaacagccccgaccaaggctgcaccccgcacttctaccaatcatttttcttatatggtgttccagaaccttgcaatggcgcggttttcgagtggcgtcgcctgcttgcggcggcacagcgcatgccggcatgctgggcgcacggcttctgatcttgtacatcacggacaatcattcgacgaccagccgctcggattcggcacgctggccattcacctcggcaacggggtcgacgccgaaaccggcgcgatccgtcgccccatcacgctggcgaacacctacgcactgccctacgacgcctcggccttggcgattgccaagcatctcgaatcgctggatgtggtgcgtttcgtggcgtaccccggtctggaatcgcacctgcaccacgaggtggcggccagccagctggcccgcccggactccgggttcggcggcgtgctgtcgttcggcctcgacaccgaccacgacggacacaaccgattcgtttccaagctcaatgtgattacgtctgccgtctcgctcggccatgactaatcgctgatcgtgttcctcagtgaggatgacgagcgccagtacctgtacccgcctgagttccaccgcggcttcttccgtctggccgtgggtctggaggatacggacgatttgattcgcgacatcgatcacgcgctggtggaggccggattcgaggtgtgagaccgcaccgcgcgcatgatttcggcctcttccgccctgctgccgccgtcagtgagtcacaagatggctcggtgacgacgatggcagggctttttacgtcggcacagggacaatacctggcggtctgccgacgatgacggcacttatcgtcggcagaccgccagtttttggaccgtcgccgacacaaaacgccgatttgccgtcggcaatggtccaaaaactggccctataacgacgccaacgcggctcagcatcggcacatcgccatttcgtggcccactgccgacgctggcctcatgccacggcactcagcgtcggtagagagacaaccattggcacagcgacgacaccacgaacctgcgacacggaaaaaaacaacataccgtcgacctactgccgtcttgtgcaaaatgtcttaagccgctcggccaagtcgccgactgagcctcttccatagggaccccaatccgttacccagtgtagatgcggtgcaacgccgaactcaactacgctgcgcgcatgcacctttatgcatagcaggcatggctgggcgtttggcgggagcggttttcggctcccctctctgaggggagcccctttccgcctgacaagagaaaaccccgactgttcgtgggaacagtcggggttgttgaagttcgctaggcgactaatcagccgaggatggcgagaatgtcgcgcgcgccgacgatgaggtagtcctcaccctcgtagtggacttcggtgccgccgtacttggagtacagcaccttgtcgccgaccttgacatccatcgggatgcgctcgcccttgtcgtcacgacggcccgggccaacggccaggacttcaccctgctgcggcttctccttggcgttgtccggaatatacagaccggaagcggtctgggtctgggcctcggcctgcttgacgatgatcttgtcttccaacggtgtgagcttaatcgacactgtgggtcacctcgtatctacttgtagttcgataatgccgcgccagaacgcctcaagaggctgacgatcacttgcgttgtccctttgcgctaggacacatcgtagcgcgattattagcactctgccaactcgagtgctaacgctgtgagagaaaatcggcgaatcgcaacgctcagttgccgcggcgggcaagaatggagtccaggcctgcgcccaacgaatcggtggtcgccgctggcgcttcgacgtcggcacgctcctcggattcgtggaatgcggctcgctgggcggcgtttgcagcctcgtcatcggcgtccgtagcggcgttcgtatcggcatcatcgcgctgctccgactcagtgtctacagcgtttccggcactgacagccttgcccgcatcggcggccttggcatcgtccgcggccttgacggctcgggcctcgtcaatcaacttttccgccactgcgggttcgacaggttccgccttggacacctgacgggtcgacttgatctccaagctttccggagcgttgtcggcgttatgttccccgcccaaagtgaaggagatgagatcctgcgaggtggccatatcgaagacatccagtgctcgggcagggcgtacgctggccagttccgacgtagcgtcggcagcggcatcgtcgcgctcatcacgctcgtcacgcaccgtaagcgatggttcaactcgaggggcgacggacttatccgacttagtcgacttatccgtgcgagcggaggcatcgggcgcggcggaagattcactggtttcggcagcggacttacggtcagcggattcatcgaccatagcagacggttcggcggcaggcttatcggcggcggactgtgcagtatcagacttctcagactgtttggcgtgctccgccgcggcctgatatgcggcggcggactgacgcaacgccttggccttggcctgctcaatctcggcatcgcgtaacgcgcggcgaatctgccgctgttccatgacctcggtggcagcatcctcaacatgctcggaaagctccttggcaggcgcagttacggccgcaaccggttcggccttgttcacacgcttgctgtccttggactcggcagacggtttcttggaccagcccgtaccgctatgagtccgctcgtagcggaccaccttgcgctcccattgccgggcctggcgtgaggcattggctcccagcaccagcaccagcagtaacagcacgaacggaataagagcaagcagcgggctgaaatgcagggggaacgatacggcaaacaccaacacggttatggcaagcaggcatacggcgagaatctgccggcggcggatggccgcgcggcgcagttcccgcacatgggcgatgtgctcaggtgtcagcctcgctgacggtgttgatgctggcattgctgcccctttcgccttatgcggcttgatgtctccgaatcgtctgccgttctctgcatcaacgatatgcagggaaggcgaataacgatcctgccggtgctcgtccacacgtttcatgccgttggccgtacgtacgggcagccatacaacgataataatcgccacaatcaccagcacgacgacagtgctcagtgactcataacccatagagtcaaggataggagacgtaccgacgaactggggctttccgtccgggcgtgtcggagcggaattcttccggtcgacgcttatctggaaccggtggcggcgagtctggcagagaacccttgccccatatcttcagccaacagcgcaaatgttacgtggtcgcgccactggccattgacatacatataccgctcgcgcagtccctcatgatgggctccgaccttacgcactacagccaaagagcgcgcgttatccggaagaatggcgatttccagccgatgcaacgcgggcccgaatgggtctccgagtgcccaatcggcaagcatggccagtgccatcggcgcaaatccgtggccggcgtaccgttggtcaacccaatatccgaccacaccggtgcgcatggcaccatacgcgatggctcccaacgaaatctggccgacgatacgcatctggtattcgatggcgaaaatcacgccgacgccatgctgctcattacggcgctgtcgctgcacccattgattgaaggtgatggagccgccatgcatcgggtcgccggattcccaaggcgccagccagtcgttgttgcgccagcgcacttcgttccagccgtcctcatcgtccatggtcagggggcgcaggattatcgggaaaccgggatgggtgaggcgcggcggacggatctggtggtccagcttgaacgcctctttaatcgactggaaaactgacacggcctttattgtagccatatgaagggcttgcgccttcgcctcggccactttcgttttacggtggaaacactagattgtgcggtatgagcgaagcggacaatggcatgaatatcggcagcgaccacagcggcacggagaaaacagaaaagatggataaagcgacgctgcgccaccatatactgtctcggcgcaagcgcattccagcggaagaacgtggagcggccggtgaattgctggtgcgacggttcccggcacacatgattcaggatggttccacagtggcggcatatgtgtcgatgggttcggaaatcgaaacccggccactgttgcgatggctgttggctcatggctgccacgtgttggtgccacgattgggatctgggttggaaattggctggagtgtgctggattcattggaatccttgcgctcgatggatgcagtgggtggcgcgaacaatgccggtagctgcagctctcccagcaccgtccatcacagacccgatgagccaactggcgcagttctaccgcccgaagcgttggagaaggccgatctggtcatcgccccggctttggcagtggacccgcaaggcaatcgtctggggcgtggagccggctggtatgaccgggccttggctcgacgcaagcccgcgtgccccctgattgcggtgtgctggccgtgggaggtgttggacaccgatttgccggccgaaccacatgatgtgccggccgacggagtgctgacgccggggggataccggcggcttggcgaatcgggccggctgagttgaccggccggccaagatactcggcgcaagccagactgaccaaccagccacgcacactggccgatggaaccagagtggcaaaagcaggctggctagtaagaccgtaacgccaatgtgtcagggcggcgactaggatatgaacggttgcacggcatggtgttgcacgccatgcgcgagaaatatgactttgttggaggaatccgttgcctacctatcattaccgttgcaagaactgcggctatgacttcaccgaacagcagtcgttcaatgacgacccgattaccgtgtgccccaagtgctcgcaggagcaggtgcgcaaggtgtattccgccgtgccgattgagttcaagggtcacggattctaccgcaccgacaaatccggcaagtaaggtcggctccccgtttttcctctgtaaacgacggtgtcgacggcggtatgccgcggatattggcactacgggcactgtctgttgcacgggtttgaagcgttgtggataacttggcaagctagaaccacataggtcgattcagcttgcgcttacgaaaaacttcaggtcaccatggttgcatggtgaccttttcgtttattaagccgcttgcgcgcggctcattgcggcgacggcgcatggcggatgccttgcgccgactcactgctgcgttgtgcgtgggactcgcagtgttgtttgggcttgaagccgtattggccgtggtggagaccgagccgatggtggtggccgctcgctcgattcgacggggtgacattattctggccgccgacgttcagttggctgatatgccggtatctgcgataggcccatcttgggcgtgcaatattgaggatgtggtgggcaaggtggcgcaaatcgatatcgaagcagccgatcccatttccacgcatatggccagagatgcgcccgtagcaccgaccggcactacggtgattgaagtccgcttggccagtagcgtcgacgatgtattggccggcgatcaggtgagactggtttccgccgtcggttgcgaaggtgccgattgcacgctggccgagaacgccacggtgatgaatgtcgacaaaccggatacgactggcgcattgggaagcaacgaccgactggtgtcgttcgcaatgccgccggaggccgcggccaaggttatggagctgcaacaggccggagcgattatggccgttgtgcggtaggaagcggaatcggccttcggccgatgttgtgttttccgcagccgtacggctgcggaaaacacaacatcagagcgcacagagtgcgcctcaactcctactcgcgctcgttgaaaacagcccagtgtggaggcagttcgccgaggatgcgtttgtcgtcgtcggattgccgttgttggtcggtctgcatgtctccgggctcgagtttgacgccgtcagcgtcaaactgctcagtgcctttcatcaccacgcgcttgtgcttgcgcggtgtgcgccgtgtagccgagtattccgccatgattattcaacctcgcggtagatctcgccgatacggctgacgatacggtcgacttccttatcggggttcacgaaggcggcgacactccagacggtcatcacattccagcccaaggaaatgagatcctgtgccgacaaacgatgacgcctgcgcgtggattgcacggacataaagttcgcgtcatcggtctgcacggccaaggcaaacggcttgtccttcaatcccaccacgagcggaatcttcacgcccttgtcgaatccataatcaacagcagcgttcagtcctcgcgcgcgcaacctgtcggcgatatcgtcgaacagcatgttgccgcctgccgcatcacgcaacggaagcaccggacggtcgtcaagctgttcggcccacgtcaacatggtcttcaggaaccgaggaccggactggtgcagtcgttcttcatccaaatcttcggaaccaaaggccgacacaatatccaagctgtggtccgccaatgccagggcatccagcaacagtccgcgaccgcctgtgctttcgagcgggccgaactgctgaagcagacgtccgtgcgtggttttcgcatagcacatcgtcagaatcacgtcagtggcacgacctccggccacgtcacgcaaggaaaccagccgcacatggcgcaggaatcggcccatcgccttggatttgcctgccaacgacttcaattcggcacccaagcgtgtgcggaatgcgtcggtcaacatcacgaccacaagtcgatagctggaaggaaccacagcaaaaccggcggcacgttgcgtaatcagacgcaccacttcatcaatctccggctggctggattccaccaggccagaagacataaccggcacaccgctcgcttccacacggtggaaccgcacctcaccggcagccggctcggtggccacatcatagcgaacaggaccatatccctcggattcaaggaatgcggacaggcgcggcgcacggcgagacggggcagcatccacctcgatatgaggcaacgtgtcgatcagctgcttgacgctttcgctggttaccgtcgcgcagtgggcgatcaccaccacctgctgcacgcggccgatgatggacagcaactcgatagcgggaatgtgcgcgcacgcatcgagaatcgccacatcagccagcacacccggctcggtgagtgcggcgagcgtacccggcgaggccaccagaattggcttggccgcggccagaatctccggatgatcacggcgaatcctgctcagcgacacactggcgcgccctgccagcacggtgtgcatctggttggcttcctgagtgcgggagaacagcatgtcgcacaggcggcgcatggattcctgcgacaccatcggtccgatggagcgcacgtgctccacatcgacctgtgcgaagcggtcggatgcggtctgcagcgcagcaccatcctggttggagatgatggcggaagaacgcacaatgtcctcgaacacggtggtccaccatgccagctgcacttcgccacgcacctgctccacgcccacccggcgagcgttgagatcggcgaccagttcgttaagtccggcagaggcgaattcctgctccagcaggcaacgctccggcaaggtgtccagtgccttgcgatcatccagcagtgctttcaggcgtgcttccaccttctcgaaatcggcggtttccagattgccaccagcgggtgtggtggaaagcacggtatccagcgcggtcatattgctgaccagcgcctcttgggtggagatgatctcgtcgagcttgctgggcagcaccggccaaccgccgtgaggcacgaactgatgccactgctccccttgcttggcgactaccttcaacgcttcgtgcaagtcctcgacctgcgcgccgacgcgcagcagatccttggcttccttgacgtggcggcggcgctcccagaatcccatcgacgtgccctcggccttgcgctggctcttcggcttggtggcctcgatcatggagctgatgtctcgctcgaaaatctctggctggaacacgtcaagcactcgtcgcagattcttcaaaaccgtaacctgacgctcccactcgcgagtggtgggaggaaccgggaatccgcaggtctgcacggtgcgtgccacctgctcacgggtggcgggcaggaagcgacgcagcaaatcgtccacgcgctggtaagcggttaccgcttgttcttcagtggtgatggacgccttgtaccatgcggtgtcttccgggccgatggtgtattcgccgagctcgccggcacgttccatcttgctgatccatgtgtcaatatcgttggcgatgctcagggcacttgactcgtcaagtcgaacgtgggtggcggggtgtgtcgggagcacggagatacgggccaggttctgaatggtctcgtatgcggacacattccacttatcgttgctcccgtgcaggtcgcccagatagcgggtcaagcgcgagcgcacgcccacgagttcgtcggccagctggtcgaatcgctgggtggcgactccgggctggaatccgactgcggcaatcagctgcttatcaagcgcggcgttggcgtgttcatcggatacatccagtacctgcgccttcatctcattggcggaggccgtctggatgaacagacgcttctgctcggccacgccgggcacgtacagcacggaacgaccattcatcaggcagcgcgatgcgatggccacagcctgctccgcggtgcccttcgggaaggtgccgtcgaccacgatgctatggccattggcagcaagtgacgcggcatatcgcaccgtattgtccacatcgccgacttcgtactcagcatgcgggtctacgtcgaaaggactgtattgcggaatattggcatctttgagcgcggtgcgggcggatttgtcgccggcaagcgcgtccaacagcacattgccggtggggccattctccagctggtcgatgaactgtcggctttcgctgatcatctgcgacgaggggtccatgaagcatccgagcacaatctggcgctcgatggcgaagccggagatacgctccgatgcttcggacgaaatacgggcgaacatcgcggaagtttcgggagtgccactgtcatagctggcaccgtcaaacagggaatcctcatccaagaacaccccctgctcacgcaatgcattgacgaacgcggcgttcagggtcacgcgaccggtgaatcgaatggtggtcgacaagccatcatcctcgatcgtgacgctcaccgggtacaacagcaccggcagcgcgttgcccctccacgtggccacaccgaccacgagcgacaactccgccacgccggaaatcctgcgcttggcggcctggtcatccagtacgcgcccgatatggcgttcggcggccttaagcacacccgtgtcacggaacaacgaatccaaccgaacatggccggaagcgaacagctgggcgatgccggagggatgggcatgggtcatctccagcttcgcggccagttgattcacatcctcgagcggcgatggcggctgcatgctgcggtattggtcacgccagcgacggatgcgattcagaccttccgtgagattctggttctgagtctggctctgggtcatctctcgactcactttccaaccgcttcgcggtattcctgatagcccttgttgtgagacagggcttcgtcaatatcggcctcgccacgggcggcgagccaagaatacatgtcgtcgtacaggtacggattcatggcgaggaacgccagtaattcgggatgacgggcgacttcgaactgaacgttgaaatcttgcgtggtttttgcctcgtcagaggtcaggccatcgacttcgactgccggctcctgtgctttcagctcgcccttggccacacgctcgaacaccgagccgggctcgaagaccggagtgtgtacgcccgtggagtagatatcagacgcttcatacgcttcggagaccgactgctgggcggtttcggtttcggtcgccagctgctgatcctcgggtgcgtcggttgccggttgagcggtttcaggctgggtggttgtcggctgggcggtctcagactgagtgttttcagactgggcggcttcggactgagtgccttcagaatgctgtgcaacagcgtccaccggctgagaatcgtcggtattcggagcggactgaacgttttcggctgacttgcttgcgccagccaccacatcggattcaacaaccgccgccgacgccactgccggctcgcttgtgctgggagcgtgcttaacaacggcatgggcgatggcatctaccgggacaataccggagatcctgctgtgcttggatgcgggcgttacagtcgtcgactcaggttcggtctgctgcttcggcagtaccacggagtccatggcctgctggtttttgcgttcggtctcctgctcggcatgctgggccaacgcatccgcgaacaggtcacggggtatggccggctcatcgtttttcgtcactggctgcgtgatattcagcgagccaagttcaagctcgtcgaccttgcgtcgaacattatccgcgctgaagatggcggtcggctcgccggcccgcaaatcaagaatatcgtcgacagacatatccgccgcatccggctcctgcggtgcttcgtgaaccgcatagccaaacaaatcaggcaccttaaggtcgagtggctttgccactggatcgtcgatacgaatgaagtccgcaggcacatcaccgaactgcatgcgcatgggagacgtcggcaacaggaactcgacattggccggcaagcgcaacaaatcaccattttcccgcaccacatacgatccattggtcgatccaagatcgcggaccgaagccgtaccattgctttttaccgtgaacatggcgtgccgtttggacatcgatttggtctgatcggcgacgtcaaggcgggtgttgtcatcatcggcaagggggcgtaacggcttacggccgatttccacgcattcccccggcttgacgctgatccggtcgacaccgttgatcttcaccgtccactcgctcaccgtgaccgccttcctggacacactatttgaccacactacgtgccattgtgtcatcttttaccggcttttggcggattactgggcacagaattgacaactttcgctcattgccagctttgtgattccacgccggatcgcgttctccgcctcgccctcgtcaactagtctactcagtatgcggaaaccccgcagcctgaaacacaggtgcggggttcctcgaaaagctgtgattgcggcttatgccgcacaaatcacttgagctcgacggaggcaccagcctcttccagctgagccttggccttctcggcatcttccttcttggccttctcgaggacggccttcggagcgccgtcgacgagagccttggcctcggccaggccgagggaggtgatggcgcggacagccttgatgacctggatcttcttgtcgccgacggcggagaggatgacgtcgaactcatccttctcttcctcagccggagcagcagcgccagcaacagcggcaacagcggcaaccggagcggcagcctcgacgtcgaacttctcctcgaaggccttcacgaactcggagagctcgaccagggtcatctcgccgaaggcttccagcagctcatcgttggtgtacttagccattatggcttcctttcaatcttggc

SEQ ID NO: 2175 - DNA, 9441 bp, Unknown
  R51_24m  MAG No. k141_15715
ggaagccaaatttcctggggtacttaaggctcgccacgaggagtacagttgtctgtaacgcacaatgtggcgcgtaagacgaggggcgtatctcgcaagtggggtgcgatgcagttgaaggagtgcatgtcatgactgatccgaatgccaatccgaacggccaggtgccggggcagcaagctgacgccaatccgactgagccgttaaatgcgatgacgggggaagcaggaaccgccgccaacaatgctccaacccaagcactcgcagcgggcgaacagcccactcaggcgttcactcctgttgagcagcctacgcaggcgtttacacctgccgagcagtccacccagcctcttgcgccggtcaatcagccggtaccgcctacgcaggctttgccaccagtgactcctgccgctgcgcccgcgcctgcgcccgcaccgacagcgcccgcgcctgcgcccgcaccagcagcgcccaattcgccctatccggggacggctccggcagcgtcagtgctccggtatccgggcggcggggccgtgcctccgcaaacgccctataacccgtatatgcaaggcggccaaccgaacggccagccgggatggtctggttcttacggcagtgtgccgcctgaagcgaaccagaagtacaacggcctggctattgccggttttatctgctcgttccttgtctcactccccggtctgatcctgagcatcgtgggcctcaaccagattaagaaacagggcggcaagggcaagggcttggccatcgccggcatcatcatcagtgcggcgggcatggtgatacaggtaatactggtcatcgcgctgatcgtcggcggtgtctcgtacgccagcaaggctatagatgaggcgaaaaccgattccttctatagtcagtcctcttcgggcaacggtgatagcagcgataagagcaaagctcaagataatcttgacgatgcgctggacgacacgttgggcgaaacccatgacgatctaaccgacggcgattatgggctgtacgattcgattcaggatttcgtcgactcttcggaattcaaggactccattgaatccgaagcggatacgtttgcagataccggcatcaccttcaactaccgtgtcgacggtgacaccttggtgtacgagtacgtgctcgacgacagctacgcctcgctaggcgataccgtcgcttcctcactggatgctatggacagcacctatcaatccaccgcgaatctgctgggctcgatgtgcaagacctccagcggcaaggcatcattgcgcgtcatcatgcacacgcaaagcggccagtcgctgtacgacaaaacctggaccgaaaagtagcaatcccagcgaacgtgcgttttggtcgattgaaggccggtctgcttgctccttggacggatgcttctgcggaaggaaccgccaaggagtaggcttacaggcatgagactcgcacgtttttctttgaatgattcgccgcgctacgccttcgtacaaaaggacgaaacggacggcaaggactacctcatcgaacttgacggtcatccgctggccggcgaccaggtcaagcccaccggcaaccggtacccggtcgacggcgacggcatccgcctgctctccccggtcatcccctccaaggtttacggtctggccaagaactacgaggcccacgcccagttcatgcacgaggccggccactccgaaatcgcccacgcgccggaagacatggtgatcttcaccaagccgtccacctcggtgattggccccgacgatccgatcgtgtacccggcctgctccaaggacatgaacttcgagccggaagtggccgtggtgatgggccgtatcgccaagaacgtgtccgttgaaaacgcgatggattacgtgctcggcttcacctgcgtgaacgacgtgacgttgcgcgacctgcagggcatcgaccccacgtggacgcgcgccaagggcttcgatacttcctgcccgcttggcccgtggattgtgatgcgtgacgacctcgactggaaggacgccaagatttccttcacgctgaacggcgaggatgtgccgatggcgtctggcaccaccgcgaacctgattcacggcatccccgagcagattgccgcgatttcgtcgttctccacgctgctgcctggtgacgtcatcatgaccggcaccccgaacgcctccggccacctcgacccaggcgacgagaccatcgtgcacgtcgagggcatcggcgatctgcgcaacgtaatcgttcgggcgtgactcgactgacgaacgcatggcccggtcattttcctatttgggggatgtccgggccttcgtgctttgtttcatatatttcatctatatatgcatctgtctaatgtacagatgattttttcgcgaaatctaagtgttgcaccaagctatatgttacacttatttcagttatgaaatgaggtatgtgcattatgactgcagtaatagaacgtgaacagcttacagaacgcgatttggatcaggcgaaggcgtgccgagagctggtgcaaaaaggctctgtactcgctgcaattttggatggcattattgacgataatgtactggtggttcgcaaggacgaagaattatcccctgctcaagctgctgagattcttggcgtgagtcggccctatgtgactcgtttgctgaagtcaggactgctcgaatctcatatggtgggcagtcatcatcggattacggtacttgctttgcggacgtacatggctaatcgtgatgcgggacgtaaggaatacgcccacgcaatcaattctcgggcaaaggatattgccgatgcggttgacgaagtcgctccggtgtctgagacaagtcgaaatcgtatgcgtgatttagttgcagagcatcgccgtgaagcgatcaaagcgagtagtgccgcagtttctcccgcagagtgaggattgtctcaggcgaatcgtagtgaatctattgtctgtgcgatttacccggtatgcgtcaagtcatgactattgctcaggcgtgtaattacgtctcagatactccttgacttccagtatgtcttggcaatcggggcatgcaggaagtcctgagtattcatctctggttggcacgaaccatttcccgcacagagaacggatgagggtgccttcaacatatgcgtcggtcagagtctctttgggtacgcgatgtagcatagattctggctcggtgtcgcctatcgtcttgtataacgattcggaatcatcgaggaagttcgggcttgtgatgcgcttgatgtcgtctggttccagcagcacgaatgctgacatagttgcgcgtctttgctgaccgtcgctgtatgtcttcaacgacgtttctgctggctgattggggtctttgggctggcagatggcgttaaagcatctcaagaggatgcggtgaagtcgggcgtatggagaactgttgtcctgttcctcgaccggaaaatcaagggtcaattcaacgaattgattgacagttgctgagtcgtcatcgtcatcttgctgaatctgaatactggcctttacgggggctcctgaaatctgataggggatatccagcgctgagagggcttcggactgggaagttgtttggcccgcataaattcctgcacgaattttgttaagcatctcctgaacgactcgtcgctcaaaatccagaaaatgctgacgttcttcttctcgtttccgaaccagataatcttcttcgctgggcatatagttgctggcgttggaagccttaatgattgatttgcaattgcctgaatggaaatccccatgcgatccgcaatagaccatccacgggtcgccatattggtcaagaatgacgatgcctcgccagccggtttgcttgttccttatttcatagactgggcgctttgccacagcgctaaattccgaatgcttggtggcagcgattttgtcaccagcgaaagcctgacgagccatattgagtagtgtgacgtcgaatgcggtgaaatcaagaccttcgaacggtgttactgcttccgtccgcatgttctgttcaatgagttgttgagggttctctgagttgaagagattattgtcaatcatgctcaacagaacttgaattgtagggcgaactggtctcatgatgattaaccatagtcggtgatgcagcttagtcagtgattgatatcacatagaagaaatattgctctttttggctcccctcgtgtctgggcccgtaattcccccttacgctcccggcaataccgcgtgcagggcggtcatcaccaccaagctgatgatggccgtcactgtcagcgagaagccggcgagcttggcgttgccggttagcgaatcggtgaacttggttgagaagatcgtgataggggcgaacgagcccaacacgatgatctcgcgaatcctcatgtcgaatggcagtaggaaccaggcggccacggcgataatcgcgccgaataccatgcgccagacaatcaccttgcccaactccaccttgtccttgcgattgttcggaatctccatcatcagtccgatcatggccatcgcgcagaaggcgttcgcattggcgaacggggtgatgagcgtaacgatgggctgtgggatcgtgatgtgcaggaacatgaacaccagcatcagcatgtagatgtcgaaggaaatcgagcttaggaagtccctggcaatattgcgcagacgcaggatgagcggtagcgacttgaaattgtcatccatatgcagcagcgtgcgtgtgatggtcagtgacccggccgtggccacggtggcgttgccgatatcgagcatgatgatcggcagaccggcggacgggcccatgaacgtctgaaccacaggcaagcagaacgcgcccaggttcaggcccgaggcgttgagcatctggaaggcgcggtagttcttctcgtcgccgcgagaaccgaaatacacgatgaacagcggaatcgcgcaggcgaagaagccgaacaacacgatccacagcatgcgcatgtcgtgcttgttcgtggcgaacgacaggataatcgcacaaggaagcgtcagattgaataccagaccctgcacgattttgtaatcacgctcgccgaaaatgtggacatgtttgagtatgtagacaccgatgataacgagcagcagcgaaccggcctgaaaaatcatgttcttctcttatcccacaagcacccgccgcagcaccggcggcggtcaggcgcataacaaaccagccgtgagtataggagcgttcgcgcggcgctggcgcggggcggtgcatattgtggacagtcccgtaacgttgatatgccatgctggcgagatgaatatatccaataccaagtggagctcagcacgatagagaggtaggaaaacatggcagagcagacggtcaccgtaggcgttggggcattgagcatcgaggacgttatcgccgtagcgcgcggcggtgccaaagtggcgatttcggacgaatcgaagcatgagatggcgctaagtcgcgcggttatcgatcatttggccgacgacaccgtgccgcattacggtatctccaccggattcggcgcgctcgcctccacttccatccccaaggaacagcgcgcgcagctgcagaaaagtctgatccgctcgcatgccgccggtgccggaccggaagtggagcgtgaggtggtgcgcggcctgctggtgctgcgcctgagcaccctgtgcaccggacgcaccggtgtgcgcccggaaaccgcgcaggtctacgccgatatgctgaacgccggcatcaccccggtggtctacgaatacggttcgctcggatgctccggtgatttggcgccgctcgccgcctgcgctttggtggcgatgggcgaaggcgaggcccgcaacgctgacggccgcaagatcggcggcggcgaagcgctgcgtgcggccggcatcacgcccgtcgatttgaaagagaaggaaggcttggcgctggtcaacggcaccgacggcatgctcggcatgttgtgtatggccatcaccgatctgcgcctgctactcaagacggcggacatcgccgccgcgatgagcgtggaaggcatgctcggcaacgaccgcgtgttcgccgccgacttgcaggcgctgcgtccgcatcgcggccaaggcgattccgccgcgaacatcgtccgcatgctcaagggctccggtctgatcgaggccggccgcccgggctccaccgtgcgtgtgcaggacgcctactcgctacgctgcaccccgcaggtgcacggcgccgcccgcgacaccgtggaatacgcggcctccgtggcgggcgtggaactcgcctccgccatcgacaacccgtgcgtcacgctggacggccgtgtggagtccaacggcaacttccatggcgcgccgctggcctatgtgctcgatttcctggcgattccgactgccgacgtagcctctatctccgagcgtcgtaccgaccgcttccttgacgtggcgcgcaaccgcggcctgccggcgttcctggctggtgacccgggcgtggactccggtttcatgatcgcccagtacaccgccgccggcatcgtctccgaaatgaagcgcaacgccgtgcccgcctcggtcgattcgattccgagctccgccatgcaggaagatcacgtgtcgatgggctgggccgccgcccgcaagctgcgccggtcgattccggcctttgcgcgcgtgctggccgtggaactgctgtgctcctgccgctccttcgacttccgcaagccgtaccgtccgggtgcggcgggcgccgccgtataccgcgtggtgcgccagtacgccaacgaaatcggccccgacgtacgcgatacctggaccaccccgcaaatcgaaggcgtagccaacgccatcctctccggcgaaatcctatccgccgccgaagctgccgtcggcctcctgaaatagatgtgagctccctcatcagagggggctactgttcaccctccccaccaaaatccaaaacttgagtcacctgcactcaagttttgggaatagaatgggttctaggtcggttgaccatatcagataacgacaagttgtggtctgcggtggcgcttgcggggctttcgaagcccgcgagccgctccgcgcgggccgcatgatatggaggaatacgatatggaacagaagttcaccactatggcccaggaggccgtcggcgacgcgattcagagtgcgtccgccgcaggaaacgcgcaggttgagaccctgcacgtcatggatgcgttgctgcgtcaggaaaacggcgtggtgcgctccctcatcgaggccgcgggcggagacccacaggccatcggcgccgccgtgcgtaacgctttggtcgcactgccgagcgcatccggctccagcacttcgcagccgcaagccagccgccagctgaccgccgccatcgcccaggctgagaaggaaatgcagcagatgggcgacgaatacgtctccaccgagcacctgcttatcggcatcgcggccagcaagccgaaccagtcggccgaaatcctggagaagaacggcgtcaccgcagcctccctgcgcaaggccgtacccggcgtgcgtggcggcgcgaaggtcaccagcccggacgcggaaggctcgtacaaggccctggagaagtactccaccgacctgacggccgccgccaaggaaggcaagctcgatccggtgatcggccgtgatcaggaaatccgccgcgtgattcagatcctctcccgtcgtaccaagaacaacccggtgctgatcggcgagcccggcgtcggcaagaccgccgtcgtggaaggcctggcccagcgtatcgtggcgggcgacgtgcccaccaccctgcaaggcaagaagctcatctcccttgacctaggctccatggtggccggctcgaagtaccgtggcgagttcgaggagcgcctgaagagcgtcctcaacgaaatcaagaacgcggacggccagatcatcaccttcatcgacgagattcacaccatcgtcggcgcgggtgcggccgaaggctcgatggacgccggcaatatgctgaagcctatgctggcccgtggcgagctgcgcctgatcggcgcgaccacgctggacgagtaccgcgagaacatcgaaaaggatccggcattggaacgccgtttccaacaggtgttcgtgggcgagccgagcgtggaagacaccatcgccatcctgcgtggcctgaagcagcgttacgaggcgcaccacaaggtgacaatcggcgatgacgcgctggttgccgccgcgaccctctcgaaccgttatattccgggccgtcagctgccggacaaggccatcgacctggtcgatgaggcggctgcccacctgcgtatggagctcgactcctcgcctgaggagatcgatgaactgcagcgtaaggtgacccgtcttgaaatggaggaaatgcagctcaagaaggctgaggatcctgcatccaaggagcgtctgggcaagctgcaagccgaactcgcggacacccgtgagaagctcagcggcctcaaggcgcgttgggatgcggagcaggccggccacaacaaggtcggtgacctgcgtgccaagctcgatgacctgcgtgtgcaggcggacaagttcacccgtgagggaaatctggctgaggcctcgaagattctgtacggagagattccggctattcagaaggaactcgccgccgcggaaagcgcggatgccgaatctgccgatgccggcgcggccaacccggccgatgagccgatggtcccggaccgtgtggacgccgactcggtggccgagatcgtctccgactggaccggcattcccgttggccgcctgatgcagggcgagaacgagaagctgctgcatatggaggactacctgggcaagcgtgtgatcggccagaaggaagccatcgccgccgtgtccgacgcggtgcgccgttcgcgtgccggcatctccgacccgaaccgtccgaccggatcgttcctgttcctcggtcccaccggtgtgggcaagaccgaactggccaaggcgctcgccgacttcctgttcgacgacgagaaggccatggtccgcatcgacatgtccgaatacatggagaaggcttcagtctcgcgcctgatcggtgcggctccgggctacgtgggctacgagcagggcggccagctgaccgaggccgtgcgccgccgcccgtattccgtggtgctgttcgacgaggtcgagaaggccaatccggagatcttcgacgtgctgctgcaggtgctcgacgatggccgcctgaccgatggccagggcaggaccgtggacttcaagaacacgatcctgatcatgacctccaacctcggctcgcagttcctcgtgaacgaggacatggacgccgacgccaagaagaaggccgtgatggacgccgtccacatgaacttcaagccggagttcctgaaccgtctgga

SEQ ID NO: 2176 - DNA, 5435 bp, Unknown
  R51_24m  MAG No. k141_15890
atctgcatggtccgcgtccggggcgtcgtgcgttcggaatgcgtggcgtggtgttgaagtctttgtggttcctgtctgtttttgtggtgtccgtggtggtgcaggtagtgttcatggatgcggcgaaggcgaatgggtcgggtgattggtggccggtggcggccgtccccaatgttggggtgttcgtcattgtgtttgcgtcgatagcgttgtctccgttcatcgtttacgcgattggcagtttgtggcctcgtctgaccgtgcctttcgtgatgttcgcctccttggcgatgcttgcggctggttcgtttgtgggccaggaggttggtcgtaggtggttgtgggaccggtatgtggcgactggcttgttgaagccgggggatttcgtggactggtcgtctgatcgtctgcctgcgcctttggcacaacccgcgtcgggtggttggtgggtgaccggcttggtggccggtgtactgctggtgtcgggttccctgttcctgtaccgggaggatcggcatcgtgggtcgaacattcttcctcgctacatatcgtatggtggcggcgtggttggtctggtcgcggccatcggcatcgcgttgacccgtcatgtgagcggtttcgcgttggtggcggccccgctggttgcgttgttcgttgggttcctgtggttcccgttggatttggcggctgcctgtttttgtgtggataatcgtcgtgagtcgtgtggcgagtggccggccgcgttctggctcaccgccgaggcgttgttcgtcattggcgtgtgtacggcgctgcccatgacgtgacgtctggttgtgtgctgggatggtagtgcaaaggagggtgagtggggatgtccattcggttggatgagcgacggtatgtcgaggagttgaagcggctggttgcggatttccggatgtggaagaatccgctggttccgttgccggatggcttcgaggacgatctggcgtggagcaatgttgccttccttatactcttcaaaaccaaaatcggtttccttggccgtagtaagatcctgaatcttttccaactgcctggccacaaccgaattggtcagagtcgcctgaggatgcagcatattgtcaactgacctatatccaaataccgcagcaattgcgcaaacgacgactaaaacaccaataagaatggcttgtgccttcactggcaatttcttccaccttttttcattgtaaatccttcttctctttgagggaatatgacattaactgtccgcccccgaactattttcaagaccaaacggcataatatggggcttatgagcgaacatgtggagcatgggtttgggccggtgtgggatggtgagtcccgggctttgattttgggatcgatgccgagtccgaaatcccgagcggcggcgttttactatatgcatccacagaaccggttttggccggtgatgcaggcgctgtttgccaactccgctgatcctactgacgctgtcggcgatttacctgagtcccgtcgtgcgtttgctctgcgccaccacattgcgttatgggatgtcattgcttcttgcgatatcaccggagccagcgatgccagcatccgcaatgccgtgcccaacgacttgacaccaatcttgcgcggcgctccaatcgcccacatcttcgcaaccggcgcgaaatcagcgcaactttaccgcaaacttatcgagccgcgcctgaccgaagccggcatcgccatcggtatgacccaactgccctccaccagcccggccaacgcctcaatgcgtttgccggaccttatcaccgcctatcgcgaagcttttcgagaatacaatatagttgttcgccaaactactaatatatgagtaatttcgcctgtatacgcccaaaatcactcatatattagtagttattgcacggcggtgacgcacagctgaaaccgccattcggcacagcggcagcaggtagaggaaggttgcggcggccaagctcaacgtgggggcgttgatggtggcgagcggcactgcaccggcgatcgaccaaggaatcaacggagcgatcaccacggcactgtcttccaaatcgatagcttgcgcggcgcgttcggattcgtcgtcgccgtatagcccgccgcacaactggtgagtgagcatgatggtgagggtttggttgcaggcgagcgccgccgcgcaagtcgcggtaatcatggtggcgccacatgcgccgatgcgatgaccgagcatctcgatgacctgctgcagccgagcaagcatccgcgtctcggcaaaaatgccagcgtaggcggaggagatgcagacagtggccatcacagtgagcatggagaggatgccgccgccgtccaggagtgcggccacctgcggattttgcgcatggtaaccgaaaataagcagccgcaacagttccgcccattccatgtgctgcacgcccacgcatatcgcgaccgaggcggcaatgctggcgagcataagcaggcgaacgtccacacgcagcaacgccaacacgatgaccagtaatgctggaactagggtaagccaatgcaaatcaaaggccgatgagaacaatccgccgatatcggttatgctgcttgtgttggttgaaacagccgctctagccgcaccgaatccggaaccaccgcttgcacacagccactccgccaccgcagccgcaacgtataccacacaactcagcacaaacggcaccgcaccagtgcgcagcatgcaggcaatagtactgaacaggttcgtatgcgtaagctgtttgaccagcaaggcactggtggaaaccggcgaacaacgatcgcccacatagacgcccgcaagaatcgcgccaccgagcatcaccgggttcgcctgcatcgacaatcccagcgacatgcagatggtacccatagtcgccgcactggcgaacgacgacccgaccagcaccgacatcgccgagcacagtagaaacgacagcggaatcaccgtggcggcgtgaattaccgcagtcgaatgggccacgatgaaggcgatggtcccgctggcccgccacagcgaggtcagtacgccgatgagcacgaaggtcaccaccacggtccccgcggaccgtacgctgccggccgcacggctcgccatcgcgcgcagcgagcaccggcgaaccagcccataccccatgaacagcagcacaccaacgaacagcgcgggaataatcgaccagccgagggcgacgctggcaaacagcaccgcacagaacagcaacatcgcgcccgcttccagcatgtgatcctctcctcttccggctacgacctcatctcagatttcatctcatgacccgcagttgcaaacatcaatgctattcgcacgagccatgactcaagataaccccagattctacgacgaacgtatggtactggttattgcgcaatcattatgactggatttagtcaccaccggaaccgcgaacagccaaactaatattgccaacgattccaccatccccaacacgattccagatgaacgcgccattgctccaggcgatctatcttcgttggcgcactgcccgtttttgctgggcaatccgcaggacatcgatggccgcatcggcgagattctgttccgtcgtgccggattcgagccgaaagtcgccgcccgttcggacaacatattgacgctgctggaactatgccattacggcatgggtgcctgcttatgcccggagcggttcctgccagcgctgcttgacggcgaacggctgcgcaccttgcatgtgctggattgcgggccggagaccgaatacgccatccgattcgacgtttcggccacaccataccgctggagcgtcattgatgatttcattcgttgcgcccgcgaagtcaccaccggcgaaggcgtgaacgaccgcggcctgtcccgcaagcatatcttcgagagcattgatcagacactgaagaacatgcagaccgactatctggacatgtacttctgccaccgattcgacgagaccaccgatctgaccgagacgctgcgcgttgtggccaacgagctcggcacgaacctgccggtgctttccatggcgtggatcctgcagcacccggagatcagctgtgtgatcgccggcgcctccaagcccagccagctggagaacaacatgaaggccgcgggctttgtgattccggctgacgcgatggccgaaatcgacaagatcactggcttccaccactttgagcgtcacgtgggctgacggatctgcggcttcctccaacgggagcgattgttaagcgccgaaatcggtatcgccttgggcctcggcctgggcgatggcggtttcggcgttttttgctgtttgctcaatgacctggttgtatccggtcaaggccgcgaacggcatgaactgggcggcccgctggcgacgagacatatgcggatgcttgcgtgattggtggtgtggcaggttgatgatgtcgtcgtatgcatgggtttcttgcagggtcatgcgcgatggcctccgatctgacggttgcgagcctgaccggtggcaccgtcttccatatccatggctttgacgacggcgttgcggccgaatttacgtttcacatccagcaacgcacgctggatatcatgctctcgacccaacgtctgtgcggcggcatcgtccccacaagccggcatacgcccgcttccgtcgccaccggattccgtgctatcacagtcatatcgcatatcgccatcatcaccgaacaaatcaagctgctcatagcgtttgcccgccgccagttctttgggcgtggccacatcatcggcaacaactgtgagtcgacgcaccagcaaccgcgcatccacaatacgctcgtacagcatggtcatcgcctcgcgaatacgtgcggcagacgacgtaaaatcgcccaatccaatcgaccccacggccgacttaggcacccgacgaccgaaacggtcaacggtcaccggcccttgataggtctttgccgcgcgttcggcggcacgcctcatcgcccggtctgcgcatgaatcaagcttcgaagcatcgagactgccaatgtcatagccgaccgccagtgtcagccgattcgtcatcacccccttatcgaccagatcgagggcgagcgcatcggccatctccttggcgatcagccgggccgtggcatagtcggcgggaccggtgagcacctgaccgctgctgatgctgtgcgcatccggctcataggattggatgtccgcgatttcgcacggctcccagccccacgcatggtcgatgagcagttcggcattgacaccgaacatgcgatatagcaggtcttcgttgtagtaatccgaagcacgacccaccgagcatcgggcgatatcgcccatggtcatcagaccggcgtgctcaagtttcctggcatagccgcgcccaacccgccaaaaatcggtgagcggacgatggctc

SEQ ID NO: 2177 - DNA, 13746 bp, Unknown
  R51_24m  MAG No. k141_15966
cggttggcgagaagcgttggaacaaatgggagcacgcgtaccgagcatgtacatcggcgattggtgcgcggattcaggctaccaggccggcgtggcgttggcccacgaccccgactgcacggccatctacgccgccaacgaccaaatggcatacggcgcaatgctcgggttgcagtcagcgggcaagcgcgtgcccgaggatgtcagcatcgtgggcgtcgatgattcgctggtagatatggttccgcgcttgaacctgacgaccatgaagctgcgctttgacgacattggcgccaccgccttctccatggtccgccgtcaatgcgaaggcgagaagataccggtcggcgtcaaaaccgtaatcccgccggaactgatcgaacgcggttccgtgcgcgacatcagctgacgagcggcatgtgctggcatccactggtacctgtcagtgattcacctgccagtgatccacctgccagtgatccataggcaattccgcaccgaccaatcgactcggttgtgcaatattctgcacatttccaactatgtgcagaatattgcacactttactatactgtgatatattttgcacatgattgtcatggatatcgccgaatacgcgcggcttatcaaggatgaaaggcaacgccagggcatcagtcagaccgacatggcccaacggctgggcgtgtcacgtcgctggctgatcgaatttgaacacgcccgagtccccaatcccggattctccaccattctcagcgctctgactgagcttggcttgtcgctggatgtccgcaaaaccccgcagcccgccgaactctatgaatggtgacaccatgagcgaaaacactctcaatgcatttctcggcgaaacacccatcggccagtttcgaagaacaaacgatggcagcattattttccaatatcacgattcctatcgttggtcgcaatcacccacaccaatatcgctttccatgcccattaccgcagccgaatattcaggcgacatcccgcgtaatttccttgaggccctggtcccggaatcccctcaggcccgagatgaagccatgcgattgcatcatgcccgatcgacaagcgcatttgatctgttgcaagccatcggattcgatgccaccggcgcattacggctgtccgccgacccgcacttgcccatagatgacgattcgcttattccaatcagcgattcgcagatcgcgaatcgactacgcgcagccgcccccacaggcatccagtccgcaagcgtagacgagcattggtcggtcgcgggacagcagggcaagatcgcactgaggaaccgcaatggatcatggttctccaccactggaatcgcgcggacgactcatatcatcaagcccggcataccgacccttccacaccaagcattcaacgaacacatcaccatgcgcattgtggaggcgatgggaatacccgtggcccacacctcttttcacatctttgatggggtcccagccatcatcagcgagcggtatgaccgtatagtgtccgccaatggtacggtgacggccctgcaccaagaagactttacccaagcgctgggcattccctcatcgctgaaatacgaggaacacaacggcccaacgtccaatgcatatgcggaaatgttgcgcaagcacggtctgcccggtcaggccgaaagcaatatccgagccttcaccgacggcatcctcgccagttatctcgtcggggcaacagacagccacgccaagaactactcgctattgctcgatggcgcgtccgtgcggcttgccccgctctatgaccttgcttcggtgttcccttatttggggcatggcaagcagatcataaatgccactttggcgatgaacatcggcggacgccgagatcttcttcaattacgccgcaaacatctggaacgattcgcacagcggatgggattagatgaggaatccgtgattttacgattccacaccttggtggataggctgccggaggcattcgacagcaccgtgcaacccgctcacgacgttatcgcgagcattggtgcgcaggaattcatcgatagctatcgcaagcgcatcatgatggtgtacgacgatgcaatgagctggatggccagtcgaaagggacagtgattcggacgggtggggattggtctcgccatccccccccctaagaaatcagatcctaagcggcacacgggaaacgaattcgcgcttctcgcctgttattggatcggtgaatcgtagcacacgcgccactaattgcagcggctggctgaaatcgtcgtaggggcgtgtctggatgcgcgggtagaagtcgtcgcccacgatgggcaggccgagcgaattcatgtggacgcgcaattggtgggttttgccggtgcgcgggtggagtgtgtagcggcagatggggtgatttcccggatggggaccaccctccggcgcttcgcgccacctcccgccagcgggagggaaacagaggtcgccgcgctcgatgagggtttcggcgttggccaaacccggttcctcgaatgcggccatcgtgccgtgttccttggtgatgtgcgatcggcgcagcaatgggaacgggcgtggcggttcgacctgcatgatcgtgccgaatcgcgggccgctgatcggccggcagggtgccaggcattcatagatcttgacggcctgccggttctggaacagcatctgatacgcgccgcggcaggccgaatcccgcacgaacaccaatacgccggcggtcatgcggtccaatcggtgcgctggcgtgatgtccggctcccccagccgctcacgcaaccggatcagcgcggtctgccgataccacatgccgcgtggcatggtggccagaaaatgcggcttgtccaccacgatgatccgctcgtcctcatacagcacgtccatctcaaacggaatatgaggctcgtcaatcacataccgatgtggcttactcaacggtcacggacttggcgaggttgcggggcttgtccacgtcgtagcccttgagctttgccatgtccatggcgaacagctgcagcggtaccacgtcaaccagcgggctcatcagcgttgggcaggcggggcgccagaacaccacgtcagcgtaccgttccacatccgggtcgccctgctcggccacggcgatgatgtacgcgccacgagccttgacctcctcgataccagagatcaccttggcgtgcaacacattgcggccgcgctgcggcggcacgatgaacaccacgggctcaccctcgtccaccagcgcgatcggtccatgcttgagctcgccggccgcgaagccctcggtgaacgtgtaggcgatttccttgagcttcaacgcgccctcaagcgccacagggtagcccacgtggcggccgaggaacaagaaggagttggcgttcaccatgcgctcggcggccgcctggatggtcttgggctgggtgtcgagcacccactgaatcttgcgcggcatgtctttcagggagtcgagcatctgatgaatctcatcgcggaacatcgcgcccttgacctgcgccagatacaggcccagcaggtaggcggcggtaatctgcgccacgaacgccttggtggatgccacggcaacttccgggccggcgtgtgtgtagagcacggcgtcggattcgcgcggaatggaggcaccctgcgtgttgcagatggccagcaccttggacccctgttcgcgcgcgtggcgcagggccatcagcgtatccatggtttcgccggactgagaaatggccaccacgagcgtacgcggggtcagaatcgggtcacggtaacggaattcgtgcgcgagttcgatttccacggggatacgcacccagtgttcgatggcgtatttggctacctggccggcgtagctggcggtgccacaggccacgacgatgattttgtcgatggccttgaagtcgtgttcgtcgatacgcacttcatcaagggtgatgtcgccattcgtgtcgaagcggccaagcagggtgcgctgcactgcggcagggtcttcgtgaatctccttgtccataaaggaatcccagccgcccttttcggcggccgaagcatcccaatccacggtgtaggtcttcgggttttcgaccacgttgccgttgaaatcggcgacgatgaccttgtcggcggacacgcatacggcctgatcctggtcgacttccatggcgcgcttggtgtaggccacgaatgcggcgacgtcggaaccgaggaagttctccccctcgccaaggcccacgaccagtggcgaatcatggcgggctccgaccacgatgtccggctggcggcagtcggtggccagaatggtgaacgcgccttcaagcatgcgggccatacggcgcacagccttgaacaagtctggcttgccttcgtccgcgataatcttgtccacgatcttgccgagcagcttagcggccacctcagtgtcggtggcggaggcgaatcggtagccttcggcttgcaggtcgaaacgcagctgagaggcgttttcgatgatgccgttatggatgatggccaccttgccgtccatgctggtgtgcgggtgggcattcacgtcgctcggctcgccattggtggcccagcgcgtgtggccgatgcccaccgtggcgagcggcatcggcttgcgctcgatgtcttcgaccaggttcttcaaacggccggccttcttgcgcacgaccaccttatccatgccgggcgcggtcagcgccacaccggccgagtcatagcctcggtattccagacgttccaggccttgcaggcagacctccaaaggcttgccgcatgccgtttcaatatttcccgcgtatccaacgattccacacatggctcaccagcctagcggacgattattgcgcaaagcgaatccaacccgccgcctttgcaggattggaacatgccccttcgtgaaaagcgtacgctgagttcatcagcgtacgcttttggagctgcaacaacgagccttcctacagcacgtgctgtaggcggagccgtaaagcggggagcccagtgggctccccgtaggcgacgccgaagcacgacagtgctgaggtaatataacagccttcctacagcacatgctgtaggcggagccgtaaagcggggagcccagtgggctccccgtaggcgacgccgaagcacgacagtgctgaggtaatataacagccttcctacagcacatgctgtaggaagtccttaaacctaggctcggtggggtggtcgatgatgtcggggccgcccttttctacgactacgccgccatccatgaacacgatctggtcggcgacttcgcgggcgaagccgatttcgtgggtcacgcacaccatggtcatgccttccttggccaaggaacgcatgacgttgagcacttcgcccaccagttcggggtcaagggcggaggtcggctcatcgaagagcatgatctccggcttcatggccagagcacgggcaatggccacgcgctgctgctgaccacccgacagctgggaggggtaatagtccatgcgatcgcccagaccgacgcgctgaagctcggccacggccaggtcacaggcggctttcttggactggtgctgcacgtggatcggggcttccatcacgttctccagcgcggtcatgtgtgggaacaggttgaagcgctggaacaccatgccgaggcgagagcgctgtgcggcgatctccttatcgtccaaggtctgcagcatgtcctggccgtttttggtcacgtgcttgtagccgatgagttcgccgtacacctcgatggaaccgccggtcagggtttccagctggttgatcagacgcaggaacgtggacttgccggaaccggagggccccagaatcacggtcacagtaccgggcataacggttagatcgatgcccttgagcacatgcagcggcccaaacgccttgtgcacctgcacggcctcgacggcaggaatcacggaaccgtcagccgccttgcgcacgaccggggcaacactggtgatgtcattcgtagtcataatcgcgctcccgccttatgcattcaatccgacaaatgtggtctggttgagcttgtccacgtcatccttcggttcaccgtcggtcttacccggcaatggcgtctgcttgcccttggtgcccaccggtcgggcatcgaagcccttgccgaagtgcgcctcaaggcgggactgcacaaccatcagaatggaggtgatcagcaggtaccagaagcaggccacgagaagcagcggaatcggcttgtagatacggttggcgatggcgttggtggcaaactgcaactcgagggtgaacggcacggcggtgaccagcgaggtggtcttcagcatgccgatggtctcgttgccggtgggcgggatgatgatgcgcatggcctgcggcagcacgatgcggcgcatgatgagcgtacggttcatgcccagcgccttggccgcctcggtctggccggggtccacggcttcaaggccggcacgcacgatttcggacaggtaggcggcctcgttcagggccagaccaatccatgcggcgttgaatgcggtgaccaccacgttggagtcgatgctccagaactccaccgaggtgaacggaatgccgaggctgatcttaggaatcagcacggcgaacagaccccagaaaatgagctgcgtgtacacaggcgtgccgcggaagaaccagatgaagaaccagctgacgccgcgcagcaccggattgatggatttgcgcatgatggcaagaatcaccgacaggatgatcgccacgaccatggagatcacggtaagctccaaggtatagcgaatgccttcaagcacgttctcgttgaacaggtacttccagacggtgggccaatccagtcgcggattggtaatcaagccttgaatgagcatcgcggcgagcagtaccacgatcactgcggccacaatcgggccggggcgcttgaccggcaacgccttgatgcggttggggatgttcagcccctcaccgtcgacttctttcttcgccataatctggttccttggatgtgttaggcagcctgaactgcaagttgcaactagcgttgaaccttagtgcacgaatggggcgactgtgttacaaacagtgcgccccattcgaattttcgcgacagcttgtcgactattcgacggccgggttgatttcggccttgtccagtgcaccggattcgacgccccagtgctggagaatcttagtgtaggtgccgtcgtccatgagcttttgcatggccttctgcacggcttcggtggtctgggaatcgcccttcttaatggcgatggcgttcggcacttcatcgaagtccttgccgagctgttccagctgaccatcggtctgggcgatggcgtagccgacaaccggggaatcggcgaagaagacgtcggccttgccggtcaccacagcggtggtggcgtcggtctgctgcttggaggactggatggtgatgtctttcttgccgtccgccttgcactgcttggcggtcttgttgatggcctcttcctcgacggtgccggtctcgacggcaacgttcagaccgcacaggtcgttctcatcgacgttcttggggttgcctgtggccactgcatagcccatgcctgcggtgaagtaggagacgaagtcgacggattccatgcgctccttggtgatggtgaaggcggcgatgcccagatcgtacttggagccgatggccggaatgatcgtatcgaagttggaggagacgatttcggtctcgagaccgaagatgttgcccatggcgcgggcgagatccatgtcgtagccgatctgggtcttgccgtcggcgtcgaggaattcggccggggcgtaggaggggttggtgccgatggtgagcttgccgtccttggtcacggattcaggcagcagtgcggcgatggtgtcatccttctccacggagctgacatcgtagctggtgatggtggcggcatcggagcccttggcggaatccgtaccggcatcggccttgtcggaggtgccgcaagcggcggtggcgaacagcatggccgagctcagtgcaatggccataatggacttcagtttggtggactgcataatcgtttcttcttctctcttacgccgcttcaacggcaacgatcaacggttaagcatatttatacactacagtgcatacatatacaaaaagactcccgccgcagggcaacgggagtcttcatagtaaccgaaactactcgacggacgggttgatctcggccttgtcgacggcgccggaagagacgccccacgtgtcgaggatcttcttgtacgtgccatcatccatcagcttctggatggccttctgtacggcctcggcggtcttggaatcgcccttcttgacggccacggcctcaggggtcacaccaacgtcctcgccgagggcctcgagcgtatcaccggtctgcttgatggcgtagccggcaaccggcgtatcggcgtagaagatatcagccttaccggaagccacggcggtagtcacatcggtctgcagcttggaggactggatgtcgatggcatccttaccgtccgccttgcactgctcgttatccttgttgacttcctcttcctgggtggtaccggtctgcacagccaccttcacgccgcacaggttggaggtatcgatcttcttcgggttgcccttctgcaccacgaacgtggaaccggccttgaagtaggtcacgaagtccacagcctccatgcgttccttggtcacggtgaaggaggagatgccgatgtcgtacttggagccgacggacgggataatcgaatcgaacgtggaggagacggtgttttccttcagtccgaacactgcggccagcgccttggacaggtcgacatcaaagccgaccggggtcttgccgtcctcggccaggaactcggccggggcataggaagtatcggcgccgacggtcagcgtgccgtcgccggccacggaatcgggcagcagtgcggcaatctcgtcgtccttctggatgctgctggtgtcgaagccttgaatcgaagtgctggacgagtccttggatgaatcgccgctcttggatgcggtgtcggtgctgtcagtcgtgccacaggccgccacggcgatcagcatggccgcgctcagggcggcggccgcagcggattgtattcccttgcttagagacattggatttcctctctccggatagtcagctgggcgggtatgtttcccagatggttccagagcgtaggagtgcaatgctacggaagcgttaatcgtgggcgaaatgacccacaacgcggacatcctacccttggctcccctccggaggggagccaaggggcgggactagtggcgcatgttggcgtagcgcatggcgcgtagggcttcgcgcttgtcctgctcttcgcgcagggcctggcgcttgtcgaattccttcttgcctcgggccagcgcgatctccgccttgacgcgaccgtccttgaagtacaggctcagcggcacaatcgtgtatcccttggcttcgatgccgcgggcgagcttggtgatctgcagtcggtgcagcagcagtttgcgcttgcgcttgggcgcatggttgttccatgtgccgttcaggtattcggggatgttcgcgccctccagccacatctcgccacggcggtcgatggagatgaacgcctcggacagcgatgcgcggccttcgcgcaacgacttgacctcggtgccggtcagggccagccctgcctcgtacttgtcttcgatggcatagtcatgccgggccttcttgttctggacgatgagtttctcaccggtttccttgggcatgtctcctcctttcgtgggcaataactcgtgagtagcaactcgtgggtagcaactcgtgggtagcaacgcaacatccgacgatatcacggaccggcctcgaatacgaaaagggttcctcttcaagaggaacccttcaaccgcatatatcggccgaaccaaccggtcagtggacgaaccagtactgacccaaattggtcaaggtgcggttgtgcatgttccacggaccaccccagttcatttcggagatctggaatgtgccgtcgccatacacggcttcgactacggcaacatggccataggtaccgtcggcaccatcctgaccaggcaggaaggagagcgccgcaccgacctgagggttgtggtccacgcgcaagccgtacgagggggcgttgcgccaccagtcgccgccattgccgagataggacggcgtgccaatgcccatctgcctacggcgttcatacgcccagtacgtgcactggccggcggcataggcgttgccgtaatcaccgttcgacgtgccttggccgccgacgctgggggcgggagcgggggcgggagccggcgccggagccggagcgggcgccggagcgggggtcaccggagtggacggcgtaccgccctggttaccggtatccaccctgttggcggcgtcctgctgttccttctggaactgacgattgtaggaatcgacctgggaggcgatcagtacggtctgggccgcctgcttggcggattgggaatccagactgtcgatcatggaagacagttcgtcacgccttgcttcgccttcctggcgcagcttgtccaaagcgtcacgttcgctttgcgcggtttcggcggcggtctgtgcggaagcggccttctcatcggcctgggtcttgagcacagcgatctgcttttcgatggccgccaagcgctcgccacgattcttcgacgtgctcagtgaggtcgcggcggaggaagccgcattcgcctcgttgcgggacaacgcgtcccgggactgcatggagttgacgaagtcctgtgtgctggtggcacccgtcaccacgctcatcacgtcggaagcattcgagccgtgcatctcgtcacgggccagctgggccacggcggcgtgcgcgtcatcgtagtccttgccggtctgcttgatccgctcctcgagcgtctccttgtctttctgcgcggcggaaagacgtttggatgcggcgtcggcctcgtcctgagcggtggcggcatcctcgttggcctgcgtgaccttggcctgcgcggcgacaatcttgttgttggtcagatcgtccagctcaagtaccttattcgccaggtcctggctggcaccggccagctgctgcttgagttcggcctcgcgctgtaccgacgcggcgtgctggttctgcgcattgatcaggtcggaataggtgtctgcctgggcaggctgtgccgagctgaacgccagacctcccacacaggctgcggcggccaccagtgccgccagtgcgggcttgatcacacgtacgttcgtcatatgtgaatagtcctttcgctcacttaagccaataccataacatgcgaacctgagaggcttgcacacgatgtcatcacatttctcgcgggtaagccggtcgcgttacgccctcaaataacgccgcaacgagatggttgaagcgatgatggacagcagtatcgcgcccacaaccaggaacggcgatatcaccagtaccgtgagctgattcacataaggaatccatgtaacggatttcgccagccagccggtgacgaacacgttgacgatagccgaaagcatcaggcacgagagcaccgagccgatcagcgaggcgatggtgccctccagaatgaacggcagacgaatcgtccagttcgaggcacccacgtacctcatgatttcggtttcggttcgtctggatgcggcggacatacgaatggtggttccggtcagcaggatggcgaccaccaccatcacgccggcgagcacggccgtaaccgccgtggctcggttgagcacggcgaacaccgggtcgaagatctggcgctgatcggtaacgtcttccacaccctccttgccagagagcacttcggagaccacctgatatttggtggggtccttgagcttgagccagagggagtcctgcatatcgtccgcggtcagcgtacggccttggaattcaccgttcgggtactgcttggtgaaggtgttgtcgtagaaatcctgcttgctgacatagtcgatgttggagaccacgtcgttgagttcatcgcgaatggttttctgcagtgccgtgatctcattggctgagggcgatttgccggaagcacagttcgcggactggctggtgccgtcgggacatagccacaccacgacctcgaccttgtcgtaccagtcgcccttggctttggtgatctgcgcctgagtaagcaccgaagcgccgatgaacaggaatgagatgaaggtgaccagcgtcagcgacagcagcatcgacaggttacgggtgaggttggcccacgtttcggacagaatgaatcgtgctcgcatgatgatcccccttactccttcgcgccctcagcgggttgatcgtcggatgtttggtctgcggcggactgctcgtcagcaggctgctcggcggcggactgctcgttggccggcggtgcgggcggttccggcggtgcgggcggctccggcggggccggcggctcggcggcggatgacacggacgtatcggcaaccgcggcggtcgcggcggactcgtccttgaacgggtcgaacgcctgggtgctttccagggcggcggcctgctcatccaacgaaatgcccttgccccaggtcagcgtgtcttccagcggcgcaaacgtctcgccatagcggccggtgcggccggaatgcacggaactggccaaacgggcgatgccttcagacggctcgtcactgccctcgatggccttggtcgccgccgccagcacatgatgggcggtgtcggacttggcttcgacttcggcatccgggaagaacagggcggaatcgtaggagccatgagcctcgtcacgcacgatcttgccgttgtgcagttcgaccacgcgcttgcgcatcgagttgacgatctcttcgttatgcgtggccatgacgatggtagtgccggtgcggttgatggcgtccagcacttccatgatgcccagcgaagtggtcgggtcgaggttgccggtgggctcgtcggccagcagaatctgcgggtgattcacgtaggcgcgggcgatggccacacgctgctgctcgccaccggagagctcatgcggatagttcttttccttgccggtgagtcccacggtattcagcaccttgggcaccaacgatttgatggtggaccgccgcgtgccgatcacctcaagggcgaacgccacgttctcccatacggttttgttattgagcagcttgtaatcctggaacacgaagcccagcgaacggcggtactgcggcacttgacggttggtgatgcgccgcagatcgttgccggccacgcgaatctcgccgctggtggcctcctcctcgcgcaacagcaggctcaagagcgtggtcttgccggagccggacgcacccacaaggaacacgaaatcaccgcgttcgatatcgaggttgatgtcgtcaagcgccggtcgggtgcctttgggatagatcttggacacattgtccagtgagatcagtgccataatgctgtttactcctcggtttcggcggcgcggcgctgttcatggcgccagcggatgccggcctcgatgaacgcattgatgtcgccgtcgaacacggcctgggtctggctggtttcgtagccggtgcgcagatccttgaccatctggtaggggtgcagcacgtaggagcgcatctgatcgccccagctggccttgatgtcgccggcgagctccttc

SEQ ID NO: 2178 - DNA, 20026 bp, Unknown
  R51_24m  MAG No. k141_16270
aacggaggcgactatttcaccaacaacgcagtcgcttggaatccgctgcggccaaggatctcactcaccaaaacggcgggcgggcagcagaccccctcggcggagcagtgccagaccatgggcgtggcggaaggccattgcggccttgcgtcgtggaatgtctcggtgcgcaatgacggcaagggccaactgccggcgggatgggtcatgcaggacaccggcagcggcgtctggtacacgaagcaactgctgcaggacagtctgcgcgtgaccgtcgacggtaagcagctggccggagcgacgcaagtgtcctccgacaacggcaggacctggatagaccttaacaaggcgcaggaatcacagcgatacacgtccttccggttcgtggccgacaacgcgcttgccaccggcaaaaccgcggcgatcacctatcaaagcctgttcgattccagtgaaacgaccgtgcgtaagaattcagccaccgcgggaaccggcgtcggtggagcgttcgtcaaacccgtcacctccagtgtgcaagtcgcctctttggtcaaagacggttgcggcgatccggtcgacggacaggggaaccccaaattcacctcctgctcggccaacggtgccgactacacacgtaccgccacccccgatccggtgtccgtgaggcaagtgggatggcgtatcagcgcgcacgtgaccgacaattggcgtcgcgcgccgctcgtcttcacggaaaccctgccggagggcctgcacgacgtgaagttcgcgttctccgatcatggcgaccgcaaacagtggcttaccgtgggggagacgcggttcaccaatacccagggtgtgcaatatgtcgttaccgtcaagcagaccggcgaccgcacgtaccagatcaccatcccccaacaggcgaccgatctcatgaacgacggcaacgtgtatctgtatgtggccgcacgcactcccgacatcaacgacggcaagtactgggcggaaggcaaatacgacggcaaacggggttgcgtcgccgattccacgctgaaaaacggtgccggcgattgcctgacggccaagtaccgtaatacgatttccatgggctccggcagcataccttccgtgtccacgtcggaaaccttcgtcgataatttccagaaaaccaataccggcgtcgaagacaagcagaacgtcgacagcggctggtcctccgacggcaaaagcttcacccgaacctattatgtgcgcgccaaccggtatggactgaacatcgatgccacgcatgcgaaacaggatgacgtccccgataccgatatgctgcccatcaaagacacgctgaccgtgccggccataccggaaggcagcaatccgcaggtcacgttcctgggcaacgtgaccgtgtgtctcgcttggataggcaacggacagtcctgcccggccggcaaaacgtaccaaccatcctcggatgcgatcgtatatcaggaaaacgatgccaaactcggcggcgtattgacggtgtacgttcccgattccacgccggtgaccatcagctaccagtacgggttcaaaggctccgccggattcgacgtggcgaacaccgcgcaattcaccaactcgccatggtccgatgccggcgcattcaatacgaacggcgcggccatcagcagtagcggcgtcatcgtgcagacatcgacgatgctgttgcataaaaccgatgatgatgcgtccggctaccgggatctggccggcgccaaattcgaactgctcgaatgggacggccatgactatgcgtcgagcaagcccacgcccattacggcggtgacggatgagaaaggcatgatcgtcgtcggcaaaacccaagggttgcagtgcggcacggcgtatcggatcaaagagctccaagcgccgctcggctatgagatcaacgacgagcagaccgatttctatctgacgaattgcggcggaggcgcgtatttcggcccgacgaacgcggatggcagtccgcatgcgtcggtgcatcaatggaccggtggctatacggtgacgattcgagacaagaagatcaccggctcggtgtcgtggagcaaggtggacgccgatcatcacgaggaatacctgtccggcaccacgtggcggcttgaacgacgcaacgatgacggtacgtggaacaaggtcaacgattccctctataacttcgtcgattgcgtgggcgacggtaatgccgcctgtgccggcaccggagacaaggatccagccgtcggcaaactgaccatcgacaatctcgactggggcacctaccggctgacggaggtcaccgcgcccggcggataccggttgcccgacagcgaccgtacctgggccgaattcacgattcgccgggaggaccccaaggcgaaagccgtactgcacggacggggtgattgggccggcgttacggacaatcgtctgaccaatcggccgcaaccggtttccgcgctgccctccgcggggcgtcgtgccgcgtgggtggtgacgattgtcggcatggtggcgtccggaggggcgttggcggtgttggcaatcgccgcgcatatcagaaaacgttcatacgggaaccgttccgtatgaccaacatggattcatccatatattccataaggaggagaacaatgaaagcaaaatcatggatggcgggagtcgctgcggcggccacactgttcgcggccatgaccgcaccggccagcgccatggccgaagagtcgggtgcgccgggagtctcgcaaacttccacgacttgcgcgaccaacggcaacaccatcacggtgaagggcacggatgcggacgcgttcaagacatggaacggaaagacctcttcgagcaaccgcacgttcaaagtggcgaaagtcgccaactacaagatcggtgatgacacgtccggcggctcggtgcatcttgagacggtggcggcctcggagacgagcattcttcaggcgatgcaagaactgaaatccaatgatggtacgccactgtatcaaaataaggatcttcaaggtgatccaatgaactggcttgccaacactgggcaggattcgttaatccgtaagtacgcggataatccgggagtcatcggcaccgtgcttgaagcgaataaggtgagtgtcgacgacacgaacaataccatgacgctcactatgaccgaacccggcctgtatgtgatcttcgatgctacacagcccaagaagcagaccaaggacacgggcgataccaccgttgagtatgcaggcttcaacaatatgctcgtcggcactccgcttaccgccggctgcaacgtgtcgaacagcacgggcaccgtggatctgacgtccaatgcaaacgccaagaccggttccacgacgaccaatcgcggcggcttccagttcaccaaggtaggtgtagaaaacgacaggaccggcttgtcgggtgccgaattcaccgtgtactctgacaaagacttcacaacggttctgcaggacgccaatggtaagaatgtcacagccacatccggcggtgccggtctcgtcgattttagtagcttcaagctgaataccggcacctattacctcaaggagaccaaggtgccgaatggctattggtccggctccgcggccaaactgcaggtcaagatgaagaacgacaacgggacgattaagctggagtcgatcaccgacatgagcgttcccgccagtgggctgctcagcgatggcggtaacggttacgtgtaccgcaacatcaaaagcatcacccagctgccgctgaccggtgccatgggcatggccatcctcggcgtcgtggcggtgctgtgcatcggcggtgcctcgatcatcatcgttcgggcccgcaaaacgaagcgtagcttcgcggcctgaacatagggccgaatgacgccggtggcaccttcgttcgagcagctggtcgacgttgccaaagaataccgggcgcatgcccgtatgcggcggcgattgcgcgtgatgtacgccgtcgcggggattttgatcgccgtggcggcggtatgcacggtggttccgctgctgatgcagtatgcgtcgcagacgtccatgtccgcgtcggcgtcttccgtcgaacagcaggtgcgactgtggccggaaagccggatcgacgacgaactgcgggcggcgcgtgcctacaaccgcgatctcgtccgatccgggcagccggtgctgggagcccaggccgacccgttcagtaacggggaacgcctgtcctcccagtcggcgcaggatcaacgctacggcaggctgctcaacgaaggtcacggcatcatgggccgcgtgtccataccgaagatctcagtggatcttcccatctaccacggcaccggagacaagcaactgtcccttggttccgggcatctgtacggcacgagcctgccggtcggcggcaacgacacccatgcggtcatcaccggccatcgcggcatggtgcaggcgcagatgttcaccagattggatgaaatgcgcgaaggcgatttcatctacatctcaacgatgaacaggaccctggcctacgaagtcgatcgcatcaccgtaatcgaaccgaccgatacctcgcagctgcgcatcgttcccgggcaggatcggctgacgttgatgacctgtacgccatacggcatcaactcccaccggctcctggtctccggccatcgtgtgagcatgcccattcccgcccccgatccgaccgatctgcatgacggccggaccgtcggcgcatgggtgtgcgggtcggtgctcctgtgcggttggggcggcattgcggcggtccgtcggcgcaagcgcgcgccggaagggccaccgcgccatgccgtgcgggtgtgattggatcaaggtccggcatggcgatgccagccgttgcggacggattcggggtgcgacgcaggaggttcgcctggtccggagaaaacagtctacgcggcgggaaccgttcacgtcgaaatcacctgcacggcctggagtacccgcaattcgggaaacctgtgcaaccgtagaacgtgcgtgccggtgccgaaacgttcctcggcgtcatcggacgcagcctcggcgtgtgacggcggcgacgcgtgccgccgacaccgattgcgggcggtgacgggtgcgtgacgtgtgtgacggatggtcggatggcggggtggacggaccgagcggaaccgggcggtccgtccggaaccggctagagaccgaggaaggcgcggatgtcgccgatctcctcgtcgacgatggctgacccatgccaggatactcgcggtattcgagccggccggtggcctcgagcacgcgatgcgcggtctgctggtccgcaggtggaatcgtgcggtcccgcgagccgtacaagagcaggaaacgggtgggggagtcgaaaccggtgaggtccgtcgactcctcgcccttgaacgacgggctcatcaggatcgccgcgtcaaacacgtgcggatgctcgagcaccatgcgatacgacatatagccgccctgggagaacccgacgaggatcttgcggcggcctgcgaacatgggggagtcgagcagggagacgacggcgtcgcccatgcgcgagcactcgcggcggcgaatccgaagcatcttcatatgccgctttcagcttctccatgatttctgtttcgttatacatgccgcgcacgtaatcgtgcaatagcggttgcaggaaatcacgccaaaggtcatcgaacgctttcgccgtggattcggatttggaaagattcaggaaatacgcagggccgacatggtaatccgaacccaaaccgatatcgggggaggatatggtctcattcagcttcgtcaagcggctctcggcttcctccgacaagcctccaagttcttcaagcatgtccaacccgtcttcggccttgacctcgatgaaacggaaccgtgggggcgtgcggcgacgttgcgatgggaatcggtcagcgcgggcggcctcatgctggtgagaaaggccgtgtgcgttccggcccgaacaaaggacgatgggatgggccgagaccgatgaaccgatacggaagggactacgacatggacaatacggcgcgcagggatgcgggattgccataccactacgacgacccggccatcatggacggacagctcgcatggcagaacaaactatgggaatacaaccagaccaaacccaccgaacgggagcggcgcgccgaactgctcaaagacatgtgcgccgaagtcggcgacggcgtgcacatcgaaacgccattgcatgcgagcaacggatgccgtcgcgtacacctcggcaaagtcatctacatcaacgcgttcatgagcatggtcgacgacgcggagatatggatctgcgactacacgatgttcggaccgtccgtcaccatcgccaccgccggctacccgatcttgcccatcctgcgcgaacaccacactcttgttcctatagcccagaaatcccgcgtctctttcgttgtgacgcgggatttctgccggttgggctatcggttggattgactggtatgtttcagcgaacggctttgaccagtgcctcggtgaggtacttgccggcggccatcaccagcggcgcatagcggcgtccgggggcggcacccatgcggccggtcgggccggaaatcgagatggcggcgatgacctggccggaggcgttgcggatcggggcggaaatcgagcacacgccctcttcgcgttcgttcacggactcggaccagccgcgcttgcgtacggcggccagcttggtggcggtgaacttggcgtggcgcaatccctggtgcagacggtcggaatcctcccaagccagaagaatctgggcggcggaaccggcttccatcgacagcatggcacccaccggaatggaatcacgtaggccggaggtgcgttccacagcggcgatgcacacgcgctgatcgccttggcggcggtaaatctgcgcagactcgccagtgcgatcgagcagggtctgcaggatcgggccggcggcggtcagcagacgatcctcgcctgctgcggcggcaagttcggcgaaacgggagccgagtacgaatcggccatgctggtcgcgcagtacgaaacggtggcgttccagtgcaatagccaaacgatgtgcggtcggtcgagcgagaccggtggcggccacaagctggcccagcgtagacgggccggattccagtgcgtcaagaatctttacggttttatcaaggacgccaacgccggaatggatttccccatcgtccttggcggtggtgtcttcaaccggctcggactcggtcaagctgttgttcaatggttcttcccgggaatcagtcataataagggcgattatgccatctcacatagtgaaatggcaaattggggaagtgtctcacagggtggccatgaagttgaaagggcgttcgtggatgccgaagagacatgtctggagcggaaccgagtcatgactaggtcatgttcgagtcgggtccgagtcatattgaggccatcatttgaccgtatctcaatatccggcatgctcatggccgggcccatcgcaagcacataggctaataccacgaacaaggcgcgaacacaatacctcgcgcggaattttttggaggaatcactatgggaacgacactggccgagaaggtctgggccgatcatctggtgcgcaagggcagcgacggagctcctgatttgctgtacatcgatctgatgctcatgcatgaggtcaccagcccgcaggcgtttgagggcctgcgcttggccggccgcaagccgcgtcacgtggatcagctcattgccaccgaggatcacaacacgccgaccgttgatatcgatcgcccgaacccggacgagacgagcgcgttgcagttgacgactttggagaagaactgcaaggagttcggcgtgcgcctgcacccgctgggcgacgccgatcagggcatcgtccacgcgttcgccccgattctgggcctgacccagccgggcatgaccatcgtgtgcggtgattcgcatacgtcgacgcacggcgcgttcggcgcgctggcgttcggcatcggcacttccgaagtcgaacacgtgatggccacacagacgctgtccctcaagccgttcaagaccatggccgtcaacgtcaacggcaagctgcccgcggacgcgacggccaaggacatcattctggcgatcatcgccaagatcggcaccggcggcggccagggttacgtgatcgaataccgtggtgaggcgattcgcaacctcaccatggacgaacgtatgaccgtgtgcaacatgtccatcgaagccggcgcgcgcgccggcatgatcgcgccggacgagaccacgttcgagtacctgaagggccgtccgcacgcgccggaaggcgagctgtgggatcaggccgtggcgtactggaagacgctgaagaccgatgacgatgccgtattcgacaaggtggtggatattgacgccaccaagctcggtccatatgtgacgtggggcaccaaccccggccaaggtctgccgatcaccgcctccgtgccggagccgggcaagatcgccgacgccaccaagcgcgccgccgccgaacgtgcgattacatacatgggtttgaagccaggcatgccgatcaaggacatcgccgtggacaccgtgttcattggttcgtgcaccaacggtcgtatcgacgatttgcgccaggccgccgcgattatgaagggccaccgcaaggccgagaacatccaccgcgtgctggtggtgccggcctcctcccgcgtgcgtttgcaggcggagaaggaaggcctcgataaggtgttcaaggactttggcgccgaatggcgtaacgccggctgctcgatgtgcctgggcatgaacccggacaagctggtgccgaacgagcgctcgatttccacttcgaaccgtaacttcgagggccgccaaggcaagggctcgcgcacgcatctggcgtcgccggccgtagccgccgccaccgccatccgcggcacaatctcgtctcccgccgatctctgagccaatacacgtgagccccctctgacgaggggctgtcagtcgaagactgactgggggagagatccccgaaaggaaaattgttatggaaaaactcaccacactgaccggcgtgggcgtgccgctgcgccgctccaacgtcgataccgaccagatcattcccgctgtgttcttgaagcgcgtgaccaagtccggcttcgatgacgccctgttctacgcatggcgccgagacccgaacttcgtgctcaacaagccggaatacgccggtaagggccagattctggtcgccggccccgaattcggcatcggctcctcccgcgagcacgccgtgtgggcgctgcacgattacggtttccgcgtggtcatcgcgccgagcttcgccgacatcttctacggcaacaccgccaagaacggcgtgctggccgcgattatgccgcaggagtccgtcgaactcctgtggaagctactggaggaagagcctggtcgtgagatgactgtctcgctggagacccgcactgtcacttgcggcgacgtgaccctgccgttcgaggtcaacgattacgtgcgttggcgtctgatgaacggctacgacgatatcgatctgacgctgcagcacgaggacgacatcgccgcctacgaaaagatgcgcgccgaaaagttccccttcaagcccaagaccatccccgccaaacactgggccgaagaaagaatcgagtccgcccgcgagcctgaggacgcagactggacagggccgttggccgatcgcggcattatttagccgcgatcggcctgctgaaagcccggtgggctttcagcaggccctgtgccgagctgcgacagcagcgaggccagcattgagcctcgccgaaaggcgagtccataattgcaggcccagggccgttggctctgtgtctgattgagattattgggtcgctcgcatcgcatcaaacaaaggtctcactggtgcccgcgccccacatccattgcgcggcgggcaggagttgcggcaatattcccttcagcgccaacaacgccatacggtcgttatccaccgcagccaccaacaccggcgtggcggcgctttcctcaacactcatgaactccgtcctagcgttcgaaatactgtgcctgaattcgtacacatttgtggacataatcacgattcatccagtaatgacggttaggttgagcatcatgaccatgaatgacatgaatccgtcgaacgattccgatacggctccggcgcaatcgctgtcagcgcaaccgttgccacctcgaccggcaccgcagtctgcggcacagtcacagacgccgatgccacagacgccacagtatgttcagcctgggccgagcatgcagccgcaatatgcgggtcagccggaggcatgggcacaaccgctacctccacaagatgtttcacggggtgttccacggattgtttcacaaggtgtttcacaacctgtgccgcaagccgcaatacctgctgtgcagcctgcacaatacgccgcgcagctcgtatacccgacatatcccgtccaacctacgtatcctgcccagccgatgtatcccacgcagccgacgtatccggcgcaatccgcctattccccatacccggcgcaacagtcggctccacagcccctcgctcatccgtactacgctcaaccagtgggctacgcgccacaaccctattccgctgcgccgcaaccattcgtgcaaacggctccggcaatgccagtcacaatgcccaacgcaatgcctgccacgatgcccgcagcaatgcccgtggtcatgccgatcgatcctcgccgtgtatggcgcacgtggcgtcgcaaggtggtcaatcgtgtaatgggactgactctcgcctatgaaggcatgatgctcttgggcgcaatggtcgccaccattatcgtcggcgtaataaccgcgagcgatttgtccggcgtgcagtgggatggcatcatcagcctgatatcggtgttcgtcgcgttcggatttctgctgctcatgcgccaccgtgacatcttcacctgcgaattctggcttggtggccagcatcgcgactcgtacggggagcccaatcagcttggccacatcagccaatatggcggcgggcgcatgcagcctctctgggcgttgatgttcatcgtgctgggcatgggcgtgcaaggcatcgttatgttggtgcaggtcgctttttccatgctgggcaccgatcttgcctctcccacgtcagacagcatcgccgaatccagcgtcaccgtaagcatgtggctgtacgttgggctggtcgctccgatttgcgaggaagtactgttccgcggcgtactgatgaaggagctcaagccgttgggcaagaacttcgccatcgtcacctcggcaatggtgttcggcctgttccatgacgacgtagtgcaaggcacattcgcgttcctctttggcctgattctgggattcgtggccatggaatactcgttggtttggtcgattgcactgcacatcttcaacaatgcgattctttccggcgccatcgatacccttgccggcaactatcttgatgacaacgcatatttgatattctcattgtcgctatctgtgatcggcgtgatcggatcgattatcatattcgtgatatacggcaaagagatgcgccaatatcaccgtacgaatcgtagtattccagacacgtactttggctgggcagctccgacgttcatcatctttgtggtagccaatgccgctttcgccattatttcgtttgtcggcgcgatgatgggttgagtgtgcgtgtgcgcatgcaggttggcttatcgttgaagcatgagtgattttgagccgttttacgatgtcagccgcagttacgaagacaactatgagcaagggccgttcggcgcgttcgccgaggcgctgaaggatggcaacggtgccgatgccgccggaaccaccagcgagggtgccttggccacctttttgggccagccggtcaacctgcctttcggcattcccgcaggcccgctgctcaacagccgtttcaccacggccgctttccacatgggtttcgatctggcgacctacaaaaccgtgcgttcgcgcgcctggggctgcaacccgttcccgaacgtgctcgccgtacaccccaagtcggcggacggttcactgacgccgggcagcgccgaactggacgaaggcgtgctggccgacaccaactatgaacagccgatttccatctccaacagcttcggtgtgccctcgcagagccctgacgtctggcagccggacatgcgcgccgccatcgaggccgccggtcccggtcaagtgctggtcccgagcttccaaggctcgcgtgtggagggcatgagcgaggaggaatacatcgccgaccatgccactaccgcccgtctggtcaaggagaccggtgccaagctcatggtgatgaacaccagctgccccaacgagggccacaaccgcctgctatgccacaatccgctgctcgtgggccgcatcaccgaggccgtgaagcaggagatcggcgacatcccgctgatggtcaagctcgcctacatccccagcgacgacgctctggagcttatggtgcgttccaccgtgggccacggcaccgtgcagggcttcagcaccatcaatacgatttccgccaaactggtcgatgccaatggcaatcaggccctgcccggcgcgggccgcgatcgctcaggcgtgtgcggcaatgcgattcgtggcgccggcctcgacatggtcgcccgtctggccgcgatccgtgaaaagctcgggctcgatttcgcgatcaacggcgtcggcggcgtggtctcgcccgccgactaccaggcgtaccgtgacgccggcgcggactcggtgatgtccgccaccggcgcgatgtgggacgccgaactggcccacaagatcaaggccagccggtaaatcggctccaaaaacaagcaacagcctgtacgggccgtgattcccagacgattcccagacagtgcccatgttgcattgaaactgttgctgttatatgtaatcacggccgaacaagctgcataacttaacctctttcttcttctctcctttctctccccggcgcccatcacgccggggtttcttttttgcggtgggtacagccgtcttactcggccgccgccttcatggccacggcgccgacgtagtagaccggcttgtcgaagttcggctggaacaggaagtccacgttggcgagctggtcgatggtgaagccggcctgaatcgccatggaaatcacgtttgccgcgccggagatatcggctttggaacagaactggccgcccttgaccttgcgggtttccgggtcccaggtcagaatcgacgtgactggggtggtggtgagcatgaagtccgggcgataatcctcggtgagcgaggtctcgcggaccgtgagcccgcggcgttcggcaccggcgcgggtcaggccggaggcggcgagcgagagatcgtacagctgcacggcggacgtggcctgcgtgcccatgtacttcatggtcggcgtctcgatgttgcggcccaccagcaggccctggcgcaccgcgttggtggccagcggaatgtaatcgtgctggccggtggggttgtagaacacggtggcggagtcgccggcggcgtacacgcccggcgcggacgcctgcatgtagtcgtcgaccacgatcgcgccgttcggcagcatgtccaccttgcccttgagcaggtcggtgttcggcaggaagccgacggccagaatcgccatttcggccgtgtactcgcccttttcggtgaccacagtgacggtgtcgtcgtcattgtcgcggaactcgaccaccttctggccgagcgcgagcgtgacgccgtgctcctcgaacgcggccgccacctgatcggtgatggtcttatcgaaattattggccagcgggcgatcaaggccgtcgaccagcgtggtcttgacgccggtgacgctgaactgctcggcgatttccgcgccgatatagcccgacccgatcaccactgccgacttggcggttttcgccttttccttgatggcgatggcgtgatcccagttcttgcacagcagcacatgcgggctgtcgatgccggggatcggcgggatgaccgggcgcgagccggtggtcacgaccagtttgtcgaaagcgagggtctgttcggcggggtctccggcctcgtccagcgcgcggtaggtgagggttctggcgtcgaggtccacggacgtcacgtcggtgcgcatatgcatggtcgcgccggcttcggccagagcggcaggggaggagtagaacattttcttcgggtcggatacgtggtcgcccacccacagggcgatgccgcaggagaggaaggacagcgtaccgttgcgctcgaaaacatggacggtccaatcggggtgctcggcgagaatcgaggtggtggcgaacgtgccggcgtgcgtgcagccgatgacggcgactgtggtcatgaatgctcctttgcttgtggccatggcgtctgatgccattgccctgaatcgtagcgtagaagtatggagaacaccgtggcggcaaatgtgaggaagatcacgttatcggtttgattcgacggggggtatgggatccgttgtgcacggtgatcaaagttcggctggggtgcatttcacggagtcggcacatggcttatggcaaactggacggtagcattttttgaatcttgattgattgaggagagtggcgtggctgagaatccggatgacgtgttgcatgtcgagggcggcaagcctttgaatggcacgatcaaggtgcgtggcgcgaagaacttcgtgagcaaggcgatggtcgccgcgttgctggcaccgggcaagtcggtgctgaagaacgtgccggagattcgtgacgtgcatgtggtgtccgatttgctgcgcctgcatggcgtggacgtggatgtggacggtgcgaacggcattgtgaccatcgacgcctcgcgtgtgcagctggccgatgtggccgacgtggatacactgtccggttcgtcgcgcatcccgatcctgttctccggcccgctcgtgcaccgtttgggtgaagcgttcattcccgcgttgggcggctgcgcgattggcggacgtccgattgacttccatctggagacgctgcgcaagctgggcgccacggtggacaaggaacacaaggacggcatccacatcaccgcgcccaacggcctgcacggcgcgaagatccacctgccctacccgtcggtgggcgccaccgagcagactttactggcggccgtgctggccgagggcaagaccgaactgtcgggcgcggccactgagccggagatcatggatctggtgtgcgtgctgcagaagatgggcgcaatcatttctgtggacgttgatcgcaccttccgcatcgagggtgtcaaggaactgcaggggtacacgcacacgtcgctgacggatcgcatcgaggcggcgtcctgggcgtccgccgcgctcgccacgcacggtgacattttcgtcaagggtgccacccagccggagatgatcacgttcctcaacgtgttccgcaaggtgggcggcaaattcgaggtgacggacaagggcattcgtttctggcatccgggcggggacttgaagcccgtggcgatcgagaccgacgtgcatcccgggttcatgaccgactggcagcagccgctcgtggtggccctgacccaggccaacggcctgtcgatcgtgcacgagaccgtgtacgagaaccgtttcggcttcaccaagccgctggtcgagatgggtgccaccatccagttgtaccgcgagtgcctgggctcgctgccgtgccgtttccggcagcgcaactacaagcattccgccgtgatcttcggaccgaccccgctaaccggacgcgacatcgacgtgccggacctgcgtggtgggttcagccatctgatcgcggccttggccgcgtcaggcccctcggacgtgcacggcatcagcctgatcgaccgaggctacgccgacttccgcggcaaactcgaagcgttgggtgccgacttcgattaattcggccgttcctcggctcccctctctaaggggagccacaattttttacaacagcccgtccgcctcaagtgcggcggccatgcggtcgaagcattccttcagtagcgggtagggcatggcgaagttcatacgcacgcaaccgcgcccgacctcgccgcattcgcggccgtccgtcaacgccacattggctttcttgaagaaatagtcggccgggtcatcgatgcccagtgacgagaaatccagccacgcgatatacgtgccctgcggctccacatagcgcaccttggcgaatctcgtgcgcatctgctcgttgaccagcgcgatattgcgctcgatatatgccatcacgccctcgaaccatgccgcgccgccgtcataggccgcagtggtggctatggcaccgatggtggccgtctggtgctcggaccattccgcgttcctcatccatagctccagatcgtccggattggtgagaatcacctgcgcgcacttggtgccgggaatattgaacgacttcgaggctgaagtggaggtgaaagcctgcatggccgtctgccggttgattgaggcgaatggcacatgcgtgtggccttggtagacgaacggcgcgtgaatctcatcggagaatatacgcacgtcgtacttggcggccaggtcggacaatcgcagcatttcttcgcgcgtcaataccttgccgatcgggttgtgcgggttgcacagcacgaaggcatggcagccgttcgcgaacgcctgctcaatggcgtcgaaatcgaacagccattcatcattgcgcccgctgctctcgccggcgcccgcgcacagcatcggaatctcaaggacctccacgccatacagacgcggcacacttaggaacggcatataggccggagtcggtaccacgatggagttaccggcgcgcacgatctcgcgcaggaacacttcgaacgcctccagcacgtccggcaccgggcggatgcacgttggatccacatcccagccgtagcggcgctgccatgcggcgcacgagcgggcgacctccttcttccacgggtcgggaatgtagccgagcgcgccacgttcagtggcctcttcgatggcttcggccacgcatggtgccagaccgtaatccatctcggcgatgaatgcgccgatgcagccggggtaacgggtccatttatccgaaccgacctgctccagatcctcgatggtcgtcacgtcgatgtgattggcatcaaagcaagaggcgccggcggttgcgttgctcacagtcgttgactggggaatgttgttcatgctcataacatgccattgttcccggtgcagaagggccgctcaacggtctggctccccgaaatcgtgatggcgctcgcaagcttgcttatcgctgtccgactacttggcactcaaatatttgagtgacgtgcgctcgagctcttcgagcaatgaaccgagcgcgggacgatggtcgccggcacgagtcacgatgccgacctcgcgcgccgcaaaatcgtcggcgatgggacaggccaccagatcgccttgcagattgatatgtgtatcgagcgccggcaccagcgagacgcccatgccaacctcgaccaggttctgcgtggcccagtaatcatccgtgcagtggcggatatccggcttgaatccggcacgggtggccagtttcaccaaatttgcgcggcaggtggggcagccggcgatccaatgctcgtctttggcggcggacagcggcacgggttcgccggtctcctcgaatcgtttggcgatgtcgctggagcggcggaccaacaatcgcatcggatcgtaacccagcgactggaaggtcagatcgtcgccgatgtgcaggaagttcgggatgctgctgtaccggaacacggcggcggcatcggccttgccttgggaaatcagaccgatcgcctccggcggctccatctgaatcaggctcagctcgatgtccgtgaacatactgagcttgaccacggtacgggccgcgatagtagagcagattgacggtggggccaccaaatgcaggtgagcaaaccgatgatgccgataatcctcgacctcacgggccgcccgctccagccgatcggcgatggcctcgccgtggcgggcgagcatcgaaccggtggcggtgagttccacaccatgcgaggtgcgttgcaccagagtcgaaccgcactgtgcctccagctttttgatctgctggctgatggccggctgcgaccaacccgtggccttggccgtggcggagaacgaaccatactgttcgatctgccacaacgtgaccaatgattgggggttgagcccggccatatgcacctctttcgcgcgtcgttccattatggccgccgacaatgaccggacgcggcacggtgtcgccatcgccggtatccttagaagaatgagccctgaagccttaagtgaactgatttccagcattgcccacaacctcgtcgccgccggccaggccggcgcgttgaccgacgagctgattccgcccgtcgacaagctcgccgtgatgcgcccgaaggaccgcgcgcatggcgactgggcctccaacatcgccatgcagctggccaagaaggccggcatgaagccgcgcgatctggccgagccgttcgccgccgcgctcgccgaagccgacggcatcgccaaggtcgaggtggcaggccccggcttcatcaacatcacgctcgactccgcctcggccgccgccgtggtggacaccgtactcgccgccggtgccatgaccgacaccgacaagcatctcaacaaggtcaacgaatacggccgcaacgcccatctgggcggccagaccctgaatctcgagttcgtctccgccaaccccaccggtccgattcacatcggcggcactcgttgggctgccgtcggcgacgccatggcccgcgtgctcgaagccaacggcgccaaggtggtgcgcgaatattatttcaacgaccacggcgagcagatcaaccgtttcgccaagtcgctggtcgccgcctgggccgaggccaataacttgggcgacgccggctaccagaccgaaaccccgtgcgacggctacaagggtgcctacatcaacgagatcgccgcccgtgttcaggccgaagccgagtccgacggcgtggacctgaccgcactggcccaccaggatcaaggcctcaacgacgacggtgaaccgctcggcgaggccgacaccgaagtgcgcgaggaattccgcaagcgcgctgtgccgatgatgttcgatgagattcagaagtccatgaaggacttccgcgtgaacttcgacgtctggttccatgagaacagcctgtacgccgacggcaaggtcgacgccgccatcgaagagctcaagtcccgcggcgacatcttcgacaaggacggcgccacttggtttgaatccaccaagcacggcgacgacaaggaccgtgtgatcatcaagtccaatggtgagttcgcctacttcgccgccgacatcgcctactactgggacaagcgccatcgcgccgaaaacccggctgacgtggccatctacatgcttggcgccgaccaccacggctacatcggccgcatgatggccatgtgcgcggccttcggcgacgagcccggcaagaacatgcagattctcatcggccagctggtcaacgtgatgaaggacggcaagcccgtgcgcatgtccaagcgcgccggcaacgtcgtgaccatcgacgacctggtctccgtggtcggcgtggatgccgcccgctactcgctggcccgctccgattacaaccagaacttcgacatcgacttggccctgctcgcctcgcacaccaacgacaacccggtgtactacgtgcagtacgcgcacgcccgctccaagaacgtggaccgcaacgcagccgccgccggcatcagctacgagggtgccgacctggccctgctcgacaccgaggcc

SEQ ID NO: 2179 - DNA, 19192 bp, Unknown
  R51_24m  MAG No. k141_17221
aacggcggcccgaaatggtggctgtggacgctgatcgcggtcgtcgtggccgcggcgctcatcgtgggcgtcaccgtcttcggcgggaaaggcaagggcaaggacgcgaacgcctccggctcggccagccgatccgacaccgtggccgtcggcctcaaactcgccccggtcaatcttgacatccgccaccagtcgggttcggcccttgagcagatcctcatcggcaacgtgtacgagggcctcgtctcgcgcggctcggacaacaaggtccaccccggtctggccaagagctgggagatctccaaggatggcctgacctacacgttccacctcaacgagaagatgaacttctccaacggcgacaagctcgacgccgaggacgtggcgtggtccatcaacgagctcaaggcccagaagtactacgactacgagcaggtcaagagcctggacaaggccgaggccgtggacgccaacacggtcaggctcaccctctccgcgcccaactcgaacatgctgtggtacctcaccagccgtcccggcctggtctacgacaaggacgccacctgggatcagaagaacggcgcgttgggctcgggtccgtacaccgtggtctccttcgacccgaacgacaagatcgtgctcaaggcgaaccccaagtattggggcaccgagcacaaggcgaggaccgagaacgtgatcgtccggttcctgccggacgagaacgccagcatcaacgccctcaagagcggcgacgtgcaggtgctttcgcccatctccgccacccttgccgatccgttccgcaaggatccgaactatgtggtcaagtccggtgatggttccgacaagttcgtgctcgccttcaacatggccaacgacaagctctccgacaagcgcgtccgccaggccatccgatacgccatcgaccataagcagatcatcgcctcgcgcggcggcgtggacgcccccctcggcggtccgatccccaaggtcgatcccggttacgaggatctgagcggtctgtacccgcatgacgtggccaaggccaagaagctcatggagcaggccggatactccgagtcgaagccgctggacctgaccctcacctacgccaacgtgtacggcaccgagctcggcgaccagctcaagagccagctcaagcccatcggcatcgacctgaagatcaactacgtggagttctccacttggctgcaggacgtgcacgccaacggcaactacgatctttcgctcgtggaccatgccgaaagccacgacttctacggatggaccacgccgagctactacttccactacgacaacaaggacgtgcaggccctgtacgccaaggcgctggaggccacctccgatgacgaggcctcgaagtatctggccaaggccgcgaagatcgtctccgaggacgcgccggccgactggctgttcagctggaaggtcaccatcgcctacgccaagggcgtggacggcttcccgcagaacctgagccagaccgtgctgcccctctggcggatcacctacaccaagtagtcccggaacccatcgctcgggcgcggcgcgggagcgattccgctgcgcgcccgaccgtggacggcccatccggccggtgacgccacgggcggtggcgagggaatcgataagggaggcgttatgcggttcttgatgcaacgtttgctgctgttcgcggcggcgctgttcggcatctcggtgctggtgttcgcgatgctgcgcatcctgccgggcgacgtggcggtcgtgatggccggcatgaacgcatcgccggcgcgtgtggcggccctgcgcgccgaattcggccttgaccggccgtatgtcgtgcagtatctcgactgggccggagggctgttgcacggcgacctcggcgtgtcggcgctgaccgggcgggcggtgacctcccaggtcggccaacgtgcgacgatcacgttcccgctgatcgtgatgagtctggccatcgcgctcaccctcggcttgtccatgggcgccgccgccgtgatctcccggtcgccggccgtgcgcggtttcctgcgcgtgctgtccatcgtgggcggcgccgtgccggccctgtggagcggcctgctgctcatcctcctgttcgcacggggcgtgggccttgtcggtctgctgccctcgcaggggttccccgccgctgggtggggcgctcccgggcgggcggtctcgtccctgatcctgccggcgcttgccaccggattcgtgtccggtgcgggcatcatgcgttacacgcgctccattctggaaggcatcgccgatgagggaggtccgatcgatatggccatgtcctgcggcatgacccgcacccaggcgttgatgcgcgtgggattgcgattggcggctccgcaactcgtctcggtggtggggctggcgttcgcctcgatgatcaccggcgtgatggtggtggagaacctgttcgccctgcccggtctgggcgccctgttggtgggcgatgtcggcaaccgcgatctggtggccgtgcaaagcgagttgttcctgctcgccgcgttcttcctgctgatcggcctggcggtggatctgctgcacgcgctgcttgacccgcgtctggccgccggaaaggaggaatgatggttgatcgcaatggtcgatggcgtcgttcgggcgtggttctgggcaccatctggtcccgtggcaccggccgctactcgctgatcgtgctggggttgtggatggtcgtcgccctggtgtcgttgttctggaccccgcagtcgctgctggccaccgacggctaccacgtgtgggacaagccgtcgtccgcgcattggctgggcaccgacggcatcggcgcggatgtgctgagctggctgatggccggatcgcgcacgaaccttgccatcgccctgctcaccgttgtctgctcggctgccatcggcatcctactggtcgggctgatggtcgcccgttcttcggcgctcgcttcggcgtcggtcgccgtggtcgacgcgctgatctccatccccaccgtgctcatcgccctgctgctcgccgtgccgttcggcgcatccgcggccgtggtgatcggcgcgtgctccatcggctacgggctgcatctggcgcgcgtcgcccgcccggccgccctgctcgccgcccgctcgggatacgtgcagtcggcccgggcgaacggcgccagcgggttcggcgtactggtcagacacatcgtgccgaacatcacgccggtgctgatggtgcaatcgtcgatgtcggcgggcacctcggtgctggccgaggcgggcctgacctatctgggcgtgggcgtcggcgcgggggtgccgagctggggccattcgctggccacctcggtcaaactcatcaacgtgtttccgttgacggtggtgtggcccggtctgatcgtcaccctggtggtggtcgcgctgaacctgttcggcgacgcgttgcgcgacgccaccgacccggtggctaatcccgcgttgcggcagatgactgtgcccggtgcggttgtgccggtggctaggggagccggtgacactgcggcgcagtccgcagtggcagcgccgaaggagacggatgatgagcgttgaaattcacgggctgaatattgctatcggcggcaaaccgattgtcacggatgtcgatctgtccatcgcggacggcgaacgggtcggcctgatcggttcctccggctccggcaaatcgatgatcgccaagtcattgctcggcctgttgccgcgcgaggccgtgctgtccggcaccatcacgatgggagaaaccgccatcctgtccggagaaaccgccgagtcgcggcatgggcaggaagatgactcaggatctgacgaagaacgcggcgcggcagataggcaccatgttgccggtgaacgcagggttgccacctcgggccacgattccgctgcgtacgccgacgagcatacgcttgccgatctgcgcggccggtatgtgggtacggtattccagaatccggcccatgcgctgaacccggtgatgaccgtggcgcagcagattgcgttgccgttgagactgcactacgatctgaccaaggccgaacgtgctgagcgagtgaataccatgctggacaaggtcggactggaccgtgacgtggccggcacatacccgcacgaactgtccggcggccaacagcagcgcgtgggcatcgccacggcgctgatcacctcaccgcgattcatcatcgcggacgaacccaccaccgcgctcgactccatcacgcaacgtcagatcgtggacctgctgacctcgttggtggacgacgccggcgcatccatgctgttcatcacccatgatttctccgtactcgcgcgtgccaccacccgctgctacgtgctggacgccggccgcatcgtcgaatccggacccaccgccgacctgcttgctgcaccgaccacgccgcaagcccaacgcttggtcgccgccgcccaaaccctcaccctccacacccccaaggaggattcgcatgagtaacagcagtgtgccactcctctccgcccactccatcaccaaatccttcggaccgcgcaccgcacgccaccaagtcctcttcgacgtctccgccgacgtccacgccggcgaatgtctggccgtgatcggcggctccggatccggcaaatccacgctgacccgcattatgctgggcttggaatccgcggactccggcagcgtggaatacgagagccaatccattgtcggcggccgaaaatcgccgggattcgcgaccctgcgccgcgaatcgggactggtgttccaggacccgttctcatcactcgacccgcgttggcaagtcgccaaatcggtggctgaaccgctgagtctgcagcgacgtgatctgaacaacaccgatatcgacgagcgggtggtcgcggctctgaccatggcgggtcttgaaccggcggacttcctgaaccggtacccaatcgacctgtctggtggccaggcgcagcgcgtggtcatcgcccgcgccatcatcaacgagcccaaggtaatcctcgccgacgaaccaatgagcgccatcgacgtggccgcgcgcatccagatcctcgacaccttcgccgctatccgtgaggcccggccgagcaccgccatcatcatggtctcccacgatctcggcgtggtgcagcacatcgccaaccgcatcctcgtgcttcacgacgggcgcgtcgaagagacgggtcccaccgccgaagtgctcggcaacccccaatccgattacacccgtcagctcatcgaggcagcctcgttatagacctttttggctcccatccctgaggggagccggccgccggcgacacgcgcttgtcgcgggttgtgctatggtgtgaggcatgcagattatctcatgttgttgtcgctaaccgacgcccctgggcgagcggtcagtgacgcataacttgagatggagcattcgaatcgcggcgaatctgccgcatacttttcatgtatccgatggcacaagcgtaatcgtgtaatgcgtgagccgtggttaacatgaaaaaccggttcacttttcggattcaccgtacagtgagcgggaatactcgattttcaaaccaaagccacagtccattcgtctgggaacgtcggttcacgaacgcaacgcagcaaaacccccacaaccccagcaacgaaggacttcacatgaccatccacaacagcctcgcagaactcatcggcaacaccccgctcgtcaagctcaaccacatcccgcaggcggccggcgtcaaagccaccatcgccgtcaaagtcgaatacttcaaccccggcggctcctccaaggaccgcatcgccgagcgcatcatcgacgccgccgaacagtccggccagctgaagcccggcggcgtgatcgtcgagcccacctcgggcaacaccggcgtcggcctggccctggtcgcccagcagcgcggctaccgcacgattttcaccctgccggacaaggtttccgaatccaagcgcgcggtgctgcgcgcctacggtgccgaagtcatcgtcacaccgaccgacgccggcccggacgacccgcgctcctactaccaggtcgccgaacgactggccaacacgattcccggcggcttccgcccgaaccagtacgacaacccgaacggcccgctgagccactactacaccaccggccccgagatctgggaggctatggaccacaaggtcacgcacttcgtggccggcattggcaccggcggcaccatctccggcaccggcaagtacctcaaggaagcctccaacggcgcggtcaaggtcatcggctccgacccggaaggctccatctactccgcttcctcacgcgacgaagtccaccagtacgacatcgagggcgtgggggaggacttctaccccaaggctttcgaccggaacatcaccgacgacatcgtgcgcgtatccgacgccgaagcctttgaaatgacccgccgtctggccggcgaggaggcgttgctggtcggcggctcgtccggcatggccgtggccagcgccatcaagtacgcgcttgccaatgatttggacgagaaccagattgtggtggtgctcgcccctgattccggccgcagttatctggagaagatcttcaatgacgactggatgcgtgccaacggctacggcgacatcgtggaacgcgccagcaagccctccctcgccgagcagtaccttaacggaactccctctgatgagggagctgcggatggactccataactagctatcaaaagaatcaataccaacatccgcactaactaaccgcacctgttttaccttcgaatacggaacaatcccgaaaggaacccaatatcatgtccgctgaatacaacgccaagttcgccaacaccgacatcgccactcgcgccatccacgccggccaggagcccgacccgaccaccggtgcggtcgtcacgccgatcttcgccacctccactttcaagcaggatggcgtgttgggcctcaggggaggccacgactactctcgctccatcaaccccactcgcaccagcttcgacgagcagctcgccgccgtggaaggcggcaagtacgcgctgagcttctcctcgggcttggccgccatcgacgtgctgctgcgctccaccatcaagcccggcgacaacatcctgctcggcaacgatgtgtacggtggcacctaccgcctgctctccaaggtgttcgtgccgtggggtgtgggcctcgacgtggtggacatcaccgatctgaaagccgtggaaaccgcattggcctccaagcactaccagtatgtgtgggtcgagaccccgtccaacccgctgctcaacatcaccgacatcgcggccaccgccgaagttgcccacaagtacggcaccaaggtcgcggtcgacaacaccttcgcctcgcccgcccttcagcacccgctggccgatggcgccgatgtggtggtctactccaccaccaagtacatcggcggccactccgacgtggtcggcggtgccgtggtggtcaacgacgaggagacccgtgagaaggtcgccttcctgcagaacgccgccggcgcagtgccctccccgttcgactcctggctggacatccgcggcctgaagaccctggatctgcgcgtcaagcgccacagtgccaacgccctgaaggtggccgaatggctcgaatcccagccctctgatgtgattgagcgcgtctggtacccgggcctcgagtcccacccgggtcatgaaatcgccgcccgccagatgcacggcggcttcggcggcatcgtctccgtgcagctcgcggccggtgccgaggcggccaagcacttcgtggaccacacgcagatcttcacactggccgaatcgctcggcggtgtggaaagcctcatcgaggtgcccgccgccatgacccacgcctccgtggccggcaccaccctgcaggtgcccgccaatctggtgcgtatttcggtcggtatcgagaacgccgacgaccttatcgccgatctcaagcaggcgttggatcgtatctgaccgtactgacggtactggtggcaccgtattgacggtgccaccacgcttatcggcggactcgctatcgattggtacctacaaaaaatccccggcccacaagggtcggggattttccgttatcgattgaacatggatcgaatcagctggcgttgccgccctgccatccggtggcatccgcaccagccgggcgcaacgcctgaccggaagtcggtgtggtgccatcaacgaccacacgagtgccgatggtggcaaagtcgtacatccacttggcgtcggccacctgcatgttgatgcagccgtgcgagcctgggataccctgctgcacatagatggggtgctcgccccacatgtatgcaggaacaccgtgcagggcctcgccgccgttatagtaggaaatccacggcgtgcctggctggttgtagccttcgccaaccatggtctgcgattcgtatttgagatacacgtagaacgtgccggtatcggacagcatggaaccatcggcggtgggcttgccagaagcgatgttgaacttcttgaccaccgtggtgccctgatatgcagtggcagtctggttcgtcagatcaacatgaacccacttatcgccatttgccgtatcgaagttatgaggcacctcgacctgcttgacatcatatgggctgtctttcacagccacagtggaatcagtggactggttctgctcgatggcggtagccagacgttcgggggcgtccccggcaccagtcacttcaataccatccacaccgagtgtcttatcggcaccaatttccacgccgccttcgtctttcggcgtgatgtagacctcgcgtgtcaccttgggaacagtcagttctttggttacgctgtcactggtgacgtacttggtgatggcatcgcggtcgactaccagactcatggtgccacccgccttattcaccgtgggcttgaggaatgaggcaatggtatcggccgggatggtgacgctcttgttcacgccgttgtccacggtcagtttgaggccaagcttggcattggcgtcaaactgtgtttgctgtgcgctcgcgtcatcaatcggattctttgcagtctgtagcttgaccggcaccgtcgcattttcgcccggggtcgcgacggcctccttgactgcagcattgacaacattgatatccgggcccttgccatcctgacccgcggtgtaatcgaactgcttggtgctcttgttgtagacaacggtggcaatctgcgctcggtcggcctcatcgaccaggccggcggtgacgaattgttcggcagtctctttgtctctggtggcggtcagagcgatatgcggctgatcgaaaatattgagcttggccacgtcgccggtcttcgcgttcaacagcgcatctacggttttatccgtgtcgacggtgacgccaaggtccttcagcgaggctttgacgctgttgccttcggcggtgaacgtcactgtggtgttattcagctgctgcttcacagtattcgcaagttcttcgcgggtctggcccatgacagagacattgcccaaatgaacaccgggcgcagccttgtcttggaagtaccaacgtccgacgaagaaataggctattaatgcggcaagcaacactgcaaatatggttatgatggcaatccgtgcggccttgccatgtgatttagcggtggtagatgccataacatgttcacccacataggctgtattgtcggcatggttattggtgccattgtcgctttgctgtggcgtggcggtacctgtggccgcggctgcgaacagcccatcggcggccacaggctgcagcaccgccgtctcctgatcgtcaggagaggagaaggaaaatgtatcgttggccataaaatgccccgtcttagttctctcaaagcggcatatcgtgcgatatgccgggaataacgtttcttgacgcataataatacggaagggctacgtacatcgttacgaggtattccgttatacgatgaaatccatccgcggtcggcctacactggtcgtttatgacagcacatcaggcggcgctggaggcgctcacacgatacttcggctatgactcgtttaggcccggacagcaaggaattgtcgaggctttgcttgccggacacgatgtcttgggcgtgatgcccaccggcgcaggcaagtccgtgtgctaccagattcccgccgcgctcagcccgggtgcgactttggtcgtatctcccttgatttccctgatgcgcgaccaggtcgatgcgctgaacgacctcggtctgccggccgcgttcatcaacaccactcaaactcccgacgagcaggcgatggtgttcgcccaagccgccgccgggcagatcaaactgctgtacgtggccccggaacgcttggaaaccgggcgattccgcgactttgccgcccgtacgccgatctcgctgatcgccgtggacgaagcccactgcgtctcccagtggggtcaggacttccgctcgtcgtacttaggtatcggcgatttcatcgccgggctgccgcagcgtccaccggtgggtgcgttcactgccaccgccaccgaacgggtgcgccgggacatcgtgggactgctgggattgcggaatccggccgtcaccgtcaccggattcgaccggccgaacctgtattttgatgtggtcaaactggagaccaaatacaaggccgcatgggtggcgcggtatgtggccgaccatccggacgaatccggcatcgtctactgcgccacccgcaagaccaccgaagcgctcgccgacacgctgaaccagatggggcatccggccgtcgcctaccatggcggcatgtcgccggacgcgcgtgaggtggcccagcgcgacttcatcaccgacaaggtgccggtggtcgtagccaccaacgccttcggcatgggcatcgataagtccaacgtgcgttacgtcatccaccacaatctacccgaatccattgaagcctactatcaggaggccggccgcgcgggccgtgacggcgagcccagccgatgcacgctgctgtggaatgagtcagacatcgtcacccggcgtcggttgctggataacgattatgagaacgagcgattgactcccgaagagcaggagatcgttcgccagtccaagcgccggctgctggacggtatggtcggctactgccgcaccaccgactgcctgcaccggtatatgacccggtatttcggtcaggaattgtcgccgaatgctggttccgcggcgggtgaagacattgcggcggactcttcgcagtccggcagatgcggtgcctgctcgaactgcgaaagcacgttcgagaccatcgacgtgacccgcgtggcgcaggcgatcagccgttgcgtgcatgacgtggggcagcgcgtcggttccggcaagatcgtcaagatcctgcgcggttcgcgggcacaggatctggcatggctgaacccggagcggatgcccaccttcggcatgctcaaggacgtgaacgaggctcgcgtgcgcgacgtgttgagccagatggccacggacgggtacctgtcaatcgccgaagggcgtatgccaatcgtcatgttcggtgcgcgggcggccgaaaccgccgctcccgacttccactatgagatcaaacgggtggaacgcaagtcggcggcggccggttccggtcggagcgggggagtggctgatactgccgattccgccaatgttcccggcgatgcgctgggctcgtatatcccggacgatgacgaggaatcgctgttccagaagctacgcgaactgcgacgcaccatcgcccaggaaatcggcaagccgccgtacatcgtgttctccgacaagaccttgcgcgacatggcccgcatcaagccggttaccaacgcgcaatttctggcggtcaacggcgtcggtcaacacaagctcgacctctacggccagcgcttcatgcaaaccatcgcctcgttcaatgccgggagtgcgtcataacaatctcctatagcgaaccgcggagtatctgcgggcgttcttgggctggcgcgactacgatgactgttcgatacttcatgaccgaacactcagcaagtagaaaggcaacagcatggcagaagacaaggccgaaaagcccgtcgtcgaatcattccagcttgatcacaccaaggtcaaggcgccgtacgtgcgttacatcgacaccgaaacgggccctcacggcgacgtgatctccaattacgatctgcgcctgacccagccgaacgagcaggccatccccaccggcggcctgcacaccatcgaacacaccatcgccgtgctgctgcgtgaacgcattcccggctacatcgactgctcgccgttcggctgccgcaccggcttccacctgctgacctggggcacccactccaccgaggatgtggccaaggcgttgaaggaatcgttggagttcatcgcatacaaggccacatgggatgacgtgcccgccaccaccgagaagagctgcggcaactatcgcgaccacagcctgttcaccgccaaggaatgggccaagcagatccttgaggaaggcatcagctccgacccgttcgagcgcaaggtcgtctgattcgtctgattcgattcaattctgattcggctcccgctggcgggagccgggggcgaagccgactgagggtggctgtcctcaactcggctggactgtccggctcctgcggacgggagtcattgtttattagtgtccgtcatgcaacgcggaggggatttcttgtgcctacggcatggtaggttggccgtcagttagtcgccggtcaccgtgccggcaacccggcatgtcggagaggtgagaagtgactcagtcgaacgctgcaaacaaggcgacaggccgccgtttccgccacgccaccatgcgcgatctgccgcagatgcataaaatctacgcacgcgcacgcgcgttgatggccgccaacggcaaccccacccagtggggcaacgaatttccgcgtgaatcggtgattgaagacgacatcgccaaccagcgtacgatgctgctggtcgacacctgcaatggccacgaacgcattctggcccagttcgccctgtgcccgggcaaggatccgacctacgccaaaatcgacggcgcctggctggacaacgacacctatgtgaccatccaccgcatcgccgcatccggtctggtgcgccacgcggcccgcgactgcatcaggtgggccctgaagcactacggcaacgtgcgcgccgacacccaccccaataacaaggccatgcagcacgtgctcgaaagctccggcttcgcccgttgcggcctgatccagctgctcgaccggccggtcgacaccaccagaatcgcctatcagcgccacgagtggtgagtgtggctgccggctgatgtgttcgtttctgcggtggagccgtcgggcctccattggcgttcattgctcgtccggtgtatccagtgcgctcaggtccactgtgaatggcatcgaatcgggtggctgctcgggttcgaggaacatggtcatgtacagcggcagataggtgatggccccatcctggcttatgttgcctttgcatagcacccaggcctggtcgatgttccattcgtccacggcgagcacgttgtccaacgccttgtgacgggtccagtcgttgccggacttcacctcgaccggcgtgacccgggtgcccgactggacgacgaagtcgatctcgccgtatttcttggcgtcgaagtagtgcgcggcatatccgtgggcggtcagctcctgggccaccacgttctccgcgattgatccgaggttgacgtcgagctcgccctgcaggagtgcgaactggatgttgcccatcgacgccgcgcacagcagaccgacgtcgttcatgaacagcttgaacaggctgtgcttttcgttggccgcaaggggcgcggtcggcgaggacacgttatagcaggggagggccgcgcccgcgtccgcgagccataggaagctgctggcataccggttctggcgggcgttcttgctcaggtcggcgagcacgaacctgcggttgcggtcatcgagctgggaggggatggcgtcgaagatcgcgcggatcttcgttcggtccgatcgctgcgcgtatttggcgatgtcgagccggtagaggtcgagaaggtcgcgttgcagctgcgaggtctgcgcgatgtcatgcgtgtccacataccgttggaccacttcgggcatcccgcccaccacgatgtaggcgcggaacagcctcatcatcgtctcgtgcacggcgacgctgacgggagtacggcttcggaagtgcgtgcgcagcaagtcgatggtggatcgctggacgccattcgccaggcagaactcctcgaaatccatggggaacatgcgatattgctcctcgaagcccaccggataggacggcacgtccctcacgcgcacgccgagcagggatccggtctccacgtaatcgaaccggccgtcctccacgaggaatttgatggcggtgcgggcgcgcgggcactcctggatctcgtcgagcagcacgagcgtgtcgccgggctccaacggcgtgcgcagatatgcggtcaagttggcgatgatggtcttcgcgtccaacggaccgtcgaagatcgtcgaggcgttgggatcggtcaggaagttcagttcggcgaaatgcccgtaataccgcccggcgaactccctgaccaacgtcgtcttgccgatctgcctggccccggtgagcatcagcgcatgcgacgaggccccattggccttccaaacgaccagtcgatcccatgccttgcgatacagcatctacgcccctatgccatcatatgtcttgtaacgtttttcttaataataacacgtcatctgtcacgtttttctaaatcatgatgatgtaattgtcacgttttgtatatttcaaatagtatcagcgccacgttttacgcagctatccggctaaatcaccggacgcggggccacgagggcatattgccgaaggcgtcgctgcggttcttgctcgcagatggccaggatgcgggtaagaccctcatggccgtcaattcgtccgtgtcaggccgactggaaccggaacatgacaccgtcaggtagatcgctcacgccttcgaccgcatcagacccgccgattccatacactcgttcgacaagcggcggaatgcctattggaatcgaggattcatgccgttcgtcgtaatagggttgcggcggtagtagctcgccatactgcttttactgattacggtattgcatggggcagaggccgacaatccgttgcgagcctcaatccaaggtgtttcactgtgggtgcgcgcactaagctgattgccagtaagcgctgcaagtgcggaacatgcggcatcgataacacgctgttccgtacccttcaacatactcggatctgctcgtagttcgccgtcccgaatgaggaactttccgcggtgctgcgagtagagggcaacgcacacggggcctccgcgccatgcttggaaatcctcctcaaaaagaggagctccataatgagacaatgactccgcttgcgagtaaaaggccagtttttgcagtttcattgtggtcatcggaccatattcgcgaagaatataggccgcaacatcgataatggttgccatggtgctcctcctttctaagggttatattgtagagcatggcttcagacaacggcattgcgcgcatcagtaggaatcgggccaatatggccggccgaatgctgagtgccggattgcagcatgatgatgctgacgattatgcgcaagcgatgctgattgcccaacagtggcgtgcccagcatgtcaagccgaccgagcagtgcttctcacaggtgttggcatgttcgcagggcatacagcattccgtggcaacgtttcggatgaagcgcatgatttccatcgtgcgcaaaattcaacggcccgatacgcatttcaaacttggcgaattggacgatatcggcggttgccgattgattgtggaatcaaacgaacaagtacagcgcgcggccacatggcttgccggaaaactgccgttgaagaatggctccaccgataaggactatatcgaacacccacagtccagcggataccgatcaaggcacctgctgtgtaacgtcaaatccgattccgcctcataccatgtggaggtgcagattaggacacgtttacagcattgctggtctaccgcagttgaggcagcgggagaaatttatggcacagaatacaagagtccggctgtacgggcagtcgccagtggcgatgatgagcggcggttgcgtttcttcagacttgtatccagtctgttcgcgttggaggagtgcacaccgttggtaccgggattcgccggaacgtatgagtccttaatcagacagttgtgtgacctcgactgtacgcaaggaatattggacgatctgagcgctgcgatagatagcgtgttcgtcgtagagatgccggaaccttcggcagagttgttcttgctgaagctctccagagagagccagtatcttgatgtcgaggcgttttcggcggaggagctggacaaggcgctccgtagatacgatgacgtagagcagcatatcaagatgtctggcgcgattgatgatatcagcagcgaaaccgagtatgacaatgccgtgctggtgtatgcccgcaatgcagagcagcttgccattgcatatccgaactattccacgaatgtgcggtattttcttgacaaagtaaaatcgtatttgagatagcgtcgaccgtcacaggaattgcgggtgatggccaatctccctaggccatggtggtgcccacaccggcgggatcaactgtccggtctggcatcctcgagtgttccaacggcggaatgatccgcggcaaggcccgctatttctccagcggccagtcgaggatgctgacctgcttgatgccggcgaagccaccgcctccgatgcggtccatggtcagcagcgtcttgggatggttgtcggcgatggcctggtcggcgttcgagctggtcaggtaaggtccacgtcgtcgcgcacgtacagtccgtcggccgcccgttcaaactcgtgcatatcgcaaaaaccgtacgctgaaagtaactcagcgtacggttttcacgaaagcagccatcgactatcggtcagccgatagacctcagtcctcagtcgcagcgaccttggtgtcagccccggccttctgctcaaggccgagcttggagcgcttgcggctgtagccgaagtacacgatcaggcccagaccgaaccagatggcgaaacgcacccaggtctcccagttgagaccggcgatgagcacgaagcagaatacgatggccagaatcggggtgaccggcacgcccggcgcgcggaagccgcggggcgcattcggctgggtcttgcgcatccatagaataccggccgacacgatgatgaacgcggacagcgtaccgatgttcaccagctcgaacagcacgttgatgttgatgaagccgccggcgaacgcggtcagcagaccgaagaaccaggtgcccttgaacggggtgcggtacttctcgtgcacgtggccgaagaacttcgggaacaggccgtcacggctcatggcgtagcagatacgggactggccgtacagctgtacgagcatcaccgtggtcatgccgatgagggcgcctaggttcacgatcaccgcgagccagttcatgccggtctccagaatcacgccggccactggggcgtcgatgtacttggcgaactccttgtagggcaccacgccggtcatgatcatggtcatgacgatgtagagcacggtggaaacggccagggacagcaggatgccgcgcggcagtgtcttgttcgggttgatggtctcctcggcggaagaggacacggcgtcgaatccgatgaagctgaagaacacgatggatgcggccggcacaatgccgtacggctgggtggagccgggctggaaagtgtagatgccgtacggggagaacggctgccagttggacggcttgacataccacacggcgcacacgatgaacagcacgatgatggcgagcttgatgagcaccatcacgtcattggtgcgcttggtctggttgatgccgatcgagagcacccacgtgatgatcagcacgatgacgaaaccgggcaggttgaagtaggtggtgacgtccgggttggtgccgtaggcggcggtcagctcgaccggcagatgcagtccgaagccttccaacaacttgttgaagtatcccgaccagccggcggacacggtggccgcctgcagagcatactccagaatcagatcccagccgatcacgaaggcgatgagctcgccgaacgccagataggcataggagtaggccgagccggacaccggtgccatggcggcgaactcggcgtagcacaggccggcgaaaccgcagcagacggcggccagcaggaacgatacggacagggccgggccggcggtgagcgcgcccttgccggtgagcacgaagataccggtgccgatgatcgcgccgataccgagcatcgtcagatcgaaggtgcgcatcgtgcgcttcaggggagtggattcggcgacaagctgatccacgcttttcttacgaaacagatccatgttcttctctcatgaaacttaagatatggggctagaccggacggatttccgggatcccggcacgcctcaacgccgggaatcaaaggcggcttccgagaaaccgcatatcggtcattagtgtacgactgccgggcgaaaacaaacgattatgaccacacgtcacattcctgcgcaacaataggtgcctatgagcatgaacgcagcacccgaaatcgcattctcgtccgagcagggcaaggccaactatgcggccacccgccgccaataccccgcacaggccatcgtgaacctcaaaaccatgcgcgacaacatggcccacctggtctccgtggtcggcggcccgaactccggcacggcggtgatgggcgtggtcaaggccgacgcatacggccacggactgctgcccgccgcactggccgcgctcgccggcggcgcgacatggctcggcaccgcgcaatcgcatgaagcactgctgctgcgcaaactcggcatcggccccgaccgttgccgcattctgacttgggtctacaacggcaccgaag

SEQ ID NO: 2180 - DNA, 4008 bp, Unknown
  R51_24m  MAG No. k141_17899
aacggctacctcaaggtcgacgcggacaccgccgtgaagaacctcaccaaggcgctttccaccggtgtgctcaagatcatgtccaagatgggcgtctccaccatcatgagctaccgtggcgcacagctgttcgaggctgtgggcctgagccaggaagtcatcgacgaatacttcaccggcaccacctcccgtgtgggtggcgtgggccttgacgagatcgccgaagaagtggccatccgtcaccgcgtggcctacccgaaccagtggagcgcatccccgcaccgcaacctgcgcacgggcggcgactacaagtggcgtcgtaccggcgaggaccacctcaacgatcccgaggccatcttcctgctccagcagtcgacccaccgtggcgactaccagatgttcaagaagtattcgcaccacatcaacgacacgtcgaaccgactcatgaccctgcgtggcctgatgaagttcaacaacaaccgcaagccaatcgacatctccgaagtcgagccggcctccgagatcgtcaagcgcttctccaccggtgccatgagctacggttccatctcacaggaagcgcacgagacgcttgccatcgccatgaattcgattggcgcacgctccaactccggtgagggcggcgaatccgacgatcgtatcaacgacccgcagcgctacagccgcatcaagcagatcgcgtccgctcgcttcggcgtgacctccgattacctcgtgcacgccaccgatttgcagatcaagctcgcccagggcgccaagcccggtgagggtggccacctgcccggtgccaaggtcccaccgtggatcgccaaggtccgtcacgccaccccgggcgtggagcttatctccccgccgccgcaccacgacatctactccatcgaggatctgaagcagctgatcaacgatgcgaagatggccaacccgaaggcacgtatccacgtcaagctcgtttccgagttcggcgtcggcaccatcgcggccggtgtggccaagtgccatgccgacgtggtgcttatctccggctatgacggcggtacgggtgcagccccgctcaacgccatcaagcacgccggcaccccgtgggagatcggcctgtccgaaacccagcagacgctgatcctgaacggcctgcgctcccgcatcgtcgtacagtgcgacggcgagctcaagaccggtcgtgacgtggtcatcgccgccctgcttggtgccgaggaattcggcttcgctactgcggccctgatcgtggaaggctgcgtcatgatgcgcgcctgccagaagaacacctgcccgcagggcattgccacccaggatcctgagctgcgcgcccgctttaagggcaagcccgagtacgtggtcaacttcttcatgttcatcgctgaggaggtgcgcgagatcctcgcccagctcggcttcaggactcttgaggaggccatcggccacgttgagtgtttggatcaggatgaggccatcaagcgctggaagtccggcggcatcgacctgaccaacgtgctcaagcaggccggcccggtacccggcacgatcctgcaccagaccatcgagcagaaccacgagctggagaaggcactggacaacaagctcatcgaacttgcccagccggccctcgaacacaaggaacccgtgcgcatcgaaatgccgattcgcaacgtcaaccgtacggtcggcaccatggtcggctacgagatcacccgccgttacggcgaggaaggtctgccggacgacaccatcgacatgaccctgcacggttccggaggccagtccatcggtgcgttcatcccgcgcggcgagaccatgcgcatctacggtgaagtcaacgactacgccggcaagggcctgtccggcggtcgcatgatcgtgcgcccggaagacaccgtcaccttcgacaagcacagcaacgtcatcgccggcaatgtcaccggtttcggcgccacttccggccagatgttcgtagccggtcgcgccggcgaacgtttcggcgttcgtaacggcggtgccacgttcgtggtcgaaggcgtgggtgaccacggctgcgagtacatgaccggcggcactgttgtggtgctcggccccaccggacgcaacttcggtgcaggcttctccggcggtaacacttatgtgcttgaccttgatatgaagaaggtcaacccgggtgccatcaagtccggtgcactgctcttcaagtcgcttgatgccgaaacctccaagctggtgtacgcactggtcaagcagcatgccgaagagaccggttcccagttcgccgcggccctgctggaggactggaacgaaaccgtcaagcggttcactcacgtggtgccgaagcagttcgtggccatgacgaaggccatggaagaagccaaggccaacaatgtagatttcaatgcgcccggcacctgggaaaaggtgtacgagcaggttatggaaggagcgcgctgacatgggcgacccgagaggattcctgaaggtccgtacccgccgagagttggctgaacgccccgttgaggagcgtatcaaggactggttcgacgttcacgccgaaaccggcctgcaaccgtggacccaaacgcaggcggcccgctgcatggattgtggcaccccgttctgcatgaccggatgcccgctgggtaacctgattcccgagtggaacgacttggtccgtcagggcaagtgggaagacgcctacaaccgtctgtccatgaccaacaacttccccgaagtcaccggccgcatctgcccggccctgtgcgagcaggcctgcgtgctcggcatccaccagccgccgaccatgatcaagcttgacgagcagaccatcatcgaccaggcatgggatttggactacgtcaagccgctgccgccgcagcgtctgaccgaccagacggtcgccgtcgtcggctccggccctgccggcctcgccgccgcacagcagctcacccgcgccggccacaccgtcgtcgtctacgagaaggacgacgccatcggtggtctgatgcgttacggcatcccgaacttcaagcttgagaagggtctgcttgaccgccgtgtcaagcagatggaggccgaaggcacccgcttccgcaccaacgtggaaatcggcaaggacatcacgtgggatgacctgcgtgaccgttacgacgctgtcgtagtggccatcggctcccgcgtgccgcgcgatatgaagattccgggccgcgagctcgacggcatccacttcgccctcgacttcctgcccgacgccacgcgccgtatcttcggcgtcaagccggtgcacgacatcaccgccaaggacaagcacgtcatcgtcatcggcggtggcgacaccggttccgactgcctcggcacctcgatccgtcagggtgcgaaggacgtcaccgtgctacagatcatgccgaaagagccgtcaagccgtccggacaacagcccgtggccgaccttcgcccgcacctaccagaagacctcctccatggaagagggcggcgagtacatctactccaccgactccgtgaacttcgagggcaccgaagaggagaaggccaaggtcaccatcgacaactcgaccaccgccgaaggcttcgtggccgatgagcgtggtcatgtcaccggcttgaaggtcgtctccgtggctcccggcgaaaatggtccgttcactcgccagcctggcactgagcgcgtgctgcccgccgatctggtcctcatctccgtgggcttcctgcacccggacaccgagaccatcctcgaccagctgcccgtcgaactcgacaagcgtggcaacatcgctcgcaatgacaagttcgccacctcccaggatggcgtgttcgtgtgcggcgatgccggccgtggccagagcctcgtggtctgggccatcgccgaaggccgctcctgcgccgcagccgtggacgagtacctctccaaggaaaagagcgagctgccggccccgatcaaggccagccagcgtccgatgatgctgcctcgctgaat

SEQ ID NO: 2181 - DNA, 6927 bp, Unknown
  R51_24m  MAG No. k141_19031
agtgccggaggccaacgaggaaccgggctcgttgaagccgacgtggccgtcggtgccgatgccgaggatctgcacgtcgatgccgccagcggcttcgatggcacgatcataggccgggccggccagcgcgactttgtcgccgtcttcgagcggagtgccgttgagtacgtcgccgggcacatggaccttggccgggtccaggccaagcggttcgaccacggtgcgatggatggtcgcatgataggactcgggatgggtcagcggcagcccgatgtattcgtcaagcgcgaaaccacgcacgcccgaaacgtcaatggcctcgtccttgacgatcttggcgagcgcctgataggcggccagcgggctggagccagtggccaggcccagcacggcgtccggctttgctttgatcaggtccgccacgcaacggccgtagatctcgccggcctcggcttcgttcttgacaatgatgatttccggcatcggtttcctccagttccgtgcggcccgcccgatgcgagtcgctgtaccgccgcccgtcttgcggataatggcaacatccttgtcacgtccgggtgatgtgcggcgttccaaccaccgttcggcatagtgccgattggcgattcgctatttgttaatgatactaacaattttggaccttgtgaacactcacggtgtttcctgacgcttcgcacaggtacactggaatttattagtgaagtttcataacagtttcgacgacgaaattgcgcttcaccgtctaagctgtgtacggaacaacaatcgccgtccactcgctcgccatcaggcaggaggaaacatgccatatctcggtctcaacacaacgaccgacgaccatgaggccaaggcctcccccgccgatgtgcgccgcaagaaccgccaactcatcttcaggttgttgttccccaccaaccagtattcgcgcgccgagctcggccgacgcaccggattgagccgcgcggccgtttccgatgtggtcggtcggatgctggaggaaggattgctgcgcgagaccggtcaggcacccagcggcggcaaaggcaaacgaggcacactgctgagcatcgataccgatcgactgcgcatcatcagcatcgacctgacgcaggagcacctgctgcacggtgcagtcaccaatctgctcggacagccgctacgccacgccgaagtcaccctgaacaccggctcattcgtttccgtggatgtgatcatcgaacttatcgagaagatgctgggcatgtccgatggcgaggtcatcggcatcggagtctcctcccccggcgcggtagacaacggcgtggtccgctcctccacgatgcgcggctggaacaatctcgacctgtccacaccgatcgccgagcattttggacttgaagtaaacgtcagcaacgacgccaccgcagccatgctcaccgaacgtttcttcggccaaggcgggccgaatatgctcttcgtgcgcatcgaaagaggcatcggctcggcgattctgctctcggacacgcctgtaatcggcgaactgcatgcagccggcgaaatcggccatatttccatcgatcttgatgggccgctatgcccttgcggcaagcgcggctgcctggagacgatgatttccggaaccgcattgaaaaagcagctcagcgcggcagacgtggagcagcatcagaatatcctcgctcgggcgggccgctatcttggccaggccctgtccatgcctgtgggccttttggatatggcagacgtatgcgtctatggccagccgaacatcatcaacgcgacgttcatcggcgcggcccagcaatatctggatgccgccacatcctcgtccttccacaaacacacggtgatccggcgctgcgaatgcggacccgacatcaccgtacagggcgaggccatcgccgtgatcttccaacacatggccaaataaaagccggtcaccccggcaacgaaacgcgcaagaccaaacgcggcacagcgcgacataaagcgatataggactgcgtggaagatggggcctcggagacaaatccgacgctccatcttccacgccccggcactatgccaggctacgccgccatggcggcaccaatggctccgaccggttgatcgacgggtgccagacgcagccgggccggcaggtccagcgtttcgaggaatcggcattgcgattcacgccggcgcagctcagccgcgatcacttcaaccaatggttcgccggttttggccataccgccgcccaagatgatgagtcgcggatcaacggactgagccaggatttgtatggtgtcgccgatggcgcgcactaccatgtccagcacatcgacggcctcggcctcccgctttttcgcgcgacgaatcaggtcgggcatcggcgggtcggcgttgggccacagacgccccacggatgcgcccgagcagacggtttccaagcatccatattgcccgcaagggcacttgaggcgatgaggttcgactgggatatggccgatttcgccggccgcaccgctatagccatgcatcagcacgccgttttcgacaatgcccgcagccagtccggtgccgaagttcaggaacgcaatggtaccggccatgccatccgcaccgcccaacacggtggccgcgccgacggcggcggcgttgacgtcgttttccacatgggccggcacgcccgaacgctgcgagaccaacggccccatatccagcgagaccacgtcgagattcacgatattgcccacatgcccgctggccgaatccaccgtgcccggggtaccgacaccgatggccctcacctcgtcaaaacgctcacccgccgcctgatgtgctacagcgacgatgtcttcgatcacggcatcgttgccatgcctggcgggaatacgggcggaacccaataccgtgcccattgcgtcaaccagcacagcttcgatttttgttccgcccacgtcaacaccgattttgagattgttcatagtgttttcagacatcagtcccccctgttcttcatcgaacgtttcacttgatatcagtgtgcatccgactattgacaactatcttaacaaattcacccatgacgacactcacatacacgacacgccgaatgacatattgattgcgtcaatcaattaacagcgttaatatcttaatcaagttcagattcaaagacgagtggaacaactcgcagcggtgcagacaaagaggacttaagaccgatggcaacaaacaccacccatgccacttcccaggccagtgtctccgaatccaaccgctcccgcatcgtcaagcacctgtatcacaacggcatcagctcccgcgcgcaaatcgccaaggcactggaactcacccccgcggccatcaccaaaatcaccgcacgccttatcgaggccggcatgattgaagagaccggcgatttggaaggttccaagaaccgccgttccatcggcctcaaactcgacaccacgcggttccacatcatcggcatcaaattcgcccgctcgctggtgcagatcggcgtgttcgacctgtgcggcaacaccctgggctctgaaaacctgcccacggtgtacgacaacaccatcaacgacaccgtcgtcaccatccaccagcgcgtcgaacaactgctcgacaacgacccgtccatcgaggctatcggcatggcggtgcccggcccctatctgcgtaacgtaggccgcaccgccgtggtgtccagcatgcagggctggcgcaagatcaacttcatcgacgaattcgccaccgctttccgcgtacctgtgttcatcgaacaggacgcccgcgccggagtcctcgcacattatctcttcgacccgtcggtgcacaccgacggcaacctcgcctattatctggtcggcgaaggcgtgggcctcggcgtcatcgacaacggtcgtctcatcaacggcttcctcggtgccgccaccgaaatcggacacatctccatcgacgtcaacggccgcccctgcgattgcggcaacgtcggctgccttgaacgctactgctccacccccgccattcacgacatgctcatcgccgatggcaccgtggttcccggcgcggccgatatgacccacaccgaagccgcccgcgccctgttcgccaaagccggcgacggcgacgaagcggcaatcgccattgtccgcgaagtcgcccgatacgtcggctacggatgcgtcaccatcttcaatggatacaatcccgagcacatcatcatcggcgacatcgtgtccgaagccggcccgatactgctcgatgaggtgcgcgccacggtggccgaacgggccatccccgaaatcaatgcctccacttccatcagcctatccaccctgtccgccgacgcggcggtctccggtgccgcagcagtggcggtgacccaattcctcgaacacccctcggtgttcttcgacgtctcctaaaccaagcgccgacatcacaagatgttccatacgaaacacccggtaaaagaaacaaaggaaaggaaaccaaccatgactaccccgatcgttctgagcctcggtgaactgctgtgggatatgctgccgagcggcaagcgagccggcggcgcccccgtcaacttcgcctaccacgcgatgaagaacggcaccgaaggctgggctatcagcgcggtcggcgaggatgaactcggcgacgaactgattgccaaggccaacgaggccggtatcaacaccgtcatccagcgcaacgcctggccgacctccaccgtcgaggtcgcgctgaagaacggcatcccggagtacaccatcgtcaagggcgtggcttgggaccacatcctgtacacccgccagctcatcgacgtggtctccaaggccgacgctgtctgcttcggcaccttggccctgcgctctcccgaatcgcacgccaccatcacggagctgctcaagcacaccaagccgggcgcgatgaagttcttcgacatcaacctgcgcggcgaccactactccaaggacctcatcgaggaactcctcaaggcggccaccgtcttcaagatcaacgacgaggaactcctgctgctgcgcgacatgttcgacatccgcggcacctccggcgaagacgcctcccgctggttcatcgaggaattcggccttgactacgtgattctgaccgccggctccgcctactccaccatcatctcccgcaagggcgaggtctccacgctggacactccgcacgtcgaggtgaacgacaccgtgggtgcgggtgactccttctccggcaccttcaccgcccacatcctgctgggcggcacgctggcagaagcccaccgcaaggccgtcaacaccgccgcctacgtctgcacccaggccggtgcctggccgcagtacccggccgagatgcccgactatctggctgaaatcggcaagtaatccacccatccccttatccgccattcgtgcgacttcacgaatcgactgatcgcaaccggtgagattctccgaacaggaaatctcaccggtttttcatatggtgcgctcacactcatgctctccacatcctttcgcgtgtcatgaactaaagcggtttagaataatgctgttcccttgatatgtatatccctcaaacaaagaagttgaatttatgacgaccaccgcgataccgaagtcggtctcggatttcatgcagcacatcacggacctgtgtggcaccgaacacgccgcctgggccgagaacttcaacgcctgctttgccaacaccctgaccaccacggtcaaacggcatgacgacggcaccacattcctgctcaccggcgatatcccggccatgtggctgcgtgattcgaccgcgcaattgcgcccgtatctggcccttgccgccgaagacagcgatattgcgaacctgatcgccggtctgatacggcaacagttccgctacatcatcatcgacccgtatgcgaatgccttcaacgaggaaccgaacggcgcctcctgggacaaggacgaccggtccgatttctccagcccttggctttgggagcgcaagtacgaggtggattcgctgtgctaccccatccagttggcttggatgctgtatgcgaacaccggcaacgccgatcacttcgatgccgaattcattgccggcgtcaagaagattcttgacgtcttcgagaccgagcagcatcatgaacgctccccgtatttcttcatccgcgacacggacatccccaccgaatcgctgagcaatgacggcaaggggtcgccagtggcgtacaccggcatgacctggtccggcttccgccccagcgacgacgcctgcacctaccactatctggtgccctcgaacatgttcgccgccgtggtgatgggctatctggaacgcatcttcggcggtgagattctggatgacgccgatatcgccgcccgtgccggcgagctgcgccgcaccatcaccgaaggcatcgaagcccacgccaaaacgacgaaccgcaatggcgagacgatttacgcgttcgagaccgacggcctgggtcacgtcaatatcatggacgacagcaatgtgccctccttgatggcggccccttacttggggtactgcgcaccggacgatccgacgtatctggcgacccgacgcacgctgctcagcgacgaaaacccgtactattacgagggcgagtatctcaagggcatcggctcaccgcacaccccgccgcgctatgtgtggcccatcgccctgtctatcgaggcgatgaccagcgacagcaaggacttcaaggcgcatatcctcgaccgtcttgtaaccaccgacgccggtacacatctcatgcacgaaggcatcgacgtggatgatccgaccaagtacacgcgcgaatggttcagctggtcgaatatgatgttttgtgaactggtcatggactatttcgacattcgtgtgaagcactaagacgtgccc

SEQ ID NO: 2182 - DNA, 13646 bp, Unknown
  R51_24m  MAG No. k141_19438
atcatcgaagccagcgacgaactcgtagggctcgtaacccatgccgtggaagaactcgtggagctcttcgtcggagatgcgggacaggatggtcgggttggcgatcttgtagccgttgaggtgcaggatcggcagcacgataccgtcggtgcgcgggttcacgagcttgttggactgccaaccggtagccagcgggccggtctcagcctcgccgtcgccgacgatggccgggacgaacaggctcgggttgtccatgatggcaccgtaagcgtgggacagagcgtaacccagctcaccaccctcgtggatggagcccggggtctccggagcgaagtgggacggaataccgcccgggtaagagaactgacggaagaacttctgcagaccagcttcgtccttggtgatcttcgggaaggtctcggtgtaggtgccgtccaggtaggactgggaggtaccggccgggccaccgtggcccgggcccatgatgatcacggtgttctggccgtggtcagcaatgaaacggttgatgtggccgatgaggaagttcaggccaggggtagtgccccagtggcccaccagacggtgcttcacatcttcgcgggtgaagggctccttcatcagcgggttggaacgcagataaatctggccgatggaaaggtagttggcaacgcgccagtacttgtcaacgccttcgagggcttcctcggaaaccggagcgttgagcttcttccaaggggtgccaataacaggactcgtcatgtgtactcctgtactcctgcacgtgatcgtgcgattgattatttctgttcggtcacggttcctgacccttgcggtgccaaggttttccgttcccaatcaatcgtcatggtacgaggacaacgcgacttttgaacgatttcttgcgggtgtgttcgaaattgttgcggaaatttcagtatttgtgcggttcacctgaccgtttgtcaacattagttttttcaacatactttttcagaacggcggaagcatgcggaaatctagcatctgactagaacagcgcacgttcgatttcccatgttcgaaatcggcgtgttgtccgactacaggcatgtagtttgttcgatttgcgcacatagtccctgcgtgtcggccttgtcgccttgaccagtgataatcaggggtgttcagcccacgtaaaattccaatgaacgttaggggaatatcaatggcaaacggtcctgtgcttgtcgtcgacttcggcgcccagtacgcccagctcatcgcccgccgcgtgcgcgaggcaggcgtgtactccgagctggtccctcattccatgccggtcgacgagatcctggccaaggatccgaaggcgattattctgtccggcggcccggcctccgtgttcgagcccggcgcgccgaccatagataccaaggtattcgaatccggtgttccggtgcttggtatctgctacggcttccaggtcatggcctatgagctcggcggcaaggtggataaggccgctctcggcgaatacggcaagacctcagccaccatcgacgacgccgacggcatcctcgccgactcccccgccgagcagaccacgtggatgagccacggtgtggcggtcgaacaggccccggccggcttcgaagtgctggcccacaccgaaggcgcgcccgtggccgccatggcggacgaatcccgcaagctctacggtgtgcagtggcacccggaagtcaagcactccccgcttggccagaagcttatcgaaaacttcctgcaccgttgcgccgcgctgcccaacgactgggacgcctcctcgattatcgaggatcaagtcaagaagatccgcgagaaggtcggcgacgccgaggtgatctgcggcctgtccggcggcgtggactccgccgtggccgccgctctggtgcacaaggccatcggtgaccagctcacctgcgtgttcgtggaccacggcctgctgcgcaagggcgaggtcgagcaggtcaagcacgacttcgttgccgccaccggcatcaagctcatcaccgtggacgcggccgacgacttccttgaggccctgaagggagtctccgagccggagcgcaagcgcaagatcatcggtgagaagttcatccgcacgttcgagaaggcccagcgccaagtgcttgaagaggccggcgcgcgcggcaaggaagtcaagttcctcgtgcagggcaccctctaccccgacgtcgtcgaatccggcggcggcgacggcgcggccaacatcaagtcccaccacaacgtcggcggcctgcccaaggacatcaagttccagctcatcgaaccgctgcgcactctgttcaaggatgaggtgcgcgccatcggcaccgagctcggtctgcccgacgaaatcgtctggcgtcagcctttcccgggcccgggtctgggcatccgcatcatcggcgagatcaccaaggagcgcctcgacctgctgcgcgaggccgacgccatcgcccgcgaggagctctccaaggccggtctcgaccgtgacatctggcagtgcccggtcgtgctgctcgccgacgttcactcggtgggcgtccagggcgacgagcgcacctacggctcccccatcgtgctgcgtccggtgagctcggaggacgccatgaccgccgactggtcccgtgtcccctacgatgtgctcgccacgatctccacgcgcatcaccaacgagtgccgccagatcaaccgcgtcgtcctcgactgcacgtccaagccgccggccacaattgaatgggagtaattgctctctgtgacgaatgggattctccatcggggaatcccttttttgttgccgacgatgcccggtataatttttccgcttacgacgtcgtccggaaagggatgccgacctctttgcgccagggattcgacaacgaaaaatacatcgaactgcaagccgccaacatctcaacagcgtgaaccgacgcttgcactcggatgaaacgctgattgcattgtcaatcaccagcgccaccagtcctgtggccgctcgcgtcatcgacgggctcaaacagttgcagggctgcgacgcctttttctccgttatcatctcatccacggacgaggcgttgtatcgcaaactcggcatcaacgtgtgctgcgaaccgaagtacgaacgggtgagtctgtatcaccggtaaacgccaccgataagcgcggtatgccgcgaatcgtcaagccggtaatcatgcagcatgcggcctgacgattcgctgctgtcgcattgtctctcccctcgaccatgctgggcttgttttccgtttgttggagagaacgggggatgccattagcactacggtgagagaaggattatccgtgaatcggttcgtgggtctagacggtattaaaggactggcgctgatagccattgtgctgtaccactgcatgcagcaactgctgccaggcggattctacggagtcgacgtgttcttcaccgtctctggattcctgattgccgtcagtttgattcgttctctggcgaaaaccggatcgctgaatctcgtgcgatatatccccaagcgtgcagtacgtctctatccggcgctgtttctgctgattccggtcaccgtctccgtcggctggctgctcgatcacgacattctggtttccatccgcgatcaggtcatcaccgtgctgctgggctgctacaactggtacgccattgccggaggccaaagctatttcgaccaaatgaacccgcaggtgtttcgccatctgtggttcattggcgtgctcatgcagttctacgtcatcgtgccgttcatcgtctggctgatgtggaagttccgccagacgaaactgccctcactcatcccactgggactcgcggcgttcagcagtatcgccatgtgggtgatgtacgtgcccaagggcgaccccacccgcgtctacttcggcactgatacccacagcatgggcctgatgctgggtgtggctctcgcctggtgggtcaccgctcctcagttgggccacgctcgtcagggagctgtgccgatgccccgcaccattagatcgagcgctccggccgccacgtaccgggctccgttacctcagattcctgtaaagcatcgcatctggaatgcgacggcaccggtattggcattcctcagcctgattgccttggtcaccatgacggttatcggcaaacaggatgcattcgccttccgcggcggcatcatattgtccagcctgttgtccgtgctgctgattgccggtaccatctccgacgattcctggatgcaaagcctcatggtgttcaagccattggccgccctcggcaagtattcgtacggcatttacctgtggcactggccgttgtggattctttccagcgcccttgccccgaagatcttcaaggcagtagggccttggcctctcatcatgaccgcgttgctcaccgccattgcggtgatgatttcctggctgatggtggagaaaccggcggcaatgcactcggtgatatccgtcgtggtgccccttcgcacgaacaagaagaatcatgcggcccgggttattgccgttgacgttatcctggcgctgtcgttggtcggctgcgcgcagggcattactcatgcacctgcgaaaaccgccatgcagatccagctggagcaacaggccgcacaactggaacgcatacagaaaaccgaacacgtgctgctgcgccatgccatgccggcaccgcccaagcccaagcatgagatgcccaccggcgatcagattaccgccataggcgattcggtgatgctggcctcatcacagggcctttcggaagtcttccccggcattcagaccgacgcgagcgtttcccgctccatcatggtcgcccccgaactcatcggcaatgatctgtccgccggcagtctgcggcaatgggtgctgatcggccttggcaccaattcggcaatcacccctgatcagctggaccagattcgtaatatgatcggccccgaccgcgtgctggtactggtcaatgcccacggagaccgtacgtggattccacctaccaaccaggtgcttgccgactatgcggccgcacatccggacaatgtggtgctggtggattggaatgccacagccaacgcgaacgcgcaggtgctcggctccgacggcatccacccgagcatggatagcgatatctatgcaaaggcggtcaaacaggccatcgaacaatggatcgcaagcggcaggtgaacggcaggcaacgctgagttgtccaaccggtcgtgaagaacggctatgctgaagactgcatcaacgagaccacacgttgggagacatggtgagcgcaatccttgaagggaagcccgataagaatcttattctcgttacgggaaggatccatccgaaattggctgaggatgtcgccgagcagctcggcatcgacgtccttgaaaccaccgcatacgatttcgccaacggcgagatgtacgtgcgctacaccgaatcggtgcgtggcgccgatgtgttcgtgctgcaaagccactacaaacccatcaacaaggcgatcatggagcagctcatcatgatcgacgcattgaagcgcgcctcggcccgttccattactgcggtctgcccgttgctcggctactcccgtcaggacaagaagcaccgcggtcgcgagcccatctcctgccgtctggtgttcgacctgctgaagaccgccggtgccgaccgcatcatgtcggtcgatctgcatgccgcgcagtcccaaggcttcttcgacggcccggtcgatcatctggtggccatgccggtgctggtcgactacatccgtgatcgtttccaaggccatctcgacaacgtcgccgtcgtctcccccgacgccggccgcattcgcgtggccgagcagtgggcgcagcgtctcggcggcggtccgctcgctttcgtgcacaagactcgcgacatcacccgcccgaaccaggcggtcgccaaccgtgtggtcggcgacgtcgccggcaaggactgcgtgcttgtcgatgacctgatcgacaccgccggtaccatcgcgggcgcatgccacgtgctgcaggacgcgggagccaagtcggtgaccgtggtcgccacgcatggcgtgctctccggcccggccatcgagcggctcaagaactgcggtgcgcgcgaggtcgtgctgaccgacaccgtgccgattcccgaggaaaagcgctgggatggcttgaccgtcctgtcgatcgccccgctgctggccagcgccatccgcgccgtattcgaggacggctcggtcgccgaactgttcgacacctaccccgagcaccacggtcaaggcttcctgttcgcctgatcacgtgcgtgtttgttcaaggaaagcacacgatgcgagacgcgacatggcgtagtctttcggtaaataccgacagtatggtataaatgaacacttgtgggccgaaagcccacgactcccccatggtgtaatggcagcacacgggtctttggaaccctttgtcttggttcgagtccaggtgggggaacggctgacggccgctcgacatccgggcggccgtctattgttttgaggtgtttccaccctcaatagacattccgatcgaagggaatacgtcagttatggcattatccgcagccatcgtcctcgccgccggcgagggtacccgcatgcgttccaacaagccgaaggtgctgcatacttttgcaggcaagaccttcctgaacagggtcatggattcggtgaccgccctgaaccccgacacgctggccgtggtcgtgcacttccaggccgagcgcgtcgccgaagccgcccgctcctatgacgagcaggtcaccatcgtgaaccaggacgacattcccggtaccggtcgcgccgtgcagtgcgcaatggcacagctcaccgaggctggcaaggttgatggcccggtgctgatcgccgcctccgacatgccgctgctcgacagcgagacgctgcaccgcctggtcgaattccacaccgcctccggcaacggcgccaccgtgctcaccaccatcctcgatgacccgaccggctacggccgcatcatccgcgatcgcgaaggcaacgtgctgcgcatcgtcgagcagaaggacgccaaccgcagcgaactcgccgtgcaggaagtgaacacctcggtctacgtgttcgaggcttccgtgcttaccgaggcaatcgccggactgaagtcgaacaacgcgcagggtgagttctatctgaccgacgcgctggaaaccgccaaggccgctggcaaggtcggcgcgttcgccgctccggatccgctcaccgtcgaaggcgtgaacgaccgcgtgcagctggccgcgctgtccaagacctacaaccgccgcgtctgcgagcgctggatgcgcgacggcgtgaccattcttgacccggaaaccacttggatcgaggacgatgtccagatcggccgcgacgccaccatcctgcccggttccttcctgcaaggccacacggtggtcggcgaggacgccatcgtcggcccgtacaccaccctcattgacgcaaccatggatgaaggtgccgtggtcgagcgttcccgcgtgcaggaatcgcacatcggcgcacgcacgaacatcggcccgtggacctacctgcgcccgggcaacgagttcggcgaggatgccaaggccggcgcgttcgtcgaaatgaagaaggcgcacatcggcaacggcaccaaggtgccgcacctgagctacgtgggcgacgcccagctcggcgaccacaccaacatcggcggcggcaccatcaccgccaactatgacggtgtgcacaagaatcgcaccaccatcggctccggctgccatgtgggcgccggcaacctgttcgtggccccggtcgaggtcggcgacaacgtgaccaccggcgccggctccgtggtgcgccacgccgtgccgagcgacacgatggtctactccgagaacacgcagcacaacgtcgagggctggaagcccgcctgggagcgctgaaccatgcccgcacttcaggattccatcaacgccgtccgcgtggccgccgaggccgcagaccgtatcaaggccaccgacatcgtggccttcgacgtagccgacctgctcggcatcaccgacatcatgatgatcgccggcgcctccaacgagcgtcaggtactggccgtggccgaggaaatcgaaaaggacctgttccttaagtgctccggccgtcagccgcgctctcgcgagggcctgaccgagggccagtgggtgctgcttgactacggtgatttcgtgattcatgtcatgcacgaggaatcgcgcgaattctacgggctcgaacgactctggcgcgactgcccggccatcgatcttgaactcgcacacccggaaacggcggagcatgcggacgctgctgccgtcaccaccgcgtaacgtgcgaatcacataacgctgatattcgctgatactcgctgatattcgtgtgtcgggctgcctgttgccgaacgtcattgacggcaccaggcagccctcccttttccctgtttcctcactggaatcgaaaggatcgtcactatggccaatcatgttcgttccattttccttatccgtcatggacgcacttcctataacgccgctcacaagctccaaggccaggtcgacattccgctggacgccgtgggtgaatggcaggtcaagcagaccgccgcggccttgaaaagcctgtacgtcgatcgtcggccggaaatcaaccaccggttcattgtctgctccgatttgaagcgtgcgcacgccaccgcgcaggctttcgccgacgtattgggtggaatcgagcccgtcgatgatcatcgcgtccgtgaacgcagcttcggcgactgggatggccatgccgtggctgaactggccgaacgctaccctgaggacttccgttcctggatggagtctcggggcggtgaactgaagtatggtgccgaacccaaggaagccgtaggcaaacgcggtgtggaggctcttgaggactggtccacgcgtgccggagacgacacggacctgttcgtgttctcgcacggcgcatggatcgcgcagacattgcagaccctgttgggtatttccgcgatcgatccgaccttctccacggtggtctcattgcgcaatgcgcactgggtgcgcttggtgccgatggacaatcccgatggcactgtgcgctggcgtctgctggactacaatcacggtccggccatcgccgacaccgacgaatgggaacgcgaacgctgatcatgttcccgactcccctgctaatccaataggtccggtgcattcggaaccgttcaagcaataactgaatggctcaatgcctgaataatggcggaaacaagccaaaaagtgtcgccaaatcacacttttgtcatttggcgacacgccggcttttgccagaatcgacatctcgtcgtaatgtatacgaggtccgaacaacgggccaacaattgaaaacggggctatagcgcagctggtagcgcatctccatggcatggagagggtcgggggttcgaatccccctagctccacgacgaagccatcaaatcggatgatatggtggtttctccgctggttcgtggcgggtcttgtgactcccatgaatcggatagcttcactcggggctatagcgcagctggtagcgcatctccatggcatggagagggtcgggggttcgaatccccctagctccacaatcaaggccggtgcttcacacaccggcctttttcgttttctatcctatcgggcgacttttgcgcaacattcccgggaatgcgtcgcaaaacagggactggaatgcatgcagtgcgatactttccccggaaagtatcgccaaggggacgctcttccgattggcgcgacaccggcgtgagagataacagtaatcgccactacaatgaggtgtggtccctatcgtgttgatcatcaaaggagacaaaaacatcgtgaccgtcacccgtgtatatatcgccagccctgaaggcgccaatggccgcaacgtcgtcgcttacggcgtgctcaacgcattgacttccaagtacaagaccatggtgttccgccctgctgtgtccaaccatgacgaattcaccccgatcctgctcgccgcttccaatgccggactcggcgtggccctgtccaccggcctcgacgtgcataaggtgcgcgccgacaaggacaccgcccgcggagacatcgtcggcgagttcaactacgccatggaggtctcccgcgcgaacgccgccctgatcgtcggcaccgacaaatcccacgtcaacgacccgaccacctacgagttcaacgcggacgtcgccgccgatctgaaggccggggtgttcctggccgtgtgcaccatggaccgatggccgcacgagctcgacgaaaccgtgcaactgtccatcgagggcatgcgcgccgcgggcaatacggtgctcggcatcttcgtgaccggctgcgagccgcgccacgccttctccgtcaaggagaccctcgccaagtacggtctgccggtctggaccctgccgcaggtgcccttcaccgatgaatccaccaaggatctggcgctggagaccttccgcaagcacgctcccatcgacgaggtgctcgccgcgctcgatgtggacgtcaccgcgccggtcacgccgtacgccttccaattcgacctgctcggcaaggccaagagcaacaagaagaccatcgtgctgcccgaaggcgaggaggaccgcatcatcaaggcggccgactacctgcttgagcgcgagatcgtgaacctcatcatcgtgggcgacaaggacgccattttggctcgcggcaaggaactggggctgaacagtctggggcgcgcccgattccaggccatggacgacgagaacgtgctcaagccgatggtggccaaactgtgcgagttgcgcgccaagaagggcatgaccgaggagcaggcccgcaagcaactgaccgacgccagctacttcggcaccatgctggtggtgctcggctatgccgacggcctggtttcgggttccgtgcattccaccgccaacaccgtgcgccccgccctgcaggtcatcaagaccaagccgggccagaaactggtctcgggcgcgttcctcatgtgcttcaaggaccatgtggccgtgttcgccgactgcgccatcaacctcaacccggacgccgagcagctttccgagatcgcgctgcagtccgccgagaccgcccgcgccttcggcatcgacccgaaggtcggtatgctctcctactccaccctcggctccggcaagggcccggacgtggacgtggtcgaggaagccaccaagctgctcaaggagaaggctccggatctgccggtggtcggttccatccagttcgacgccgcctggtcccccaccgtggccgccaccaaggccaagggcaacgatgtggccggacacgtcaacgtgttcgtcttcccggacctgtgcgccggcaacatcggctacaaagccgtgcagcgctcctccggcgccttggccatcggcccggtgctgcagggtctcaacaggccggtaaacgacctgtcccgtggtgcgatggtgcaggacatcatcaacaccatcgccctcaccgccatcgaagcgcagtgagcccggcttagctcccgccagcgggagccactgtaatgcttattttgtagcaagcaacgagtaatctaatcaacggtaacccgtgtctcacgggaacattcaatcacaatggaggatgcccacaatggcgaaaaccgtccttgtcatcaattccggctccagctcgatcaagtaccagctggttgatctcgaatccggcgaaggcctcgcttccggcctcgtcgagaagatcggtgagccggtcgacggccactacaagcacgagtacaacggcgaaaagcacgagcttgaagagccgattcacgaccacgagcagggtctgaagcgcgtgctcggcttcttcgaggagtacggcccgaacctgtctgaggctggcattgtcgccgtcggccaccgtgtggtgcagggcggctccatcttcccgaagccggccctcgtgaccaacaagaccatcaaccaggtcaaggatctggctgtgctcgccccgctgcacaacggcccggaggccaagggtgccgaagtcatgcgctccctgctgccggacgttccgcagatcttcgtcttcgattcctccttcttcttccagctgccgaaggccgccagcacctacgcgctgaacaaggaaatcgccgatcagtaccacatccgccgctacggcgcccacggcacctcccacgagtacatctcctccgtggtgccggacgtcatcggcaagccggctgaaggcctgaagcagatcgttctgcacatcggcaacggcgcttccgcttccgctgaggtctccggcaagccggttgagacctccatgggtctgaccccgcttgagggcctgatgatgggtggccgtaccggtgacatcgacccggctgtggtcttccacctgatccgcaacgcccacatgaacgtggacgagctcgatgccctgttcaacaagcgttccggcatgatgggcatgaccggctacggcgatctgcgtgaggttcaccgtctggtgtccgaaggcaacgaggacgccaagctggctctggatgtctacgtgcaccgcatcgtcagctacatcggcaactacacctaccagatgggtggctgcgacgtgatcaccttcaccgctggtgtgggcgagaacgacgacgtggtccgcaagatggtgtgcgacaagctcgctccgttcggtgtcaagctggacgaggagaagaacgccacccgctccaaggaaccgcgcatcatctccactccggactcctccgtgatcatcgccgtgatcccgacgaacgaagaactggccatcgcccgcaagtccgccgcaatcgccgaggctggcaccgatacctacggcaacaccttcgccaagtaagtaaccgccgttaggcatctcactaatctctagttgcaacactatgggggctgattccgattggaatcagcccccattcgtatatggtcatgagaccactacccctgcgtcatactcccctcagtcgcctccggcggacagatccactcagagaggggatccaggccctataacttggctcccttctctgaggggagctgtccgcgtagcggactgaggggagttccaccagaacacaggaccccttactgcctcagcatgccactccacataccgacgaaatcaggcaaggtcttgcgcgtggtggccacgttgatgacctcgatatcgggaatacgcagccccagcatcgcggcgaacgtggccatacggtgatcagcataggtttccatcacggcaccgtgcaacgtctctgccggcaccggttcgatacgcaatccatcaggcaattcctcagccgctcccccaacacgacgaatctcgttgaccaatgcctccagacgattcgtttcgtggccgcgcaggtgaccaataccaaccatgtctgtcgacttatcagcaaacaccagaatcgccgccaacgagggcgcaatctccccggccgccgtcaaatcgaacgtacccagcccacgcacggtgccgtcaccggtcacctcgcaatagcgcacgcc

SEQ ID NO: 2183 - DNA, 6574 bp, Unknown
  R51_24m  MAG No. k141_19522
tcatgcacgccgccgaccaattccacgaacgcctctttgagcacgctgaacggttccttgatggtcaatgccaccaaagccacggtaatgaagaaatcgccggtgtagtgcaggaagtcaagcggaccgccggccggtagcagcatcaggaagatggcaaccacgccgatgccgaacgacatcgatccgtcgaccaacgtgctcttgcactcggcggtgagcatggtgctggaatcgccgatggagcggttggaacgccggtaatacatgtataggctgaagcacactattacggtcaggatctcgtagatgaccaccgggccggtttcaatgcgttcgccggacccgaacacgaagtagtcgtacgctactcggcacacgtcaatcagcgaatacaccaacaacgacatggtgaaaatggccttgcagatcgcgtagatgggttccagtgcgaacatgccattggggaagcgctcggtggttcgcaccgtgcgcgacgagaggtacaccgccaccattccggacaggacggaaatcgcggtgaaggagaagtcgaggaacatggccttgaggccggtcatgaagaacacggccacgccggctaagacctgcagcacgttgatgacgatgccaacgatcagggctttgcgttcgagtagtttttgggtgggcatcagtgggccttccttattgcacggcatgtctgcgttggcccgaacgtcatggttcggagcgcacggcagtctgcgtataagcggtgtccagcgattttcaaaacagcgtaagcattccaaaaaacacaggattctttacggtttccatggtatcggaagcactcgattggcttcgccacgagcggacggcacggcatttgccgtctgaatgcccaacattcctgactactacgcgatgcaatccccggaaagcgtcgtccccaacaccgcaatttcccgcgtggcggctagactgttgcccattatggcagctttttcatctttgacagacagactctcgaatgcgttcaagcatctcaagagcaagggcaagctttccgaggcggatatcgacggcacgatccgtgaaatccgccgcgcgctgctcgacgccgacgtggcgctcgacgtggtgcgttccttcaccggcaaggtgcgtgagcgcgcactgggaaccgaggtgtccgacgcgctcaaccccgcccaacaggtggtgaaaatcgtcaacgaggagctcaccgacgtgctcggccaaggcgtcgatcgtccgctgaacttcgcgaagaacccgccgacgatcatcatgctcgccggccttcagggtgccggtaagaccacgctggccggcaagctcggctactggctcaaggattccggccacacgccgctgctggtggcggccgatttgcagcgtccgaacgcggtgacgcagctgcaggtggtcggcgaacgcgccggcgtgcccgtctatgctcccgaaaagggcgtccaatccgatggcggcgaggccgtcgcagctccgggccagacctccggcgacccggtgaaggtggcccgcgattccatcgaactcgccaagcagaagctctacgacacggtgatcatcgataccgccggtcgtctgggcgtggacgaggagctgatgaagcaggctcgcgacattcgcgatgccgtgcaccccaacgaaatcctgttcgtcatcgacgcgatgatcggccaggacgccgtcaagaccgccaaggcctttgacgagggcgtggacttcaccggcgtggtgctctccaagctcgatggcgacgcccgcggtggtgccgcgctgtccgtggcgtccgtgaccggcaagccgatcctgttcgcctccaacggtgagggcctgaaggatttcgaggtcttccacccggaccgcatggcctcgcgcatcctcgacatgggcgacatcatgacgctcatcgagcaggcgcagaagcagttcgatgaggaggaggcccgcaaggccgccgagaaaatctccgaaggctccttcggcctggacgacttcctcgatcagctgcagcaggtacgcaagctgggctcgatgaagtcgctgctcggcatgattccgggcatggcccagcaccgcaaggaactcgagcagttcgatgagaaggaaatcgaccgcaccgaggcgatcattcgctcgatgaccccggccgagcgccgcgatccgtcgattatcaatggttcccgccgcgcccgtatcgcctatggttccggcgtgacggtttctcaggtgaacgctttgctgcagcgtttcgagcaggccgcgaagatgatgaagcgcatgtccaatcgtggcggcatgggcggcggcatccccggcttcggcggcccggctatgggcggcggcaagaagaagggcaagaacaagaagaaaggcggcaaatccggcaatccgatgaagcgcgaggccgaggagaaggcattgcgcgacaagctggccggcaaatcctccggttcgaccggcggttccgccttcgccaagaagccgcagaacccggccctgcccgccggccttgaacagatgatgggcaacgtcgatggtggcactgaactgccgccgaacctcggcggaggccttggcggactgttcggccgctgatctcacaacttggctcccctcgcagaggggagccaagttatatctcggttcaatttatatttcgaaaggaacttccatgacgacaatcttcagcgcggtggcaatcatcgcactgttatggacggccttaagcgcgctgcccgccggtctcgaggcccgtatgccgcttccgtacatgattgccctgactccgctgctgtgggttcctttgatgattctggccgcggtcgccgcatggcaacatgaatggactgcgatgtcgtcgcttattgtggtcgcgctgattgccagctcacagcgcatcaactactggggtacgtcaatcgacccagccggcaaacgcagagaatcccaccgtgaaacagcccgtgaaacaacttcgccgacgctgtcaaaaagccataacagcaatacatcgagcacctcaaacactccgaaggaaggacccgaaacagtccccgatgggcaccgtgaaacaacgcgtgaaacactcccgccccagttctcggttatgacgatgaattgtcgatacggacgcgccgacgccgctgaaatcattcgcaatattcgcgaacgcaatatcagcgtattggccttgcaggaagtcaccgacgacctcatcacacgtcttaccgaagccgacatcaacgaactcctcccctaccatcagttcggagacgccaaagaaaccgataacggcggattcaacgtgatctattcccgctacgagccgagcgcagcggtgcccaacgtggtctccatccctgccgccgacgttcccgccatcaccctcaaaacctccggtaatcgcacggtgacgctttgttcggctcacccgaaatcgccgatgcgcggctgcgcggattggtcggccggcattctgggtctgcgagaactcgcccgtgcaaaatccgtcagcaatcgcaacatcgtcgtcgttatgggcgatctcaactcgagcaccgatcatccgagcttccgtgcgttgctcaagtccggattcaaggacgcaagtctgattcaagccgccggaccgaacctcaccttcccgcgctggctcaagtggccgcgcatcgaactggaccatattctgttcacccaagggctcagaccgtccggcgtgacgtccttcgaagtgccggacaccgaccatctggctttggccgcaacgctcaccctgcggtagcgggcgcggcgatcgatcgggccttggccgtgtggcgcgaagcgggcgggaacgtctggaagacccccgcccgcagccgggtggttcgccgtcagaggtccatggagcggatcagattcaccatttcgatcgcgccctgcgcgcactcggaacccttgttccccgctttggtgccggcccgttcgatcgcctgttcgatggaatccgtcgtcagcacgccgaacagcaccggcacaccggtgtcgaggctggtctgcgcgattcccttcgagacctcgttgcacacgtaatcgtagtggctggtgctgccccgaatgaccgcgcccaggcagatgatcgcatcgtagcgcttgctcttggccatcttcgacgcgatcaggggtatctcaaaggcgcccggcacccaggccaccgctatgtcctgttcgcggacattctcccttttcagggtgtccagcgcccctgccagcagttttgaggtgatgaactcgttgaacctcgccacaacgatgcctatcgtgatgttttcggctaccagatcgccttcgaacgtgtgcatttattcctcctccatgttcaggatatgtcccatgcggtttttcttggttttgagatagaaactgtcgtaagcattggcttcgatttcgattggtattctgtcgcggatctccattccatagtcttccaattgatacaccttgtcgggattgttggtcagcaggagcatggatcgtacccccagatccctgagaatctgcgctccgatgtagtactccctcgcgtcaccggggaatcccaacgcgagattggcgtcgagcgtgtccatgccctcgtcctgcagacggtaggccttcagcttgttgaccagaccgatgccccgcccttcctgacgcatgtacagcagcacgcccgagccatgctccgcgatcgtccgcatcgccgcgtccaactgctgaccgcaatcgcaacgcaacgagccgaagacgtcaccggtcaggcattccgagtgcacccggcacaacacatcgttcccatcgcccagattccccatgaccagcgcgacatgatgctcgccgttcaacctgttcacatagcagtgcgccgtgaattccccgtatcgcgtgggcatcgccacggtcgagacgcattcgacgagcgtatcgtgcgctttcctgtattcctgcagttccttgatggtcaggagcgggatctgatgctcctgggcgaaccgggtcaggtcgggggtcctcatcatccggccatcgtcgtccatgatctcgcagcacaggccgcattcacgcaatcccgccaaccgcatgaggtcgacggtcgcctccgtgtgcccgttccgttccaggacgccgcccttcttcgccaccagggggaacatatgccccggtctgcggaaatcgaggggttccacgtcatcggagacgcacatgcgagccgtcaatccccgttcttcggcggagatgccggtcgtggtgccacggtaatcgatggacaccgtaaaagcggtttcatggttatcggtgttgtgctcgaccatgggcggaagcatcagcttgtgggccagttgctcgctcatgggcatgcagatcaatcccttggcgtgggttgccatgaaattgacgttccatgtggtggccgactgcgcggcacagatgagatccccctcgttctcccggtcctcgtcatcgatgaccagaacgagcttcccttcccgcagcgcctgcaacgccgcttgcaccgactgatggttcatgattcatgcatcctttctcagaacccgcaccgggacagcagatcctgcgtcagtcccgtccgggtcgtcatcatgttccgcacgtattttcccaatacgtcgttttcgagattgaccacgccgccgacccgtttctcgcccagcaccgtctgcgccaaggtgtgcgggatgatcgataccgagaagtccctttccgtgacctccgcgaccgtcaggctgatgccgtcgacggcgattgagcctttctcgacgatgccttcgagtatctcgtttcgcgccgcgatccggtaccacacggcattgccttcgcgccgcacggaggatatgctgcccgtgccgtcgatgtgcccggtgacgatatggccaccgaaccttccgttcaccggcagggcccgttccaggttgacgccgttcccgcggcgcaatacgccaagcgaggttctgcgccacgtctcattcatcacgtcgacggtgaagcgtcgccggtcgaaatcgacgaccgtcagacagatgccgttcaccgccatgctgtcgccgatatggaggtcctccatcacgttcgtggcgtcgaccgacagcgtgcagttggcggcgctcctccgtatgtccgccaccgttccgacttcctccactattcccgtgaacatgaatacaccacctcgctttccaccagataatcctctcccactcgggagcaggcgcggggccggagcatgacggcgtcggaaggcagggcgactccttggccgctcaccgggcttttcgcggtgccgccgaatatcttcggcgcgatgtacacgtgcgcctcatcgacgatccgctgttcgagggcgctccaattcatcgcgctcccgccttccagcagcacgctgtccatctgcatatcccccaggcgccgcaccacgtccgccagatcgacgtggtcgcccttccttccgacggcgagtatttcgcagccgtgccgccggtagtcctccgccttgcgttcgtca

SEQ ID NO: 2184 - DNA, 6236 bp, Unknown
  R51_24m  MAG No. k141_19590
ccggagcggcagcctcgacgtcgaacttctcctcgaaggccttcacgaactcggagagctcgaccagggtcatctcgccgaaggcttccagcagctcatcgttggtgtacttagccattatggcttcctttcaatcttggcggcggacgaagtggtagatccgctgcctaataaaccttattgtttaaattatcgaagcgactgattcatgccgtgagggcgtaaatcaggcagccttctcctgcttctcgcgcagggcgtcgatcgtacgcacagccttggtaggcagggcgttgaacaggtacgcggccttggccatcgatgccttgatgtcgccggcgaattcggcaagcagctgcgggcgggacttgaggtctgccagcttcttggcgccctcggcatcgtagacagtgccgtcagcggcggcacccttgatgacaagagccttgttgtccttggcgaagtcacggatgaccttcgcagcctcgatgaagtcgcccttcacgaaggtgatggcggtcgggccggagagaatctcgtcgagaccctcgatgcccgcttccttggcggcgatgcgtgccagcgtgttctttgccacggtgtaggaagtatcgcggcctagcttttcacgcagatcggaaatctgcggaacggtaagcccgcggtactcggtcaggtagacggcgtcagcgttacggaattcttccgtaagctgagcgactaccgcttccttttcgggcctcttcatggcgttccttcctaagtcggccgttgacttggagttcggaactttcggccgggcaacaaaaaagccctgcgcacaggcagagcaatataatctcgcgaagcgaccttcgccggcccttgacgggcttatatctctcaacctgcgctggcttggcgaaccaaacttcggaaatgcactcgcgcgcacttcaaccaacggtctgtggtttacggatgattagattacggatggtcagcgacattgcagaattcgggcgtgtcgcaaggcattacaacgtggcggcgtactgggctacggacgcggtgacttccttcagatagtcgagcgagcgacgccagtggccgggcacctcgatcgaatggttggcatccgggtattcgtgcacgtgcggggtgagcgcgttggcgcgggctcgatcgtagaacgggtcggcggtgccggcgcagatcagcggtgccgggccggagtatcgggagctggcggcgtgcgactggtcggccagttctgcgcggatgatcgcccttgcttcggccacgctcggagcctcggattcggcgacgatatcatcgccgacagccggcaccggaatcacccgggcggatggatcgaagtcggcgtgatgcagcaccggggtcagcagcacgaacggcagaccgtagtgtgaggccacatgtgggtaggtcatcgtcgtcagcgacttgccgatcagcaacaggcgagggccggacggggtgtcggaatcacggttcggcgagccagctgcgccatcggccagcacggtagcagaatcatcgacggcaacgccatccccggaatcaccggctttacccgcgccggactcgcgcgcggcggccatccagccgtcaatcgcctgattgaggaccggaatcaccgtggacaggtcgtcggaagcgttgcgtacgttcatgcggtcgattcgccagccggcctcgaccagagcctgggccgaccagtagagcagcggacggtcgcagttgtagccggtgccaggcatcagcagtacgcggccgtactcctgaccgggcttgacgacattcttcttccaagaggtgatgctgacttcgacggccggtttcatcgcgcgccttccttccacgggtgtgccctgcgtgtccctgagttgttccgaattattctggcagtcagtctactcccggacccgttcacgttacctccacaagctataatcggccacggttctgattggatgcgcagcgcctgacgcgcgttgggcaggccgatcagggcgagtcgcaattctcgccggggccagccgcagcattatgcgcgcggtgcgcagccccgcataaaaccaaggaagtagagagtaaatggagaagttcttccatttgaaggaaaacggcacgaccgtctcgactgagattctggccggcctgatcacgttcttcgcgatggcctacatcatcgtcgtcaacccgcagatcctgtcgcagacgggtatgccgtggggcggcgtgttcctggccaccatcatcgcggccatcatcggcaccctggtcatgggcctgttcgccaatgtgccgtacgcccaggccgccggcatgggcctcaacgcgttcttcacctacaccgtgtgcttcggcctcggcttcagctggcagcagaccatgtgcatggtgttcctgtgcggcctgatcaacatcctcatcaccgtcaccaagatccgcaagatgatcatcatggccatcccggagtccctgcaacacgccatcggcggcggcatcggcctgttcgtggcctatgtgggcatgctgaacgtcggactgatcaagttcacccccggcgacccgaaagccgcggccaagggaggcgccgtggcggcgaccccgggtctggccgacttcaacgacaaggtgctgtgggtcttcctgatcggcctcgtactggccattgtgttcaccgtgatgaaggttaagggcggcatgctgctggccatcgccatcaccaccgtgatcggcatcccgttcggcgttaccacctggtccaactcgcagtccatcagcgaaaccttctcccagctgccgcagaccttcggcgcgatcttctcagctgagggcttcccggcgctgttctccgacgtctccaagctgcctctggtcatcgtgaccatcttcgccttctccatgtccgatacgttcgacaccctgggcactttcatcggcaccggccgccgcaccggcatcttctccgccgaggatgagaaggctctggagaacggccacggcttctcctccaagatggacaaggccctgttcgccgactccatcgccacctccattggcgctatctgcggcacctcgaacaccaccacctacgtcgagtcttccgccggcatcgccgcaggcggccgcaccggcctgacctccgtggttgtggcgatctgcttcgccctgtccgcgttcctggccccggtcgtctccgccgtgccgtccgccgcaaccgccggcgtgctggtgatcgtcggctgcatgatggccgcttccctgaaggaagtcaggtgggacgacatcgccgaagccattccggcgttcttcgccgccgtgttcatggccttctcctactccatctcctacggcatcgccggcggcttcatcatgtactgcatcgtgaagacctgcaagggcaaagcaaaggaggtccatccgatactctggatcgtgtccgcgctgttcattctggacttcgtgtgcatggcgattctgtaacgctgattgacaacggattagcctttaaggatcaatccgccgccatacggcataaaggccgggctctcacaagggcccggcctttgttgttgccacagtgatcaacgcccatgagtaccttcgatgatcatccgccattcaatcaacggctggccatgactcggacatggcgcggcacggcaagcggattttgctgttgggcataacaacagacgagagaatagatccggtcgtgagcaacaggataggtgccatgcggtgccgtgtacaaactgttgtcagttgtcaacgctttttagcgtggctccaatcatcttaatggctgttttccgccattcttgatgcatgagaatagttgtcaactgacaactgaatgtacatggcagcagcacgagtgccctattcaacatcgaaatatgtagcgcgaagaagccgaaaaaccaaaaggcttctataccgaatgaaacggtatagaagccttttggtttgcgattaagctcttctcacccgagagaagctagagaacgatcagtcctcgaatgccgaaccgttaagcgggaagccctgcgggcttcccgtaggtgagggggggggagcggctatgccgcgaccgatccgtgagagggctttagtcctcgaacggatcaaagtcgcgacggacgcggcgacgcgggcgctcagtgcgctcttcgcggtcggcgcggtagtcgtcgtagttgtcgtcggtggcgtagcgcgggttgcggtccgagccacggccacggccgccacggaaaccgccacggcggtcatcacgatcgccacggtcatcgcgatcggcagaacgacggcgacgcggacgatcatcatcacgggagtcgcgagcatcacggtcatcgcgatcgtcgaagtcacggtcggcagaacgacggcgacgcggacgatcatcatcgcgatcatcgcgatcgaagtcacggtcatcggagcgacggcgacgcggacggtcgtcgtaatcatcctcgaagtcatcggagcgacggcgacgcggacggtcgtcacgatcgtcgaagtcacggtcatcgcgatcggagcgacggccacggctgccacggcgatcgtcacggtcaccacggccacggccgccacggcggtcatcgcgatcgccacggctcgggcgggcgttgttctcctgatcctcgaaaccagggatggccagggagatcttgccgcgatcatcgacaccctgaacgatcacctcaacggtgtcgccttccttgagcacgtcttcgacggcgtcaatacgctcgccgttggccaggttgcggatctgggagatgtgcagcaggccgtcagtgccgggggtgaggttcacgaaagcgccgaacgacgtggtcttgacgaccttgccgttgtaggtttcgccggcctcgggcacgtgcgggttggcgatggaatcgatgatggacttggccttcttagcggcctcgccaccctcggaggagatgaagacggtaccgtcatcctcgatggcgatttcagcgccggtatcttcctgaatctggttgatcatcttgcccttcgggccgatgacctcgccgatcttctcgaccggaacggtggtggtgatgatgcgcggagcgaactcgctcatctcagccgggccgtcgatgcactcgttaatgacctcgagaatcgtggcgcgggcttccttggcctgctgcaaagcggcggccaggatgtcggcggggatgccgtcgagcttggtgtcgagctgcagggcagtgatgaactcggaagtaccggccaccttgaagtccatgtcgccgaaggcatcctcggcacccaggatatcggtgagggtcttgaagatgtgcttgccatcaacgtcgccggacacgaggcccatggcgatgccggcaaccggggccttcagcggcacgccggcagccaaaaggctcagcgtggaggcgcacacggaacccatcgaagtggaaccgttggaaccgatggcctcggagacctggcggatggcgtaggggaactcttcacggctcggcagcaccggcacgagagccttctcagcgagggcgccgtggccgatttcgcggcgcttcggggagccgacgcggccggtctcaccagtggagtacggcggcatctcgtagttgtgcatgtagcgcttggactgcggaccggacagcgcgtcgatctgctgctccatcttgagcatgttcagggtggtgacgcccagaatctgggtctcgccacgctggaacagggcggaaccgtgcacgcgaggcacaatgtccacctcggcggacagggtgcggatgtcgcgcaggccacggccgtcgatgcggtagtcctcggtcaggatgcggcgacgcacgatctggcgctgcagctccttgaaggcgttaccgagttccttgtccttctcggcatcgtccatatcggtgaactcgtccgcgagcacctcgcgcacgtgctccttgatctcgtggatgcggtcctggcgcggcagcttctcggcgatggagagggcctcgtccagatccttgtgagcgatctcgtcgatgcgggcgtacagctcgtcggtgtactccgggaagagctggaattccttggtctccttggcggcgatcttcttgagctcatcctgagcctcgcaaatcaccttgatgaacggcttggcggcctcaagaccggcggccacgacttcctcatcgggcttggtctggccctcgtcgtagatgaggtgc

SEQ ID NO: 2185 - DNA, 6418 bp, Unknown
  R51_24m  MAG No. k141_19666
accggctcgactagccaacacgtcccctcgcggattccttcattctctccttgccgcgaggggaattcttttttaaccgtcaaggagagatttttttcttcgaggagaacgtcaatgtcacgcaaccgaaaccaccgccgcgccaatgtcagccagattgcaggacgaccacaggaccacaagcagtccaagaatacggttcgccgtgtcaacgtccgtggaatcgatatcgatatcgacccgaaggttttggacgattgggagttcatggaatcgctctatgaccttcaggccgatccgaagggcaacgccttgcagatcatcccgttcctacgccgattgttaggcgactcatacgacaaggtcaagaacggattgcgaggcgcagacgggcgcatcgacggcgaaactatgggcaccttcctgaccgagctgttcgaggagatgggtaaggctttcccaaactcatgacgctcgtgctcctgctcgaccgctgtcctgaccagttggcggcggacatgagaagggagtacgggctcggcatgcacgacctggacccgttggagacggccgcactggccgcgaacctccccgcaggctcactcgtctggcagacgttggacacgccgcgcgcgtggacgttcgaccagtatctggccgtgctgcgcatcgaacagatgaaccagtggatctgggcaaacggcgacccgaggaaacgcggcccgcaaccccggccgctgccacgccccggccagcaccacgccacgccggaagcaaccggcccggccatggaagccggatcagagaacccagaacccgatggcaacaccatccgtcgcacgcgcaccatcaaggccgttggcatgagcgtcgaacagctcgaccgattcatgagccaacggttcacgaccgtgaaccgtgtggagaaccggccgcagaccggacaaccataaccgaacagaggaaggcgaaacaatggcctataatctcgccaccgcatatgtgcccatcgtgccttccatggatggcgtcggcaaggccattgaaaaagcgttcggcgacgcatccaaaaccaccggcagtaagaccggacagagcatcggcaagggactgtccgtcggattcgcctccaaggtcggagccgtggccggcatcacgtccaccgtgttcagcaaggtcgcgtccgtcgtcacgtccagccttggttccgcggttgaccgcgccgaccagatgaacaacttcccgaaggtcatgaagaacctcggatattcggccaccgatgcggccgcgagcatcaagaagatcagtgacgcgctcgacggtctgcccaccaccagctcggccatgaccggcatggtccagcagctcgccccactgacctcgaacctcgacgaggccaccgacatcgctttggcgttcaataacgccatgctcgccggcggcgcttcgaccatggagcaggagaacgcgctcacccagtacacgcagatgctaagtgccggcaaggtcgacatgcaggcatggcgttcgattcaggccgcaatgccgggccagctcaaccaagtggccgaggccatgctgggcgcagggaagaactcaaacgacctgtatgaggccatgaaaaacgggtcaatcagtttcgatgatttcaacaagaaggtcatagaactgaaccagaacggtttcggcaaatacgcctcgttcgcacagcaggccaaggacgcgacccagggcatcggcacggccatggagaacgtgaagaaccgtgtcgccaaggccgtgcagaagatcatcgatgccgtcggcgtggagaacatcgccggcgcgatcaacaggttcagctcccagttcggcaaggtgggcgacgcggccgcgagcatggtcacggacgtgaagaagaagttctccgaagcgggcaagtggatcacgggcctgtacgacaagctcgacaagaccggcgcgataacccggttcaaggacaccatctccacggcgttcgaatccgcgcgcagccgcgtcaccgaggcggtagaccgcatcgccgggtcgttcaagggcctcgtgccggacggcgcgatagtctcggccatcgaggacgtgctcaaatacgtgggcacggtgttctccgacttcgcggactgggtggctgacaccgtcgaatggtggagcaagttcatcgccgcgctgaaagacaccggggccgtgcagcagctggccggcgcactgggcggcctgttcgacgcggtcggagacgtcgctgacgccttccgtggtgccggcgacatggccgaatcagcggccggccgcttcgactcggccaagggctccgcggaactgctgggtgcggttatcaaggtcgcggccgacctcgtgcagaagatggccgaccagctcaaacgcgtggccgaatgggtgaagaaattcaccgacactctctccgacagcggcgcattggacacgtggatggacgcgctcgaacgcatattctccgcgctcggcgacgccatcggctcgctggaaaagctcggcaaggcgttggacggcggcaagaagtccgccgaaggcgctggcgggggcctcgacacggccgccgctgcggccaagggattcgccgcgtacatcaacgccgtggccgacgtggtcgagaccgtgtccggcgtcatcgacgggatcgccaccgcagtcggcaaactcgccgacggcatcgactggctcaacgagaagttccccatcctcggccaggtgatcggcttcctgctcgacccgatgggctcgctggccgacatggccggcagcctgttcagcttcttctccggcgacgccggagccaccgccgtcaacgacttcacggccacgttcgtggaaccggtgaaggccaagctcgacgaaatcggacaatggttccaatcattgccgcagaaggccatggacgcggggagccagttcctgaccaacatcggccaatggttccagcagctgccgcagaccatcggctactggctcggctacgccatcatgctccccatcgcgttcgcccaacaactgggttccaaggcgatggaagccggacagaacttcgtgacgaacctatcgaactggatacagcagctgccgtcacaaatctggacatggctgactcaaaccatccagaacgtgcaggcatggggaagacagatgatggcgcaggccggagacgcgggaagccggttcctgaccgagcttggccaatggcttcagtcgctgcccggacgaatctggcaatggctgaccggcgcgataagcagcgtacaggcatggggcggacagatgggggcgggcgcacgcaacgccggcaaccagttcctgcaaggcatcaccggcacattgcagagcctgcccggacgcatacaaagcctgttctccaacgcgggctcgtggctcctctcatccggccgcagcatcatggacggtctcgcccaaggcatcaggaacggcatcagcgccgccgttgacgccgcatccaacgcgatggaggccatctcgaaactgttcccgcactccccggcgaaggaaggcccgttcagcggccacggctggaccctctactccggccaaagcatcatcgacggtctggccgagggcatgctccaacgccgggccggcctcgtggacgccacccgcgccgcgatcagcccggccagcatggaactcatgcatggcatggacacgccacgccctagcgtcggcacaggcaccgcgaacggcacataccagaaccagtccggcgaactactcggcgaactcctatcggagctgcgctcactgcacgcggatatgccgctgattatggagaagcttggcatcgaggtggatggtcgtgaactcggaagggtgatacgcaatgcgatcgcttagttatatatgcgcctcgaccggtgagacgatcccactggaagggcccgatacctgggcccagacggcggatgggctgcgcggccgcgaatggtcgtacaccatcggataccggagtctgaccggagtaagtcgtacggcgcgcgaggccgagcttgacctaacctatgtccgctgccccgagaaggtggattggacgcgtcgcctgttcgacgcggacgttgccgcaggcacacccggtgtgttcgacgcggacgggtggaccacgcgcgcctacgtggtcaaggccgaacccgcgagcatcacgccgaacatcatccgtcagaaactttccatcgtcctgttggacggcatctggcgcaagccgggcgacgtgcagcacttctggtcggacgcgctgcaacccggactcgacctcgactacccgcacgactatccgcacgactacatgccgacgacgcgaaacgcggtggtctcgaatcccatgcccacggccatgccattcaagatggtgatttacgggcccgcgtcgaatccgcagctcacgtttggcggcaaccggtacgcgctcgacgtggagattccaagcggctccttcgtgaccgtcacctcgattgcaggccgacgtaccatcgccatgaccgccgagaacggcgacaccacgaacgtgttcgacaagggccggcgcggaaccggtctcaacggcggcgaatacatcttccagcccatcccgcccggagacaacgccgtacagtggcaaggtttcggcattgatctgaccgtctacatggaagaaagcgaaccagtatggtcgaattgataatcactgaccgaaacggcatcgaccgggaaagcatcgccgattacaagctcgatgcagcctggggcgcggacgagaacgatttcgaactcacagtggaccggctcatcgacgctggcagctacgtgtatttcgacggcagcgaatgcgggggcgtggtggatactatggaagaccagctcacgtccggcgtcagcaccctcacctattcggggcgcacgtggcacggaatgctcgcgaataaaattctcgagcctgataagggcaaggattatctcaccgtgagcggcacggccagcacggtcatcggctcgctcatcagtcgtgtcgggttggattcggtgttcgacgcggttgtaccgcctgacggcagtggcgacccgagcatcaggcaataccagttcgaccggtacgtggatgcgtataccggtttgaggaagatgtgcgcggccaacggactgaaactcaggctcgcctatacgtccggccaggtcaacatctgggccgaaccggtcgcgcattacggcgattcgattgacagcgacctcatcgatttcgacgcgacccgcacgtggcgcaaaccgaaccatctcatcggcctgggcaagggcgatttggcggcccgcgtggtcgtccactggtatgcggacgcgaaaggcaccgtcagtcagacccagtcgctcaggggcgtggacgagataacgcaggtctacgactacagcaacgcagaaaccgccgaactcaacaccaagaccaaagaaaaattgcaggacctgcaatccgagggtgatgtgagggtcaccgtccgtgacgacgcgaacgtggtgttcgacgtgggcgacaccgtgaccgcaagggataatctcaccggcatcaccgtcaacgcggctatcagcaagaaaatcgtcaaggtctcgggcggcgtgatgtccgtcgattatgaggccgagtaaacagtaaggagccgattatggcgcgtatcgacaaagcgacggtcatgcaatgcgaccggtgcggcaaaaacaaatggtacaaggacttggacgacccggatatcaagacgtggtacaacgtcaaccggttggactccaccggcacgggccacgactacctgttttgcgatcaggattacgcggactatgtgaacaagctcaaggactttgataacagtttcgacagttggatgcagaacggaggcaagcggaatggttgaactcgtcaccggtcatgcgggcaaggcgcacgcgacagcggagcaggcggcgggattgaacgccggcattctcggcttggatgattatgtcctgaacgtgcatgacaagttcaagatcacggtcgtttcggcgaacaaggtgaccatcggcacgggcgagctggtcatgcagggccgtcacgtcagccaaggcacgcccgaggacctgatcgtcaccaacgggtcgcagggtcagaaacgcaacgacctgatcgtatgccgctatgcgaagggctcgcagaacatcgagagcgcgaaactggtcgtggtcaggggcacgcccaccacgggcacgcccaccgaccccgccgtgaacaccaccagcccgttggacgggggcaccacctacgacatgcccttgtaccgcatcccgctggacggcatcaccatcggcacaccagtcgcattgttcaacgtgttgaagccgatgagcgacgtgtgggattccctaaccc

SEQ ID NO: 2186 - DNA, 6699 bp, Unknown
  R51_24m  MAG No. k141_19761
cggcacatggagcggtattcgttgacgtagccgccgccgaagaagacacagtggccggcgatggggtagagctgccagagcgtgatacgctcctgccatccggccttcaacggatgcacggactggtagccctcggtgatttcgctcagatagctcatgccgaacaggtgcagcatagccagatcctcctcgcgatgaccgccatgtgccgccgggtcgatgagcacagcctcgggctgcccggaatcggcggtccacatcacattgccgctccacagatcaccgtggatgcgcgccggcttgtcggacgcggctcggcccatcagatccggcaacgcttcaatcacgcgctcggtcagttcgacatcgcgcttatccagctcgccacgcctcacaccaaggttgaccatcgggcgcagacgtccatcagcgaaatagctgatcgggtcggtccactcgccggtatccattttcactgggtcctgcaatggcccgaaatagcatgtgccgttatatccgtcaggcgcagacccgaaatattcggcacccacatcatgcatatgggccagagccgcaccaaaagctcgtgccgcctgaggcgtgggggacgcgctgcccacacgttcgatatccagataatccttgccccagccgtatacctgcaccacgcgcgggccgccctgcgcatgagccgctcccaaccattcgagtcctcgaccctcgcattcgaagaatccttccggtgcgaatgccctgcttttgcgatacgtggccataatgctcccttcgtcgcttacgtactatatccactttcattgtagaagccgtggatgttaccgattcttagtgttgttctacacccccttgggtagggtgttcatcgtcataacacatcaaatacttagaaatcacgaggggttatgaattttttccaagcgatcattctcggcatcgttcaggcgctgaccgagtatctcccggtatcctccagcgcgcatatccgtattttcggcgatttgatgctgggctctgatcccggtgcggcgtttaccgccatcatccaaatcggcaccgaacttgcggtgattctgtatttccgtcacgacatcatcaatatccttactcactggttcagctgcctgttcggcaagaacggcaaggattggaaggcccgcatgggccgcggcgacaattacgccacactcggctggaacattatcgtcggctcgattccgattatcatcctcggcttcactctgcagaacgtcatcgagacctcgttgcgcaacctgtggattacggtaaccgtgctgttggtattcggcattctgctgtggatggtggatgccaaggctcgccagaacaaaaccatgaatgatatgacgtatcgtgatgcgttcctcttcggtttgggccagtccatggcgctgattcctggtgtgtcccgctccggcggcaccatcaccgtcggtcgcgcactgggctacacgcgtgaggccgctgtacgtctgagcttcctgatggccatccccgcggtgttcggctcaggtttgctcgaagccatcaaggccgtgaagaactacaaaaccgatgcgatgttccccggctgggggccgaccctcgtagccatggtcatcagcttcgtactcggctacatcgtgatcatcggattcctgaagttcgtatcgaacttctcctataaggccttcgccatctaccgcatcggtttggctgtggtcgtcgccttgctgctgattgtgggcgtgctgccggccatcgatccctccgtggcggctgcggcataagacgggtcgatagacgactccaatataatggtgctcccgctggcgggagccgtcagcgaagctgactgggggtggtcactggaatatgccagcagaaccaccctcagtctcgctacgcgagccagctcccgacattttgtgcgacgtgcacatggtgcactgctatgaacagcccacagggctgttcatccagcgggagcacaccatatatgggctaattgcccatctggcgcagaaacgcttctgcttctttgactagttgttcggcctggggcgctcccaaggaagcctccgcctcggctttctgctgcaagtcgtagtcgtgctccaaatgctccacgtaatcgtgaagctggtcattacaacgaaccagtatcgaggcttgcgccttccactgttcggctttctgcttcagatctgccgtatcgaaggtgaagccgatatgcttgcccaacgcatccagcaatcgcatagtgccggcagaacattcgtcgctgcccaaatattgggggatggacacccacatcgaggaatgagcaaaaccttgctgcgcggcggccacatccaaaacggtaggaatgcctaccgggccgttatacgaccggtctccttcgcattgacagtctccgtcgctgacggcgatgggcaacgggcgggtatgcgggcaatcggagaacatcgaacctaacgtaatgatccgattgacatccagctcatcggcaatggccagactctggctacagtattccttccaccgatagttcggttcgggggcgatctgcgcatagatatgctcgcctgcgtccaacgtgatgtcgtagaacgtggtctgcggccagataagattggtgcgtcccgcaacatggcacagcataggacgggcaacctgatagtcatagaaatcatcacatctaatatgacgaatctcgcgggactcatatcgcttgaccagatggcgcaccgcgttcgtcgccgcctgacaggcatcattccatccctcgaatgcggcgatcaatactgcgccggtgtccttcgctgcttcactcatacctctagagtaactggaattcattgcccgaagcgcacgctttagccataagcgagagtatgcaattacaggcgacacgccgcagctggacgaactacacgcatgtgagtatagtaaacactcgtgcttcggcagggagacctcgccaaggaaacacacgcggacatagcttagttggtaaagcgcaaccttgccaaggttgagaccgcgggttcgagtcccgttgtccgctctaggtccgtgagttgacagaccttacggtgggttagccaagcggttaggcagcggcctgcaaagccgtatagacgagttcgactctcgtacccacctctcagaccagcgaagcaattcaatgggatgaaatatgacccgggcggttggcgcagtggtagcgcacttccctgacacggaaggggtcacaagttcgaatcttgtatcgcccacgaaagtcgaagcaattcgactggatataactgaagaaccgagtattcgggcgattggcgcagcggctagcgcacttcgttcacaccgaaggggtcgtaggttcgattcctacatcgcccactggattccgcttctcacggcggattcctttgcggacatagcttagttggtaaagcgcaaccttgccaaggttgagaccgcgggttcgagtcccgttgtccgctccacaacgaaacctcgcttcggcgaggtttttttcgtattggttcagatgctggtggtatttgtcgcacgcccaacctatcgtgtcctacgttgattaaccagtccaggcctgcacattagtaccgtgggccccgatagcaaaggacaaatcatggcgcaagctaccatctccataaccgtcaacggcgaagcgaaggaggtggaagcaaccaccaccggcgtagaactgttcgcggaagacaagaacatcatcgcggtcaagatcaacggcgagaaccgtgacctgtacacgccgctgaacgatggcgataccgtcgaccccatcgccctcgactccgaagacggcctcgcaatcatgcgtcactcggccacccacgtcatggcccaggccgtgcaggaagtctacccgaacgccaagctcggcgtcggccccgtcatcaaggacggcttctactacgacttccaggtcgaccagcccttcaccccggacgacctcaaggacatcgagaagcgcatgcagcgcatcatcaagtcctcccagtccttccgccgccgttccgtgactgaggaagaggctctgaaggaagaggccgaccagccctttaagatcgaactgatcgaagacaaggaagcacacctcgacccggccgccgccaccgagatctccgaaaaggagctcagcttctacgacaacgtagaccgtgatggcaatgtggtttggaaggacctgtgccgcggtccgcacctgccgaacacccgctacatcaaggccttcaagatcgagcgttccgccgccgcctactggcgtggttccgagaagaacccgaccatgcagcgcatctacggcaccgcgtgggccaccaaggaagacctcaaggcctaccagacccgtctcgaggaggccgccaagcgcgatcaccgcaagctcggcgccgagatggacctgttctccttcccggatgaaattggccccggcctggccgtgttccacccgaagggcgccgccgtgatcaacgcgatggaggactactcccgtgagatgcaccgcaagcaccactacagcttcgtgcagaccccgcacatcaccaagggcggcctgtacgagacctccggccacctgcactggtacaaggacggcatgtacccgcccatgcacctcgacgaggagaaggacgcggacggcaacatcaccaagccgggcgccgactactacctgaagccgatgaactgcccgatgcacaacctgattttcaagtcccgtcagcgctcctaccgcgagctgccgctgcgcctcttcgagttcggcaccgtgtaccgctacgagaagtccggcgaggtccacggcctgacccgcgtgcgcggcctcacccaggacgactcccacatctactgcacccgcgagcagatgaaagacgagctcaccagcctgctgaccttcgtgctgaacctgctcaaggactttggcctgaccgacttctacctcgagctgtccaccaaggacccgaacaagtacgtcggctccgacgagatctgggaggaggccaccaacacgctcgccgaggtcgccaaggaatccaacctcgagctcgtcgacgatccgtgcggcgccgccttctacggcccgaagatctccgtgcaggcccgcgacgccatcggccgcacctggcaggtctcgaccatccagctcgacttcaacctgcccgagcgtttccagctcgagtacatcgcgcaggacggtacccaccagcgtccggtgatgattcaccgcgccctgttcggctccatcgaacgcttcttcgccgtgctgctcgagcactacgcaggcgccttcccggcgtggctggcccccgtgcaggtgctcggcgtgccggttgccgacgagttcgccccgcatctggccggtttcgtcaagtcccttgaggacgagatggtccgttgcgagatcgactactccgacgatcgcttcggcaagaagattcgcaacgcctccaagtccaaggtgccgttcatcctcatcgtcggtgaggaagacatgaacaacaacgcggtcagcttccgcttccgtgacggcagccagctcaacggcgttccggtggacaaggcccgcgagcagatcctcaccgtcatcaagaagcgcgtccaggtgaactccgccgacgacttcaacgccgctgtggctgagtgatgtgaatggtactggctcccctctctgaggggagctggctccgtaggcgactgaggggagtcctgcatggctcgcactcccctcagtccgtttcacggacagctcccctcagagaggggagccaagaaagggtgcgaaaatgactgacgtgcgtgtcgataatccggcggactttccgcctcaggaggacacggtcgaacgactgtggactccgcagcgcatgacctatgtgctgcgcaacagcgaggatcgcccaaccaagcccaagacgaaggaatgcccgttctgcgccggacccaagaaatccgacgaagacggcctcatcgcctggcgtggcacgcacgtgttcgccatcatgaacctctacccatacaatgtcgggcatctcatgatctgcccgtaccgtcacgtcggattcatcaccgaactcgacgatgccgaactgttcgaattcgagaaggccaccaccctcgccatgaaggtgatggaaaccgtctcccgtccgcacggttacaatatcggcattaatcagggcgaagtagcaggcgcaggagtcgccgctcacctccatcagcatgtagtgcctcgctggaatggtgacgcgaacttcatgcccatcgtcgcccagacacgcaccatgcctattctgctgtccgaccagcgagaagcctatgcccaggcattcgaacagctggctccgcagtatcatctgccgcttgcctaacacaggtgcggcaccccgcgtgaccggtcttatcggtacgcataacaagacaatcatcggaaacatcacgggtatgtctgattaacggcctacaatcgtttcgtttgacatcatccgtttcaataattgctaggagcattatgtcaggtcattccaagtgggcgaccaccaagcacaagaaggccgccatcgacgccaagcgcggcaagctcttcgccaagctcatcaagaacatcgaaatcgccgcccgcctcggcggtggcgaccc

SEQ ID NO: 2187 - DNA, 11893 bp, Unknown
  R51_24m  MAG No. k141_20151
ctggctgaccgacacccccaacacgccggcctcgacctggctgattcttggctccgacgagcgagacggttccaccgattacggcggcgtggacaatatctcaggcttcagaaccgatacgattctggtgctgatcaagcccaaaagcgggccgagttcgctgatttccattccccgcgattcgcttatgaacgtcgataaccagtacatgaaaatcaatgcggtggcgcagattgccggcaagaaagccttggtaagcaacgtcgagcagattaccggccagaaaatcgaccatgtggcgcagatcaagttcggcggtctgcagaacgtggtgaacgccttgggcggtatcgaactgtgctatgacgaggatgttcaggattcctattccggactgaactggaaggcgggatgccatacgacggatggttccactgcattgtccttctctcgtatgcgatacgccgacgcgcgaggagacttcggacgcaacgaacgccagcggcaggtcatctcggccatcgtcaaaaaggcttccagcagtgggaccctgaccaatccgtccaaagtcgtggcagtgtccaatgccgcgatgagcgcactcaccgtggatgaaaaaaccaacccttacacgttgctcaccatggcgttggcgttcaaaagcgccaccggctcgaatggcatctccggcagcgtgtactggtccgaccctgattattacgttgatggcgttggctcctcggtgctgcttgacgacgccaagaacaccgaactgttcaatcaacttgccgacggcacgcataaggccggcaccgtgggcaatctggcggaaggctgaccgacgctttcccggagcccatcggcttcatcgtcggcgcatgatcgccaccattgcctacgccgccaatcatgcacgggcaaaatgtcatgtggataactcggcaagctagaaccacataccttgattcggcttgcgctttcggcatgcgttcccccacgctggaagcatggcatcacagcagaacgattcgaagcgacattccgcccacacggcatccgccgtatcccgggcgaagcaccgtttgggcgcgccgccattgcgcgcccgcctgaccatgcttgccgcggcgtgcccgatgatcgcgcaggcactgatgatggtcatactgctgttgcacgggcaatggctgttcgccgccatgatcacgccaggcatattcgcctgtctcgtgtccctgctgctgacgctccccccacctccgggcccggagaagacccccgccccgcaacaggcaacgatcgatatcggtatcacgaacgatgccgatgcccgcgccgcagacctccgtcatgcgccgtcgcagccgatagaatcgctgctgcacttcgcacgcctgccatggcgcaccattgtgggccattggcttgaaccccttgaccttgcggtgccgatcggcatgaccggaagcgagccgctgaggctcgatctgaaccgtcaggggccgcatgctctggtggccggcaccactggttccggcaaatccgtgttgctgcaaagctggtgtctggcgctcgcctcgatgaacgggcctgagcatctgaatttcgtgtttttggatttcaaaggcggttccgcgttccgcaaactcgaacggttgccgcataccgtgggcagcgtatgcgatctggatctggcgcatgccgtacgcgcgttgcgtgcgctggaagccgaactgacacgccgtgaacagctgtccgccgctgtccatgcttccgatatccgtgatatggtcaatccgccaccgcgcctgatcgtggtcattgacgaattccatgccctgaaggaccagctcccggattatgtgaatcgtctggtgcgtattgcctcgctcggcaggtcactgggcatgtatctgatcgcctgtacgcagaatccgatgggtcaggtcagtgccgatatgaaggcgaatatgtccgtcagcatttgtttacgggttcgggaccgtctgcaatcatgcgagctgcttggtgatggtcgtgccgccgacctcagtccggcaatgcccggtgcggcgttctgcaacgattccgaacaggtgacggcattccgctgtgcaacggcgcgcgatatcgatgcggtatgccgccagatcgcgttcgcatcgcggttcgtcgggagcccgccgcagccgtccctgtttaccgcgccacttccccggcacgtaaaagaccggactgtggccaatcacgcaccgcaacgcattcgatttggacttgccgacgatggcatcaacctgcgagaagcgacggtatccctcaccggtggcaatatcggtgtcatcggcccgcaggggcgcggcaaaaccacgttgctgaaaacattggctcgacacgccagcatggctgatggcttggcggtacgtgtcagttccccgcatcgccgggtatggggatcgcaatggcttcgcaacggccgctgcacgccgtatgccagctcggatgcaccaccgcctccgcatatcgtgtggttcgtcgacgacgccgatgagttgttcgacccattccgcaccgacgagcaggcgctgtctttcacacatgcgttggccgatgagtccgtcagcgtggtattcgccgtcagcacgattcgcccgatacgtataccagagcattgcaataccagaatcgtgttcccgtgcggggaacgaacgtctgaccttatggccggagtccccgctcgcctattggatacgatgagtcatatcgatgccgacaacgcgggccgggccgtgctcatcgagggcacatcggcatgtctggtgcagtgcgcttcgtgaaaacttcggttttttctcggcgaaacctcttgaaaatcaccacggttcgtggttaccttggtactggacttaaggaacaacaccagccacggggcttttaagggaggcaagcaatgagcagcgcttttgattggcgagccaaggccgcatgtcgtgacaaggatccggaactcttcttcccggtgggcaacaccggtgcagcctatcagcagattgaggaggccaaggccgtgtgccgcacctgcaaggtgattgatgcatgcctgaagtgcgctctggacaccaatcaggattacggcgtgtggggcggcttgagcgaagatgagcgtcgtgcgctgaagcgccgcgccatgcgcgcccgccgttctcaggccatgcagatgcaaatctgatgttttgattatcgcttcgtcatactaggaaaccctcccacttgggagggtttccttatttttgggcttcgcatcactcatcctgagcggccctgagcttcatatcaagcaccacgcgggtgccgcctccgcggcgcggctcccaatgcacggaaccaccgaaatcattggtcacaaaggtgttgatgatctgcgtgcccaaaccagaaccggaagaacgagccaatcctccctgttcttcggagccgagaccggaaccgtcatcctcgaccaccacattgaggttcgggccggagcggcccacggaaatcgtgatatggccatccttgcggccttcgaacccatgctccaccgaattggtgatgagctcggtcagcacgagggacagcggcgtggcatcctgagcgggcatcatgccgaacttgcccatgtagttgatatcgatgtgctggtctttcatcgtggctaggtccacggccatgcgcagcaggttggcaatcaccttgtcgaagtcgacgacctcgtcggcggtctggctcaatccctcatgcaccatggcaatggtctgcacgcggcgttgcgcctcctgcaattccttcttgacctcatccgacttggtcttacgagcctgaagcctcagcaatgcggagacggcctgcaggttgttcttgacacgatggtgaatctcggaaatcgtagcgtccttggtctgcagctcctgctcacgacggcgcagctcggtgacgtcacggcatagcagaatcgctccgatacgaccgttgttgtcatataagggcagcgagcgtatcgagacggcggaacggttggcgttgagttcggagtcgaccgcggctttgcccgccagcaccaacggcagggtttccggaacggggtcgttctccttcaacagctgtgtgccgagttcgctgaggtaatggccaggcatggtggtcagcaggccgagacgcctaaagcagctgatggcgttcggggctgcgtatcgaaccacgccgtccatggtcaggatgatgaagccgtccgccacgcgagcgatatggcgctggctcatcaccgaatccttgtaggggaactggcctcgcggaatcatctcgtacagctgtttgcccgcgttaatgctttccgactcatatcgaccgttggattctcgtgtggccatattggtctcacgcacgaccaagcccaaggtcttgccattgtgccgaaccggcgcgtacacgttgcagacggtcgccttgcccacggttctcaataccgtggagcggaacaccacgctggagagcatggcggcgtccaattcgccgaccatgtcatccggcatgacgtttcccaccacgtcttccgcccgtagcgtcatcacggtggatgggcggcattgttcggccaccacgtatttgccgtcaccgttctgtaccagcagcaacaggtcggcaaagctcagatcggcgatcacctgccaatcggcaacgagatgatgcagccactcgcggtcctcgtcgtcgaagtcggggcgcgttgcaaggatgtgtgaaaaatcagccatgcccctatcatacgcagacacgtcgccgccattgcggcaagccacacgggcaagtatgacgactattacgacatcgcatcttcaataccgcaccaatcgcgttgcacggctgcccaccgttcaggcggtcatcgcctcatacacctgagaggacaatgcggcgatctgctgctgcgcggttcccgagaccactcccgaggtcataaccaccatcacataatcccgttctgttccgtccgcggccttgccccacaccacggcggcatcattttccacgccggccagttcaccggttttattggccacctgaatgccagacggtactccggcgggtatcttggcgcgtcgcgtctgcccgagcaatacgtcaagcatggagcggctggcttcggcggaaaccagtttgcctcggtacaatgcagcgaggaatctgccgcaatcggaagccgacgtccagttctcggtgccggtcccgtctgtgccggcatcggacaacacccgcaactgcttggatgagctgaagccgtatcgggcggccgtaccagtcacccgttgcatgcctgtggccatgtcgccatcgccgaccatcaataccagctgattggtggcagcgttcgagctgacggtgatcatctggttgatcagcgaggtggtatcttgcccgcccgcggccaaggtgccggcatgttgcttatcgtacacggcaagcatcacgtacagtttgatatccgaagccgccaccatgggctggccgccgacgctcacggttttgcccgtggccagatcctcgacatacaccgaccaggtgcctccattgccggccacagctgccgtgaccgccgaggacacatctgacatccgcttctcttccgccaccgtggtcaggtcgggagcaggtgccgccttgcgctccaaggtgtcatgcacagggcgttgttcgtgtttcgatgacgccgttgacgacgatgccgacgctgttgccggtgagtccgatgccgaggcgacgggcgatgttttggcgtgcgatgcgccgagaccgttatgcgcgtacatccatccaccgacgccgattaccaaagcggcgatcagggcggcgatcaggatcaatcccacgacgctgcctgttgcacgcgtgtcgctactatgcttggtatgccgagccaccgtcactgccccaatgtcttgtcaacactggccagcacccggctcatcaggtccgcggccaccgactgcccctgatattgggtgacaacggccacggcggccttatgaccattggcttcgacgatggcgaagtaattccaggtgtcctggatgccttggcctcggtgggcatgcacgatcatgtcggacggaatggttacgccttcggaagcaatgtccgcgttcatcaatgacgcgcctcccttggcgtccactgcggcgagcatgcgggccgcatcgcgggaggaactgtaattctcataaccggcattgctggccgccacatcgccgaaatcgcggttgaacgaggtgcccttatacccatgcgaagatgcccacgaattgacgccgctccagccacctaccgccgcggccgccatattgccggcattgttgtccatggaacccatcatcgcgtttgcctgcgctttggcgttgtcatcgccattgtcctgggccgcaagatagaccggcagatagagaccggcagccacgaattgcttgccggactgcgacgtggtcgcgatggtggcgtcctctgaggaatcggcgtatgttccatcgatgaccatggcggagacggccacatcggaggacgagtatgaatccgcgatgtcagacaactggctggatgtgatcaccggagtggaaggcttcgacttctccgtcgagcttttcttggacgaatcgtcgctgttcttgtctttggcgctatcagacgtgttcttcttggccttggacttggcgtcagaggaatccgtcgtgccatcatcggcggaatccgacgcatcggacccggtcgactgtaccgatgtttgcgcctgcggctgagctccccacaatcccatgctatgggtgacgaacaagccgatgaccaacgccacgacgcaaatcagcgcgatgagcacaatcaccaccgctttggtgtgatcgccgccaggacgcccggcgggaggttcaggagaagcaggtgccgcagggccagcggtcatgggtcccggtgccataggccccggcaccgcggaacccggcgccgttggcggcgcgacggcgggcaacggcgccgccggctgcttcaccagcgtcagcgcgttatcgtcataggcaggggccgccggattggcctcgggctgctccaatgggcttccgcactgcgaacagaaggcatttccttgctcgttggcaaacccacactccgtgcaatacaccatcaccgaacccctttttgctgtgacgttctcatcttcggattccatagtatcgccaccattgggtgatagtgttcgtgtgagtcggtattgacaagcataaaagttacgctaacgtaggttacggcagcgtaagaagcgtatcgtcaactcgtgaaacgggggcatcaccatggcatcaacaaccgacgacgcggaaaagacgatgcatcacgacgctcataacagcgcgacgattgcagaggatgccaccatcgcatccaagcgtcaggcggctatcgaggcgcgcgaacaggcgttgcaggccaaggctgatgccgtacgggccaaggcccagttcaaggccgaggccattcgagccaaagccgaggagaaggcccggcacaagcttgccaaagcggagcaccgtgcgctgaaaatcgagggcattgcccctgcggaagtggaacgcaagattcgtctcgacgtgcacggacgaccaaagccgttgatgcgcggctggattcacgcgattgccgctcccctgtcattggcggcaggcatcgtgcttatatgcctggcacatggcgcgagtctgaagtgggcgtgtgccgtgttcatgacagcgtcgctgattctgttcaccaattcggcctgctaccatctgggcgattggagcccgcgcgtcaccgatgtgctgcggcgtatcgatcatgtcaacatcttcctgctcattgccggcacgtataccccggtctcgtttgcgctggaaccgttctggcgcaatgtgatcatcatatcgatgtgggcgtgcacggccatcgccatcgtgattcatgtgatctggatcaatgcaccacgctggctgtatacggtggtgtacatcatcttcggcatctacggcctggcttatatggtgatgttctggaattcgccgtatgcggggccagccgtggtggcgctgctgtgcgccggcggtgcctgctacatcctcggcgccatcgtctacgccttgcgcaagcccgacccttggcctcgcgtcttcggcttccatgagattttccactgcggaacggtggccggatatgcctgccatatggtggccatctacatggtgatcgtctcgctgtggcaataaacgctacgacatataagtatgcccccgcctacgggggcatactagtcacttataactcaggccagcggcttggcggccttgaccgtcacggacagctcgcggccgttcggtgcggtgtaggaaacgacgtcgcccaccttggcaccttcgatggccttgccaatcggggaatccggggtcatgatgtcgtagtcggtgccggccacgatgtcacggctgccgagcacgtaggtcatctcgttgccgttgagctcgatggtcaccacagagccctcgcccacggtgccttccggggcattctcgatgatcttggaatcgcgcagcttgacggtgagctcggtgatgcggccctcgttcttgctctgcgcctcacgggcggcctggtagccgccgttctcggacaagtcgccctcggcacgcgccacggcgatcttgtgcgcgatttcctcacgcagctcgccttcacgatgggcgagctcttccttcatcttgttgtatgcttcctgcgtcagcaggtagaccttgtcctcagccatatcgtcctcctgaaccgttgtcgatgctgaaacaattttcgttatttatgacaaaacgccggctatgaccccggcgttcgtcatgtgctgacctatggtcagcgggtggaaatgatgtcgatgacgaacaccagcgtgtcctcgccgccgatgccggcctgcgggatgccgcgggaaccgtagccgtattccggcggaatggaaaccaccagacgcgagcccacgttatggcccggcacggtctggtcccagcccttgatgacctgtcccacgccgatgccgaagctggcgggctgatgacggtcgaagctggagtcgaatggggtgtccttaccccacaccacgccgtggtagttcacggtgacggtgtcgccgcgacgcacgatcgggccgtcgccctcggtcagctccacaaccttgaggcccttcggggcttcgggcgccgggaactcgataacgggcgtggtgccgaattcggcgttcacctgaggcatctgatctgccattagtcctccttcaaagacacaatgcgccctaccttagcaccatcggcgaatcggcggtagtccttcatccctgtgcgatacgacacgctggccgtatacgtcaattccggtcatcatgctggtgaataccagacatgtcaatcagcattcgacgacattgacggcaagcccgcccttggaggtctccttgtatttggccatcatgtcttcaccggtctgcttcatggtttcgatggcctgatcgagggtcacgatgtgtgagccgtcgccgagcatggccatacgcacggcgttgatggcggtgttggcggccatggcgttgcgttcgatgcatggaatctgcaccagtccgcccaccggatcgcaagtcaggcccaagttgtgttcgatgccgatctcagcagcattctccacctgttccggcgtgccgcccatgactgcggcaagtccggccgccgccatcgaacaggccgagccgacttcgccctggcaaccgacttccgcaccggaaattgaggcgttgcgtttgaacaggtatccgatggcaccggcggtcagcagaaacgtgaccacgccctgttcattggcgttgtccacgaaatgccagtaatagtgaagcacggcgggaatgatgccggcggaaccgttggtcggagcggttacgatgcgcccgcctccggcattctcctcagagacggccaaggcgaagagatccacccatgcggcgtcggaagactcgagcacggcgtctttgcgccggctgtcgcggcgcagcacatcggaattcgaagcgagacgccgatacatcttcggcgcgcggcggggtacgtcaaggccaccgggcaatgtgggctccgccgaggtgcatccgtggtccacgcaggcgcgcataacacgccagatggcatcaatatcggatcggacctggatgcctgagcgtgaagcggtttcgttggcccatacaagttcggcgatgctgagatgatgttcccggcacaacgacaccagttcggcgcatgatgagaacgggtagggtgcctcgacgccgaaatcagtggatgatgattcgtccgcgtcggcaaaggaggtgccttccggaggacgttcatgaatgccgatcatcgggtcttcgggagcgcctttgcgcacgaatccgccgccgatggaataccagacctgttcgtcgaccaagcttgcggcggcgtcgaaagcctggaatcgcatgccattggggtgcgcggccatgcgcttccattgttcgaacaccacgtcgcggtcgtagtcgaaatggatgcgtttgaggccggcgaggttcagagtatcgtccaacgcgcaggtctcgcggatgcgcatcatgtggtcggtatccacggtggccggcagattgccttcgagcccggccatcgcagcacgatcggtgccgtggccgagaccggtcagcgccagagaaccgtaaagcgtgattttgacacgtgcggtgcgatcgaccaaatggtcggccagcaacgaggaggcaaaggcatgtgccgcgaccatcgggcctacggtgtgcgaggatgaaggtccgacgccgatggtgaacatgtcaagcacactgaacatttggctccttctcccctgctggttcggcatgccggtgtcaccaggcgtcatgccatcacgatatcgtattccagcctagcgcccggaatctttcgctttgcgcgatgatggccgcgcgcgtcgtgccggcgagcgataagtcagtcagtgagatagtgcggagaacatcataaccagtacgatgataccgatgatggccaatacgatctgcaccaccatcagcccgatggtcagtcccttcttggtggcgattttgggcgcgtacgcctgtgccaacaggaaggcgatgaagccgaacaccgcgtagttgacggtcagggccatcacatcgctgttcgacaacaccacgccgttcagcggctggttcagcgtgttcatcatcgtgctcatcacgaacatgccccacacgccgtagccgattaatccgacgacgccgtacagccatggcttgagtttgtcgttggcacgcagggtcagggcttcggcacaccacaacagggcgaagccgacgatgtaggtgaacgccacggcgatcagtatcacgatagtcgtccacggcaggagtgcggccacattgccgatcatggacagatagaatcccgagcaggcgatggcaccaacggtgagtgcagtgcccgcaatgacggcttgggcaagcatggtgggcagggcgccttgttcgactcgttcgacatcggtccagcgtgaagccatgtggattcctcgtttcatcaggtacatcatcacaacgccacatagcctaacggccttttgtttcggccttataagctctccacatagtaagctgcgagcccctctgacgaggggagctgtcggcgaagccgactgggggagagaccgcggcacagccgcaaaaaacggcatcggccacaggccgatttcaaggtgcctccggtgggactcgaacccacaa

SEQ ID NO: 2188 - DNA, 15511 bp, Unknown
  R51_24m  MAG No. k141_20896
gaaggacttgtctacggacgccgcgccggtcttgccgccgtcgcggacggtgacgacgcggtctgggcacccgaaccgttcctgaactccgccaccggtgccgtgttcgaccatgcgccgatcgcgctggccgctcctgccgctacggctgctgctgacgataccgccgccgacaaggtgtgggaccgtacccgcatccagaacaccatgtggcatggcgtcggcgtactgcgcgacgaggccggactgaaaaccgccatcgccgaactcggtcaaggcctcgccgccgcaaacgcccaggctgatataaacgccgatggcgctgcaagtagcgttgaggctttggagaaccgcaacatgctcaccgtaggctatgtggccgccaccgccgcgctcgcccgcaccgagtcgagaggcgcccacgcccgcaccgactacagcgagccagtcgacaactgggcccactccgtcgcctacatcaaggactgacccatgctcacatcacacatcatccgcaccgccgtcgaagcggcgctcgccgaagacgcgccctacggcgacatcacctgcgagaccaccatccccgcggacgaaaccggctcggcccacctcaccgcgcgcgaaaacggcgtgatgagcggcatcgacgtgttcgccgcagccttcgccgcgcagaacccggccgtcaccgtcaccgccgccatcaaggacggcgaacgattccagcgtggccaggtactcgccaccgtggaaggtccggtacgcgacctgctcaccgccgagcgcatcgccctcaacttcacccagcgcatgagcggcatcgccaccatgaccgccgctttcgtggacgcggtgaacgccatctacggcgacgattatgacggacccgtcacccggccgcgccgctacgagcgcacccgcatcgtcgatacgcgcaaaaccacgcccggcctgcgcccgttcgaaaaatacgccgtggtctgcggcggcggccacaaccatcgctacggactgtccgacgcggtcatgatgaaggacaaccatctggcggcgctcgccgcgcgcggcatcgacctggccggcgcgatccgccacgtgcgcgaacaggtgggccacaccacgcatatcgaagtggaagtcgaccgccttgaccagattcccgccgtgctcgccggcggagcggacaccatcatgctggacaatttctcgctcgacgacacccgtcgcggcgtggagctcatcgacggcaaggccatcgtggaagccagcggcaacatgagcctggagcgagtgccagccgtggccgccaccggcgtggacgtgatctccgtgggcgcgctcacccactcggtgcgcagcatcgaccttggattggattggaactagtcatggccgatacccccaacgcatccggtgaacccggcgaactgtacctggacgccgccgccaccgaaccagtgagcccggcagtcatcgaggccatgaccccgttcctgactgaggcctacgccaatccggccagtgtgcaccagcccggtaaaaccgcggcccgcgcgctggacgcggcccgcgcatcattcgccgcggcattgggcggccggccggatgacgtgatcttcacctcaggcggcaccgaatcggacaatctggccatcaaaggcatcgccatggcgcgcatgcgcaaactgggcttgcggccggtctacggactcgacgaaaccgatggcaaacaactggcaagcagccgcccgcgcattatcatttccgctatcgagcacccggccgtggcccaatcggcggcatggctgcacgaatggttcggtttcgaagtcgtgcgcattcccgtggatgcgcaagcacatctcgatctcgacgcgctcgaacgcgagcttgacggcgaggccggcgaacgtaccacgctggtctccaccatgctggccaacaacgaggtcggcaccgtggaacccgtggaggaactggtccgcatcgcccacgcgcacggcgtgcccatccatgtggacgccgtacaggccgccggccagattccgattcgttttcgtgactgggatgtggacgccctgtccgtatccggacacaaattcggcacgcccaaaggactgggcgcactgctggtacgcggccgcacacccatcgaaccggtgctgtccggcggagggcaggaacgcggcctgcgctccggcacacagaacgtggccggcgccgtggcgcttgccatcggactcaacgaatcgaatgcgcgcatgcaggtgcagtgccgtgagttggtcgcgtcccgagacacgctcatcgacgcggttcgccgggtcgcgcctcgcgccgacctgaccggcgaccccgaacgccgtctgcccggtcacgcctccttcatcttccccggcgtcaccggggaagcgctgctcgtcgacctggacgcgcgtggcatcgctgcctcatccggctcggcctgcgccatcgggcgccacgagattcctgccacgttgctggcgatgggcctcgaaccgtccatcgccaaatcggcattgcgcatgaccttccgcaaaccgctgacccgcgaacaagtcgaacgcatcagcttggccatcgaagagtcctacaccgacctgacccgacactaaatctgacgccacttaccagaaaggaaacgacgtgagcaccaccactccagcgcaacccgcgcagctcacccgcaacgagcgcctcgaccggctgcccttcaacaaggcgcaccgtaaactccttgtcgcctccggcatcggctgggcattcgacgccatggacgtcggcctcgtttccttcgtggtcgccgccatcgcagccgacccgcacttcaacctcaccccgaccgaaaagtcgtgggtgctgtccatcggcttcgtcggcatggccatcggcgcggcggtgggcggcttcatcgccgaccgcgtgggccgcaaaaccgtgttcaccgccacgctgatcatcttcggcatcgccaacggcgccatggcgctgtcctggtcgctcggcatgctgctcggcgcccgactgatcatcggactgggcttgggcgcggaactaccggtcgcctccacgctggtctccgagttttcgccgaccaaacagcgcggccgcatgaccgtgctgctggaatcgttctgggccgtcggctggatcatcgccgccataatcggctacttcgtgatcccgaacaccggtgactggggctggcgctgggcgctggccatcggcgcgctgccactgctctacgcgattgtcacccgtgtgcacatcccagaatccgtgcgattcctcgaagccaagggtcgcgaagacgaagccgaaaaggccgtgcgctacttcgaggaagccgggggagtggccccggtaacctctcccaagggcaagccgctgccgaagatcaagacgcgcgagctgttcggctccaagtacctggcccgcaccatcgccatctgggccacgtggttcttcgtgaacttctcctactacggcgcgttcacatggatgccgtcgctgctcgccgaccagttcggctccctgaccaagtcattcggctacacgctcgccatctccatcgcccagctgcccggttacttcctggccgcctggctggtggaggtctggggccgccgcaagacgctgagcatcttcctggccgtctccgccgtggccgccttcgcgttctcgcaggccggatcagcggccctcgtgctcgtgttcggcatgctgctgtccgcctccaacctcggtgcgtggggcgtgttgtacgccgtgaccccggaaatctacccgacccgcctgcgtggcgcggccgccggtgccgccgccgcggtgggccgcatcgccgccatcatcgcgccgctcctcatgccgtggttcctgaccctgtccggcggcaacaaggccgtggccttcatcatcttcgccgccgccttcatcctcgcctgcatagcagccctctgcttgcccgagcgcaaaggcctcaatctcgaagactgattacacttcagccttcgctactaaagtggcccacaccaatgtgtgggccactttttgtcttatagctcccgaatgacacggcaagggttgccgtatgtcactgatcaatcgagggaacgacgggtgagattgcgcggtggttttgtgaccagccacgccaccagcagtccggttaccactacgccgaatgccagcgccgcctgcaatccccagatcggcacggtttccagccaatgaccgtccacaccgatcctgcggttccatgccacatgcagccatcccaacgccacgccggataccacgcccactggcgcgccggccagcagaatcaccgcagcctgcgtcaggccgtaacgtctgaggaatcggggtggcgcgcccacggcgaccatcgtggccatgtcgcgctgggcctgcgtgcgggccagcagcagtgaaacgagcgtggccatcagtgccagcaatgccaacaggccaatgggcaccaatgccatattgtcaccccacggcaggcgattcccgtcagtgctcgtggatgccagcggcagattttcgattgcataagctgaggccttctttacggtaacgggggagttgccaccggcgaagtctagatactcacccagatactgcaattgtttgatgccgagcgcctgtgctgttgccgggctcatcaccagcgggtacgcgccgcgcacgtagatggccttgcgcttctcgatatgtgtggcctgagattcgtttgcaattgccggattcggcgaaatggccacacgcaccatacctcccgcgtcgattgtgccggcatcgccgaccaccacaccgcccgcatcaagcacctgtgccgcctcatccgcgttcgggaagccggacaaacgcatcgcattgccatccataatgagattcacgccgcggaaactcggcagtatattcgaatacgttggctgatgggatcggtctatcggcacacaacgtatcggaacgtttgggtacagggccgaagcggcatcctggcccacccatgtggacgtgtccggttgctcttgaatcgttgggttatcacaagtgtgaccggccgggagcaatgcagcggcatacatgtagccgtgttcggcgttcaacttgtcggaatcgacttcggtcgtatcattgagctttgaccatcgcttgacatcctcggtgtacaccgggtaatgagcgcgtatcggcgtctctttgccaagccggtgtatcgcatccgacaccacagcacggtcgaactcattgctgacatgcacgtcggccccaatggccatccccgacggtccatacgtcatcgtcatcgtggaatttcgctggtccgccaccatggagccggtgattaccagtgtgtacgaggcgatgcacatggtaatcagcaccgcgcatgccgccggaacgaaccgtcgatgatgctcggctgcatccctgagtgccaggcgtgcgccgatgttcagttgggaacccgctttgccgcaccaccgtgcaaaagtgcgaatcgacaacgcaagccctatgacagccaacaaaatcgtggcaacaagcagagccatatgcgcttcggttccggccggaaccgcgcccggattgtgatcggccagcgtgggcaatggcaatgtcagactgagcgcggcgcatacgatggcggccaagaccagaatcggaccaaccgcaacacggagcagtctcaaaggattacggcgaagcttcgtgtccacgccattcgcggattcaccgtagccgatttcctctcttgtcgggcgatccttcaacgcatcgactggatgcatacgcgccacatgccgagccggcgcaatcgtcgcggcaaatccaatgatgattgccgtgacaatacccatcggcagcgagccccacgagaatccgtgcaggatctccagcggcgtggatccacgcaatgcgcctatcgcagggccggccgccaaggtaagcgcgaatcccaatgccgagcccagcacgccaccgatggcgccgataatgagaccttgcgaggaaatgattcgactgaggtcacgtggtgcagcaccggatgcggccgcgagcccaagcacgcgacgtgactgatctgccgacaccgtaaacgcgggcgtgaccagaaacagtaccagcagcatacccaccagcatggtgatgaccacggtgaccatgtggttcaacatggtagccgcatcgatctgcatcgggtagagctgcgatgcgggcggatagccgtcagtcagcacatggcgggaaatgacgatggcctgcaacaggttcatgctgcgggtgtgcgcccacgtgaccggctctggaccgaccaccaaataatggccatccacgccgacgccatcagattccaatatggctgacatccagccttccaagccccatgccgcggcttcggattcatcggtcagcccgctgactgtccaagcacgctgagtgtcggccaccgcctcgccgatgcgcccgtcctggctcatccagccatcgaacggcggagcgacgaacgtcaccgtgctaccgagagaagcgccgagattatccgccaatgtgcggctgatgacaatctgcgtattgttctgcggcgccgaacccttgaccagcttcggcaacattcgttgcaatgcctcaggtgaagcctcggtcatggtcgcggtggaggccgcgttcagatcaatgtcgttcccgcttttcacgtcgatcccagccttggtctgttcgccgggttgcaacgcggtgccggtgatggcgatgagttcgggcgactgccaatacgggagcagccgatcctgttgcggcagaatcttcgcaagctcggcggccgaggccggctgctgggagggatcgtcctgccacgtgccgccgctttcgggtgactgccggaacggttggccggtgcggggcctggcggtggcggtgatgaccgcctgcgtatcagccgggattgtcgccagcgcacgcgatctggtgggcggtatggtggtggtcataccgatggaggccaccattgcggcgattggcagcattaccagcagcaaggacagtagggtgcgggccttgtgccgtagtgcgtcgcgccagccgagtcgcagcgcggcccgataccggttgcaacgtgcgccaaggcttggcctagcggcatggggaatttgggcagagcgaccgacggtggcattggcaagattattgagggctgcgcgtgccatcatgctcccctttcctcaaggttgagcaaatcatccatattgctggagccggtttcatcgatgatacagccgtccttcaaaaacaccgtgcggtcggcccaggcggcgaagcgaggctcatgagtgaccagcagtacggccgcgccgcgatctgcgcgggtgcgcaacacttcgagaatcgtcatgccggcattggaatccagagctccggtcggctcgtcggccagtagtagacggcgtgggccgaccagtgcgcgggcaatcgccacacgttgcgcctggccgccggacatgtcttcaggtcggcgatcagccatatcggctacccccacttcattgagggattgcatcgcggcctcacgtgccttgcggggattccagccatccaattccaaggggaacgacacgttctcggctgcgctcagggaaggcagcagattgaaatcctgaaacacgtagcctatcgatttgcggcggatggccgcgcgttcggccactgacagtgtggccagatcgcggccttcgaccagcacgtgcccctgcgtgggcacatcgagcccgcccgcaagattgagcaaagtggatttgccggaaccactggggcccatgatggccacgaattcacccgggcgaagcgtgagattggcgtgactgagcgcggtgacacgacgtgcatctttgccgtgaacgcgagtgacgtcgtgtaattccagcgcgcatggggaagattgcgggagagaagaaagaacgggagaagtcatgatgtgctcctatgcactattgaatggtggcggtgagtgcggctgagcttgccgtgagaggtgccgaaacggggtgctgcgccagttgtgctcgcagctgggtctcatccacggtatcgagccagcgcaattccgcttcagtgatgaaaatatggtggtcgagtactagacgtgtggcgagttcggtgggcggtgtttgccggcgcagtcgggtgatgtcgtgcagcagttgctgcaaagcgtggcgttggtgttggatgagttcggaaacatcgaggccgggtatttccacggcgacggccagcttcatcaccagttcgtcgcgtccgcgttgttccggggtaatgggggagcgccaccatcggtcaagctcttgggcgccggaattggtcaatcgccataatggtgcggccgctgcggtgccgacatcattggatccgctagtagtcggcgcggtctcttcaataagcccgtcgcggttcaaccgctgcagcgtagtggaaacttgccccatattgagcggccaagtcagaccgatggtgcggtcgaagtccttcttaagctgataggcgctggccgggcctcgctccaacagtgctaatagcgcttctctgattgccataccgcatcccctttgcatagacggtttgccttgggcgaaggttactgagtaactatcgttggatatcaggttactcagtaactacccatgacggtgctgtactcagggatgattcaggggagattcaggggatacacttggcgcccctcagttgcccacggcgacagctcccctcagggaggggagtcgagagtgtggaatacaaaaagtctcgcaagccagatgacatgtgactaattctcagaaagccgggcccgttgtgtgtcaaggtgtgccagtaacatcgtgacggtttgtgtgtaggtacaggttgatatccaagagcaagtactcgagaacgcaagtaccgaacgattacgcaagaaaatcagtattaagagaggtttcgatggcggttcgtggagatatccgtaatgtggcgattgtggctcacgtcgatcacggcaagaccaccctggtcaatgccatgcttcagcagtcccacgtgtttagcgagcgtgaggaagtgccggatcgtgtgatggattccaacgatctggaacgcgagaagggcatcaccatcctcgccaagaacacggccgtggaatacaccggtccgctggccgccaagtacggccacccggagggcatcaccctcaacatcatcgacacccccggccacgccgacttcggcggcgaggtcgagcgcggcatctccatggtcgacggcgtcgtgctgctcgtggacgcctccgaaggcccgctgccgcagacccgcttcgtgctgcgcaaggccctcgaagccaagctgccggtcatcctgtgcgtgaacaaggtcgaccgccccgacgcccgtatcgaagaggtcgtcggcgaaacctccgacctgctgctcggcctggccgacgacgtgcagcacgagggcatcgacctgaaccttgaccagctgctggagatgccggtcatctactgcgccgccaaggccggctacgcctccgtgaaccagcccgccgacggtggcctgccggacaacgacaacctcgagccgctgttcgaggccatcatctccaccatcccggcccccgaatacgaggaaggcgccccgctgcaggctcacgtggccaacatcgactcctccgacttcctcggccgactcggtctggtccgtatctacaacggcacccttgagaagggcaagacctacggcctgtcccgtgtggacggctccctcgagaacttccgcgtctccgaactgctgcgcacgcagggcctcgagcgcaccccggtcgagtccgcgggccccggcgacatcgtggccgtcgccggcgtcaacgacatcatgatcggcgagaccatcgtcgaccccaacgacccgaagccgctgccgctcatccacgtggacgatccggccatctccatgaccttcggcaccaacgactccccgctggccggcaccgagggcaaggaccacaagctcaccgcccgcatgatcaaggaccgtctggaccgcgagctcatcggcaacgtctccatcaaggtgttgcccaccgaccgccccgacgcttgggaagtccagggccgtggcgagctggcgctggccgtgctcgccgagcagatgcgtcgcgaaggctacgagctgaccgtcggccgcccgcaggtggtcaccaagaagatcgacggtgtggtcaacgagccgatggaaaataccaccatcgacgtgccggaagagtacatgggtaccgtcacccagctcatggccgaccgtaagggccgtatggacggcatgaccaaccacggctccggttgggtccgcctgcagttcaccgtgccgtcccgtggtctgatcggcttccgcacggctctgctgtccgccactcgcggcaccggcatttcctcctccatctccgctggctatgctccgtgggctggtgccatcaccattcgtcagaacggttccatggtttccgatcgtcagggtgtggccactccgtatgccatgcagcgtctgcaggcccgtggcaacttcttcgtcgaaccgcagtccccggtgtacgagggtcaggtcgtgggcgtgaacaacaagcccgacgagctggatgtgaacatcacgctggccaagcacatgaccaacatgcgttcctccaccgctgacgtgctcgaaaccctgaccccgccgatcaagatgagccttgaggagtccctggacttcgccaacgaggacgagtgcgtggaagtcaccccggagtccatccgcgtgcgcaagatcatcctcggccgtgaggactggtacaagtggcgcgccaagcagcgccgccagaacgccgcccagcagggtaagtgatctggtgcgactgtagccgaccattctctctggctcccctctctgaggggagccaagtttattcctcgccaagtcatatccccacctatactgaaacgcatgactgtgaagagcactactgaactgcgtccgtggtcgtatcgccagaacgcgctggtcaaatcgttgatcacgattgcggcgggcgtggcttccgcctttgtgggcacgttcgcccaccgtatgggtgcagaactgagtattccgtatggtctggtgctggcatttctgctgatcggcctatcgacatggtgcgcccgttcgcgcatgggcacggtcggactggccctgcacctcatcgcctcctcgctgaccgcatggggcatggcactgaccatcacatccggcaaagcgctcatcgtcgccggattccaaggcgacatgccgttcttctcccagcatgccggctacatctggctgtacggcctgatactggtccaagtcgtcctgctcattcttcccgcccgctggttcgttattcccactcattctgaatcgcgcgcgtaactatatatggcggcacatttccgggaatgcgtcgcgtatcggcgggcgtaggggattacggccgctaccatagaaccttatggcacgcatgaaactgttttacttgggcccggaaggcaccttcacccatcaggcggcaatgacggccgccgaccagttcgccacactcggcgacttcgacctcaccgccctgcccgacgtgcccgcgatcatgcaggccgtacagtcgcgccaaggctggggcgtcatcgcatgggaaaacaacgtcgaaggctatgtggtcccgaatctcgatgcgctgatcgacgcccccgacgcggccggcttcgcccggatcagtgtggacgtggccttcaacgccttcaccgtgcgcggccacagcatctgcgactgcaccggcaaccccgtcagcgcccacccgcacggcctggcccaatgcacccggttcatcgccgaacaccatttgcagcccgaacccgcatcctccaacgccgccgcctgccgcgacctgaagcccggccgcgtggcgctcggccccagcatctgcggcgaactctacgatctcgacaccctcgccgaacatgtgcaggatttcgatggcgcgcacaccgaattccttgtcatcgccccgcgtgatgtggtccaggaattcaacgcccgcgcccaccgcaatgacgtcggcgacttcgaaaccatcatcaccttcatcccgctggtcaccggccccggcgtgctcgccgacctgctggacgtcctgcgtgatgcggggctgaacatgaccagcttcatctcgcgcccgatcaaaggccacgacggaacctacagcttcatcgccacccttgacgccgccccctgggagccaagattccgcaccgcactggaagagatcgccggacacggcgactgggcaaaaaccctggccgtctacccacgccgcgaacgcccgaacccgccggtcgacgcctggatgctgcccgagggcggcgtccacatcaccaatcgcgcgtcggaaggctggcagtacgccgagggagcaaggaaggaactgctgtggtagacacagtcggaatcgtcggactcggattgattggcggctcgctcgcacgccgcctgaccgagcgcggtgtacgcgtcatcgcgtggaaccatcgctcgcacccctacgcccaggccgaagccgatggcattttctgcaagagcacgctctccgaactcatggatgccgagccggatgtggtcgtgctgtgcaatccgctcaaggcgatgccctcaatcctcgccgccctagccccgcttatgggcgaccatccgaacaccacgctcaccgacgtgggctcagtcaagggcatggtccgcgatcaggtcaaggctgccgcgctggggaagtgctatgtcggcgcccatccgatggccggcaacgaactgtccggctggcaggccgccgacccgcatctgtacgacggtgccctatgggccatcaccgtggacgagtccacggactaccgccgcttcctcgacgtcgccacgatgatcaccaaggacgtcggcaaccgcgtcatcgtcgtggacgacgaaacgcatgacaaggccgcggcgatgatctcccacatgccgcatgtggtgtccaccgcgctgatcaacgaactggtcgccaacccggaccgcaacatcgccgccgcgctggctgccggctgctggagggacatgacccgcgtgtccctgaccgacccggaccgcacgcgcgcgatggtcgaggaagactcgctgaacgtcgaagtgctgctgcgccgcatggcggcacgtctgaccgatatggccgaccaactgcacgctggtgccgacggcgagcaggatgtgatgggattcttcgccgaaggcgaccccttccgccggtacaaggccgccgtgacgcgagccggcatcaccgctgcacaagctggtacggccaccgcgcagcaagccggcacaactgccgccggattcccggaacgcgagctcgccgtccccgaagccggctggcagcagaccttgctgttctccgcacgccggggagaagccatcaccggtttcatccatccgcgtcaggccatcgtccaactgcgccccgccatgtaactgcgccccgccatgcagcccgtgtgcaggttcccctcgccgcctgtcacgaagaaggctgcgcgagggggatgaagttcccgcttgttttcgtgagaagaccgtgtggctccgctgttcgaaagacccaaaggagtaaggtagtctgtaccgtttttcaggaaacgcatagaagttgatgcggcggatggctaaggggatgatgacgtatgacgttaccaaggcagattccggccggtgcccgcgtggtggtgcgcatcaccgacggcattgacccggtcgaccaccgtatgaagttccgcgactatgtggggcatgtggtttcctgggatggatacacgttggagatggtgcgtgacgccgccgccaatggttcgcgcccggcccagaacgtgaccatccatcaggaacagattgccacattgaaacccgtgccggagcggcgtaacacgccaccccggccgtaacccaaggccataaagaattcggaggagaacgagagtgtcatctacgcagttcgacggcgatatcgactccttcgtctcctatctgaagtccaaccgcggcctgtcagcgaatacgctcaaagcgtatcgcgcggatctcacggcatgcctgcacctgttcgagctgcgcggcgtgaccgatctgaacgagatcacgctggatgatctgcgcagctggatggcggtggaatcgcgcgatcacgcccgcagcagcatggcccgcaaaaccgtggccgtgcgcgggttcttcgcgtgggcctatgagcatgggctgaccaccaccgacccggccgccacactgatgactccctcgattcccagcacgctgcccgcggtgctcaccgaatcccaggccgagcaattattggatgtcgctgaacatgccgttgcaacaaaccagtacaaggacgatgggggagcggcagccgcgtccggcagcggcagcggcaagacagctgataagtcggccgataccgtaaaccgcagtgaggcacccgcccgtgcagacaagcgcgacaacgcccgagtcaccgccgaatcgcagcgcaacgccgcgattctcgaactgctgtatgccaccggcatccgtgtcgccgaactggtgtcgatggatatcgccgacatcgacttctccaatcgcaccatcaaagtcaccggcaaaggcaacaagcaacgcgtggtgccgttcggactacccgcccagcgtgcgctggagacttggctggaacaggggcggccggtactggcccgtacggcaacggatgcagtcaagtcccgtgctgccaacgccctgttcctcggcgcacgaggcggccgtattgaccaacgcatagcccgtgacatcgtgcacagagcggcccgagaggccggcgtgccggacatcagcccccatgcgttgcgtcattccgccgccacgcacatactggacggcggtgccgatttgagggaggtgcaggagatgctcgggcattcctccttgaaaactacacaacgctatacgcacgtctccatcgagcagctcaagaaccgttacggacaggcctttccgcgggcatgaccactatgtggacattggttaacaaactcagcaaagactgaacctagccggcaagaacccctgaattttacatgggtgtaacaaaaaatacactgcttgtctcccaagtgcgcaaaaatgacaggtaatcagcaacggggttggattgttcgagacatcgtgagatgcaagtctcacggtgacggggaatccagccccgtttgcatgaggcggggctgagacgtcctgcaacctaatgaataggagaaatcatatgaagaagaaagctcttgctttcgctgccatggcctgctccgtggccatgctgctgagcgcctgcggcggctccaacagcaacgctgcc

SEQ ID NO: 2189 - DNA, 5671 bp, Unknown
  R51_24m  MAG No. k141_20913
cggcaatccaagccggttatcgcggtgatacagcatcgccagcaccggaacggtcaacgccacggacaccaccggccacaacgccaacgcaaacaggaacggaaccgtaaacgccgataaataaagcatatcattcctgccaattagatgaatacttcgcgttaagcatatttcataaatgtgtggaatattgacatgggcctatgtttgaattgatgtcactatttcagttgtgtaaagacactcaatttaatccaattgattgcaatttgggtgcggtttgaaagatggagcttcgatagaattcgactaacatagcgtttgactgatttggtttccagaaatagtttttttgctatgtcgtcattactgagtccttgtgcaattaaggcacatatgtcacgctctctagtagtaagactcttgaatgattcaataaatatattttgctggtcttgaaaaatgaatttgctttgttgatattctactagtttctttgttattcgtggagtaagaattttaccattttcaaaaacagcttttatcgattccattaattgtgatttacttatgtctttcagtaggaagccgctggctccggcgtcgagtccgccgaaggcgtagtcgtcttcgtcgtaggtggtgaggatgaggattctgatggcgggccagtgtctggcgatgtgtcgggttgcttcgatgccgtccatgccgggcatgcgcacgtccatgaggatcacgtcgggcaacggccggtgatcggcgtccaactggttgagtgtgtcgatggcggtttgcccgttctccgccgaggcgatgacggtgatgtcggtcacgtcgtcgagcatgagctggaagccgagtcgtgccagtctctggtcgtccacgagcatcacacggatcatggtcggaccttcctttcagtcggttgtttcccggtcgggggaatgaccgctttgacctgccattcggtgccattgaccggcccataggcgaacgtgccgccaacgtcccgtacgcgccgtgacagtctgtccagtccggtgccgtcatcgggtgcgatagcttgcgccgcaccggtggctccgtcgttgcggacgatgacggtgactccgttgggctggtggttccatgagacgttgagatgcgtgacgtgtctgcagtggcggatggcgttggttatggcctcgcgggtcacgtcgaagcagaggtccgcctggggttcgtcgtcgttgcggacgccggtttcggtgaatatggtgatgatgtcgagcgtgcgggcgtgtgcgaggatcggacggatgtcatcccatgaacgcatgctccgggagcctggttcggcgggatcctcgtcttcgtcggtcgtgtcggtttcggtcagtgcgcgcacggccttgcgcgtgtcctccaggctttcccgtgcgatctcgttgatgcccttcagagcctcctccacgcgcgagtcgccggtcttaccggtcaatccttcggatagggcgatgatcgcggtcaacccgtgccccacgctgtcgtgcaattgtccggcgatgcgcgaacgacgcacggcggcgtcacgctgcttggcggcggtctgcgcgcgccggtgttccaggccggcggcggccgtggcgttcctggcttggaccatgccgcggcgtgccagggcgatcgcgccggcgagggcgagcaggaggatgcggccgggccattcgccgaggaaccggctggcgggccatgacatgaacgtcgccaaagtcacggtcaacgtcgtcacgagggacccgatgtacatgcggcgttccccggccgtacgcatgaacgcgtagaacgccgcgaccagttggaccagcaggatcgagtccgcatgccagaaggacaggaccagggtcaggatgagctgcgatgccaacgtggcggacggggcccggtaacggaacaccaatgccaggcatgacaggagctggaacagcagcagcattatgaatccgccggtctgcttggcgagcgtgtacatcggatccaatggggcgccgatcatgcgctcccacgtgagcatcgccatctcgaccgcgagcacgcataatggcatggctatggcagtgaccctgccgacgttcaccgtttgccgctccatacgatccactgtgccacctcgcagggtcatcggcgtgttcactgggcgaggcagtccgcgccgggcatcaggcagccgagcatcgtgaccgaaccggtgaacagcacagtgaacacgatgatgatggccagccatacgaacggcgagagcagcgccccgatccatgcggcgacacggccgccatgctcccatccgtgcccgtcgcggccggtgatccacgcgatcagcacgccgggcagggacaggaacaggccaagcaacaggaacccgacgatcgaatcgttcggcgcggtcgcggctggcaatggtcggggcggattcggccggccgggctccgggacgggcgatggcgccggcaggggcttgccgggtgacggttcgtgatgtgcgggaatgtccatgagtgccgatccttttgaatgtcattggagcttgttgatgttgatggcgccgttgtcgccgggcaatgcgctgatggagaccttgacggtgccgtcgtcggccgtgtagtcgtatacgccggcctgttcctcctcggtggcgttgcgggtgaagcccgcgtccttgatctttcgcgcgtagtccttcgcttcggcgatggtccatgacacgtcgatcaggtagccgttgtcggtctcgtccctgatgcgggtcgtcacccggtcgggttcgggcacccggccggcatactggccgtcaggccaggagccttggacggagccacacgccgccagcccgaacaaggccgtcaaaatcagcaagaacgcgagcagcatggatgccggggcgcgcctcggcattgccgtgtatcggacaggcatgatcatcctccttttccgaatctgatgccgtcaacggcttctgatcgcgtcggccacgctgcggcgcaacgcgggccggatctgcatgtactggatgaggaacaacgccagccagcaggccgctcccgcgccgatcacaccagcccacgggatcccggccactggaacgccgacgagcgtgatagagcgtgttgcgagcacgagcgagctgacggcgaccgggatgagcgcgaggacgaccgcgctggcggccaggtgcaggctctgccacaggatcatgcgcgtcacccggcgcggcgacatgccgatgctgcgcagcagcgcctgatcggcgaccatgccacggttcgacaacgcgatgacggccagactcgtggccagggacacgatgcacagcatcgcgatcatcagcagcgagtccgcgtagttcaggctcgtcggatggccgcccagggccagtatccgcccgtaggaccgcgcgcaggtcagcagggtcgtggacaatcccaaggccagtgcgagcggggcgatggtgttcatactggacacggccttcgccttggcggcacgggccgcgagcacgccggtcgccgacccgcacaggcggcacacggcgcgtcccgcatccagcaggattgggaccagcacgccagtgaggacgtacatgccgaacgacgcgatgatcccggcccataatgcgccgttgaacgtctggccggcctcctgcccgaacgcgtgggcgcgcggcatgcccatgccggagaacgccaatgccaatgccgccgccatgacgaccagtcccagcgcgcaacgcgcccaataccgccatccatgccgcccgatcggcgcgtccctgccacggatcgcctcgatgggacgaaccttcgccgcacgcatcgagggcacgaacgcgcccagcatgcacgtggccacgcccagcagcagcgagccgagccatgccgtcgcggacggcgcgaatgcgggagggacgaacgagccgagcccgccggcgaagctctccgcggccatcgcgttgaactcgggaaccgcgagcagactggccggcatcgcgagcagtgagccgagcagcgagccggtgaggctagccacgcccacgagcatccacgtgcccgcgcgcacctggctcggactggcgcccatgagacgccattgcgcgaacgtgccgcggatgcggtcaaccgtggccgaaccgaccaccgtcagcgagaagaacgcaagcaacgccaccacgacatagatcgtggccgacaccatgccgaactcggccgggtccagacccgccagccgggcggccgatgcgaacgacggcgacgaggtccacacgaactggttcatgcacacgcccaccagcgtggtcaccaccgcgaccaccatgatcgtgggcacccaacccgcgagattatcgcggaacacgcgaagcacatacctacccacgacgggcctcctgaccgtgctgcggcatggccggctcgaacgtgcggcgcatgccctcgacgatctgcccagcggtcagtctgcccgcgatgtgggtgattccgccgtcacgcaggaagaccacgcggtcggccagggcggcggcgtccgtgtcatgcgtgaccatgaccacgttggaacccgaatccgccagctcgcgcagcacctgcagcacgagctcgctgttcgcggtgtcgagcgcgccggtgggctcgtcggcgaacaccaccgccgggcgcaagagcagggcccggcacagggccacgcgctgctgctcgccgccggacagggcgctcaccacggtcctcgccctccggcgcaggccgaaccgggacaacagctgcgtgacccgaatgtagtcggccttgcgatgggcgagcgagagcggcagcatcacgttctcctcgaccgtcagatacggcacgaggttgtactgctggaacacgaaaccgatatgcccgcggatgaaccgcgaacgacgctcctcgtccaacgcgtagatgtcggtgccgccgatgacgacccgacccgagtcgggcctgtccaaaccggacaacacgtacaacaaagaggtcttacccgcacccgaaggcccgacgatcgctgtcaacccggcactgggaatatccaacgagacatcattgagaatcacactcggactggaaccatcagcggaaaccacacgcttgaccaacccacgcgcctgaaccgataaatatgtatttaccccaatgaagtcatttggttgttttttcatggacgagaatccttcctacgagagtgctactgccgacagtatccataaagacaagtcaatcgtctatgccggagagacgattgacatcaaaagatgtcaatctgtgtcgaagagagagtcgagtaaccatatagttgataaacagccaccagtcaaagaatcatcagaattgtgatgtccttcatctaacagttgcaaaaaacaccgaattatgtgcggacggaacaatagccgaatatgaattcaaccattgttccgtatataagagaggcgcctttatatcattcttgccggcagtaatccaaatgtcaggagcctgattagtacaggggcatacgaaccccctcgctggcgaagacgtatgtgatggcggcggaatccactcctccggacacatcggcggatagtggtgcctcattgcgccactcatccgcgatcgtcaggaaacggcttcttagtgatgcc

SEQ ID NO: 2190 - DNA, 28016 bp, Unknown
  R51_24m  MAG No. k141_21050
accgtacgggagtagggagtagagtggcggcgtcgaccgacgcatgttctcgccataatttcaatcccgaaaaggagcctcgtcgcaaccatgacatcacatcttgccgaagcaggacgcacgttggttccccgcaaggaagacagatacggtctgctctcccccgccttggtggtgctgacgttcgtcgccgggctggtggacgcgctgagctacctgtcgctggggcatgtgtttgtggccaacgtgaccggcaacatcgtgtttcttgggttttcgatcgcccatgcccaaggcttcgtctggtggacgtcggcgctgacgctcgtctccttcatggtcggcgcgcttatcggcgggcgcatcatccggcgattcgaggagaaccgggccaagcatctgttggtttctacctgcgtgcaggcgtcgttcgtactcgccgcgctaatcggcgtctatcttttgaaccagctcatcaccggccccgcagacgatgcgtccggcgtctcctcgattgcacggcttgcacagaccacccaggcctcacaggcctcacaggcctcacagccgagcctgaacttccccaccgcacggcacatcgacctgcacatcatcctgctgatcgtgctgctcgccccggcaatgggcatccagaactccaccgcccgcaagctgtcggtgccggacctgcccaccaccgtgctcacgatgacgctgaccggcgtcgtcgcagacgcttcggcacacggccaccagcagtcgaagctcgggcggcgtgcggtcgtaatgctggcgctggcgtctggcgcgctgaccggcgcgcttctgcaggcgcacggacacgagaacatcatcttgatggtgatgctcgggtgtctgctggcggtcatcgcgatgatgattccgcacgtccattcggatgcgccgtgggtcaccggccggcaatagcctctggcgcatactttcgccatatgagacaaaaacggccacgccacagcgcaaccagtaggaaacgcccggcaatctcggctctcctcgatatgttggatacccgttgtttgaaacaggccctccgcaagatacaaacagaggcagtgagaagtagaggtaaatatgactgacgcacagcaggcgaacggcaaccagccagaatcccagaaccaagcagaagcgacggcacagccgcacaacaagcgagtgacgaagtgggtcgctatagtgattgccatcgtggcggtggcgattatcgccgcggtcacggtgttcggcacccgcgcatacagcgcgtctcagtacgatagcgcagtggccgcctgcgccgccgcctcggaagacgtacgtaacgccaccaacgactacaacaacttggtcaatggcgatgctgcagaagccgccgctctgaccaaggcagacgtctcggacgcctccgctctcgacgcgctgtccaaggaactaaccgtggaactgccgacgtacgaaggctgcgtggccgacgacaccaagggctaccaggccgcgaccaagaaactcgaacagcaggtcacgtggtaccacgagcacaccacgtcgctgcagaaggctgttgacgccgtcaacgcggtcaagaagtaagacgagggcggtctccctcacgttttcaggatcggacagcgctcaagtcgcggcaacgcgcgatgtcggccggtcctgcacggcccgaaacggcagaaatcccgcgccccttacgttcggacgcgggatttctgccgtttttgagtcacggattgggactatagcccagtctttgccccagagttgtctattcaggattaccctctcggccgtatctcatgagcaggacgtgtaaaaacaaaaaaccctcgctaatccgcgagggttattggctggggtgcctggactcgaaccaagaatggctgaaccagaatcagctgtgttgccaattacaccacaccccaatttggcttggcgcagcaactccgaagagttgttcgtcgtacccccaaccggatttgaaccggtgttggcgccgtgagagggcgtagtcctagaccgctagacgatgggggcatattcagtttttcaaccggctgcgaggcgaaccgcgcaacaggtagatatattacgcgctaccctgctctcacgcaaatcccggcgtgtcgcgccattttccgccgttctgcgggaacaccccatgcaacgcgaaagcgggcatccgtatgtacggatgcccgccatgcgtcacgctcccatcatccgccggcgtgcggtggacgacgcatcacagatgcgcccgcaggcccttgagacgggcgacggtgatcggcttgccgacgatctccatcgattcgaacagcggcggggagacgcggcggccggacatggccacacggaccgggccgaaggcgaggcgcggcttgtagccgccctcctcaaccagagccttgttcagggtctcatgcaggttgtcggtcttccaatcgacctcatccacgccttcgagagcggcgatggcggcatccagcacctcgccggcggaatccttcagctgcttcttggcgtcatccgcaggctccagatactcctcggtggacagcagggagccgaccatgccggcgacctcgcccagcaggcgcacgcgcggctggaccagcggagcggcggcggtcagcacctcacgctcacggtcggtcagggcatcccagttgtcggcggaaaccacaccatcgcggtgcaggtacggcaccgagcggcgcaggaagtcctcgggctcgagcatacggatgtgctcggcgttgatggagatggccttgtcgatgtcgaagcgggccgggttggccttgacgtcgcgcacgtcgaacttctcgatcatctcgtccatggagaacacgtcgcggtccggggcaatggaccagccgagcagggccaggtagttgagcaggccctcgcggatgaagccgttgtcgcggtggttgaacaggttggactccgggtcgcgcttggagagcttcttgttgccctggcccatcacgtacggcatgtggccgaacagcggcatctccttggcgatgccgagttccataaggtaacggtagagcacgatctggcgcggggtggagctcaggaggtcctcgccacgcagcacgacgttgacttccatcatcgcgtcgtcgaccgggttggtcagcgtgtacagcgggtcgccgttcgggcgcacgatcacgtagtccggcacggagccggccttgaactcgatggtgccacgaatcagatcgtcgaaggcgatgtcttcatcaggcatcttgatacgtagcgcaggcttgcggccctcggcgcggaaggcggccttctgctcatcggtcaggttgcggtcgtagccatcgtagccgaactcggccggacggccggcggcaaggttgcgctccttgatttcctcgggagtggagaaggactcgtaggcgtagccggcttcgagcagcttggcggcaacatccttgtagatggcggtacgctcggactggcggtacgggccgtgagggccacccacatcgatgccctcgtcccagtcgatacccagccaacgcagggattcgagaatctggttgtagctttcttcggagtcgcgcacggcgtcggtgtcttcgatacggaagatcagcgtgccgccggtggcgcgagcttccgcccagttgaacagggcggtacgaatcatgccgacgtgcggggtgccggtcggcgacgggcagaagcggacgcggacgttcgcggggagttcgggtttggtgtttgcagcatcagtcataatcccctattgtgccgcgcgcgccggacgcggagagcagcgctcctcgctcttttgcttcgttattgacatttcgggccaacaccatcccaaaacggccattttccaacgaaatctcttttgcctgtctttggtagtgcccgatatcttgatgcctgtcttcacacctgttttgacacctactttggcgccatccacacgcccgcacgcaaggcttcgacaccatttggcgcaattgttgagttttttacccaaacgatggaagaataggagtcgacgcaatcgtcttatgaaaggggaatcaatgaccgatcccaacaacgtgccgttgccgcagatgcccgcgcccaacggtaccccggcccagcagaatcccagcacgccgcaatacggcgcacctgctccggcccccgcacagccagattatgggcaattcaacgctccggcccccgcacagccggcctacggccagcccgcatacgggcagcccgctcccgattcttccgcacccggtgcagcgcccggtgcaactcccgcctatggtcagcccgccgccgacccgtacgcggcgaatgcggctccgcaattccccgctcccggcgcggctcctacctacggccagcccggaccggacgccaacgcttacggtcaggtgccacccgcatacaaccagtacgccgctcccactgccacagcagccgtgccgttgaacaagccgtattacgactgccccttccctgaggcattcctccgtttctggaagaagtatgtggtcttcaagggacgtgcctcccgcagcgagttctggtggtggacgttggcctctgtcggcatcagcgtcctgctgagcctcctcagcagtgccacggacgacaagctcgggttcctttccagcatttggagtctggccatcctgattcccagtctggcgctcgccgttcgccgtctgcatgacacggacaagcccggctggtgggtcgccatcttctatggcgcgatggccctcggcatgatcatcatggttgccggcggtggcgcagcactgtatggcgccttcggcagccttagcaactccagctatggagccatggcaaccggcggcctcggtgccatggccattggcggactgattacgctcgctggttcaatcgtctacatcgtgttcatggctatgcccagcaagccggaaggcgcacgtttcgacgatgacgcagtagctgccccgatgcctcagggtgcttacggcgcaccgtacggcgctcccgcaaccccggacttcaaccaggccgctccgggcaccgctccgaacgcacccgctcctgacttcaaccagccagccccggcctatggtcagccgaccgcaccggctcctgactacggccagcccgctgtgcctacgcccgattacggtcaggtaccggttccgcagtacggccagccggagaccccggccccgcagtacggccagcccgacgctcaggccccacagtacggccaggttccgccgattcccgaaaacgttgatgatgggtccaccgtgctgtctccgcacacggctcccaccgatgacaacgcacagaaaccctggcaaggccagtgactgacgccggcgaagttcgcttaagaagttcgcctcatcactcatgaagcccaacaatgaggccccactcatcaagcggcggtagtattccccgccgttcagtaagccaatgccctgtgtactggatcattccagcacacagggcattgtgcgttattgcggcccctctcttcgcgcaacattccccggaatgcgttacggtggaggatggacgctgcgccgagctactcctacaagctgcctacggagagcgtttgggagatcacatgggattctcccgggcccagcgtcacgatgcggtcgcggcataccgccgcttcaaccgccacgaaaccgcgccattcgcccggcttggtgtagctcatattgtcgccgtccgctcccggattccacaccacggtttgcggcgacccggtacggctgatatgaatcgcacgccccaacatgtcatcgcgcagttccagacgcgcatccgagtaatacacacgattcaccggctgctcgccaaacgtcaccacttgcgcgtcctgtgttttcggcggaaacccttcttcggtggcatccagatacgtcgctccctgcaatccgaccagctgagcaccggacacatcgccgacatgcagataggaatgcaacgcggcctcgtacgacataggcgccgtgccggtgttggtcacggtcaggctcatggtcagcgcattgcccgtttgcacgtcatacacggcatgaaactgagcacccggctcgtcatcgaaccaaggcacttcattgtcgttcagctgctgcgaatccaacacataccgtatgtggctgtcgtcgaatgaaccctcgtccaacgcccaccgacgcagacgtgcaaaaccgtgggatggattgagtgccagctgcttgccatgcgcaaaacccgggccgaaccacgggaagcagatcggcactcccccgccgagcgacttaccggcctcgatatgccacgtactcggcgtccacaccacatccgcctgcccggccggggcccagcgcaacagatgcgctccgtaatcgctgattaccacgctgccgccattgttggcgagcatacgcaaatcgacaccattgcccataagtttcccattcccattgtgcgaacgatacttttcactaaataggatacttccttaacaaaaaagaatcgcaaagtatggacgcaggatgcacaaaggccgtacacacaccatatacgatgtgcgacgcggccttgtgctctgtggtccaatgaactcgttgcttttgagcgatgccctaagggctacagatgcgtttctcgctgccagagagcgatctgccgctgctgggttcccgctacgtcgattcagtgcgcaccaaccatccctatggcgtgcgtaaggcggcggtgcgcttcctgcaacacggtcacacccgtgtgggcgcggcgttcaccgatacaccgacttcggagctgattcaggatggctggaagcaaatcgtgacggaaagcgacgccatcgaatgcccgttcaccatcaccggcattcagccgtacaacaccagggacgtcaaccaaatcgtggacaccattctggattcgggcgtgacggccatgctggtgcactccgattatctggcgatcgccatcgcgcagaccctggagcgccgcggcaagcgcgtaccggacgatatctcgatgatctccgtcaacggctttgccacgcccagctcccgcccgctgaccgtactgcgctcgtccgataaggatctggccgaggcggccatcaacctgctgatcaaccgcatccaaaacccggattctacaacccgccacatctacgtggacccgacgctgaccgatcgcggctcggtaatcgataagcagtaaccccacctccctctgacgagggaggtggcatcgcaaagcgatgacggagggagaggcaccaggcctctaaccgttacgagcgaagcatcggccagagcaacgcccttactctttacaactccacggtctctttgccgggatcatccttgacatgcgcgaacttggcggccagagcctccttattgcgcttttcgtcttcttccttggcctgacgcttagcctcgtccgggttccagagcacatcctcacggtgcttgttccattcggcaacggccagaagagcgatgtattcggcggtggcggtcagggtgtctgcgtcggcggctttggcacgggcattaagcaacccgaggatctgctcgtcggtcaggcagatgcgcggcaccgagcactgctcgcgcagttcgttgacgtagagcagaatcggcagaatcttggcggcagcattggcgacactgtccgctgaaccatcggccacagcatcaccggacacctcacccaataacgcatcgcacacggcgagcgcggtggcgaaccgaacagccacatcggcgggcttggcagacgtggccagacgaccatcggcttcagcgtcggcctcgacctgggcttccatggccgcgaccgcctccctcaccgattccgccgtcgcggaatcccagtcgattcccaacacgtcggccgcctcaacgatcagcctggcatcaccggactcggcgtagtcggccatcgtgtcgtaggcgtcattggcggcgagcagggcgtccacgatgttctgcggacggccgggaatctcatcggcgccctcatacacgaactcggcgtccggcacggtgacgtcctcgccggtcaggatgcgggcgaatgcacgggtgacgcgcacctgcaggttctccgcgtactttgcgtcattgtccatctgcatggcttcggtcagcggccacaggccgatcagcgccgagccggcttcggcggcctcagttaccgccggcaatgccgcgacctgtgcgattgcctcacgattgagttcaatggtcatctatgctcctttgcgtccaccactcgattgcagtgcgtcttggctcccctctctgaggggagccaatgtcctaacaccagtgtgccgttacttgacgttggctgctgggtcgacatacgtgattgacatcacacggccggtttcgttgtcgtacgtcaccgaggtcacggaggcgagcgccgtgtgccgcaggaacatccagtgctcggggtggccggtctccagataatggcgataactgaaaatcggcgattcgtggctgaccaccacaatctgctcgccggggtgctgggccaccttctcgcgggcgaagtcgtccatacgcgccgcgatgtgctgataggactcaccccagctcggcttgtacaggttggtgacgagcttccagttgccgttcttccacagcgcgccctcgccatggccgatgcgcttgccacggaactcgttgccggcctcaatcacccgttcatcagtggtgagcgtgagcgaagcctcgccacgagcctcgcgcacggggttcagcgcatcgagaatcgcgccggcggtctcgcgcgtacggtcgagcggcgaggagtagacggctgcaatcgtattggtttggggattcttggccaagtacgtggcggtggcttgagccatgcgacggccaaggtcggaaagatggaagtcgggcagtcgctcatagagcagatggtcggggttatataccttgccatgccggacgaaatggatggtggtagcgctcatgagccgcctttctgcttcccgccctgaggggcatgagaacgttgtcttaatatctccaatctaccgcgtgtcgcggagtggacacccgtagagtatccgtgacgcaaatatgcggatgggaaaatccgacgcaaactttgcgcgaccatggacaacacatcattcgatgagggcttcgccggcaacgccacgccagcgggggacatccaatcgggagcggaaaggagcgtagtgctgttatgtccaataactcgtccaactcgaactcgagcaccattctggccggcatcaaggaagtaggccacaaagtctttggtgggtatgcggaactactgcgcattccgcataccgcccgttattccatcggctcggtcatcgcctgcatgccattcccgatggtcggcatgaccatcaccatttccgtacagcattattacggcaactattcgctggccggcatgctcaccgccattcaggcgattgcgctggccgtggccacgccgctgctgggcaagctgaccgacaagttcggccagaggcaggtctcgattccgacgattatcgtttggattgtggccgccatcgcgctggtgacggcgattaccaaccgcgcgccggaatgggtgctgtactgtctgacgccgttcctggccgccattccgccgtggggcgcgatgagccgcgcgcgctggaccaagattcttaagggtgaccgggagcgcacgaaccgcgcgctgtcgctgtgcggcgtgctcgacgaatgcatgtgggtgatcggtaatccgctggcctccacgctggccgtgatctccggtttgctggcgttctcgttcaccggcatgtgcgtggtggtcggtgcgctgatgttcctgaccgagctgaccactgagccaccgtcgcagaccgcgctggcgcgtgccgagggcatctcccgcaaggaataccgtgagcgcgaggccgccaaggctgaggcgctgaaggtggaaaccgccgccgaggagacccgccgccgtcttgagcgtgaaggcgtgaccgatgaggccacgattaacgcagccattaagcaggcggtcgccgatgcgcgttcgggcaagaaggcgtccatttggggtccgggtctgattgcggtgtgcgtcacctggttcggtttgggcgcgttccagtcggccacgggcatctccatcatcgcgtttgccaccgaagcgaatatgaagcagtacacgggctttgtgtttgcctgcttctccttcagctcgctgatgggcgcattggtgtatggcgcgaagaactggtcgattgccctgtggaagcgcttctacttctgcctggccgtggtgaacatcggcatcagtacgttcctgttcgccaagcatctgtgggtgatcatgatcatctacttgattattggcgtatgccaggccccgacgtggatcaacggcaaccagctcatgttgcatctggtgccgccctctcgcttgaccgagggcatggcgtggatgggtgcgatgaattctatcggctcctccgccggttcggcgattgccggccagttcatcgaccgcatgggctcgcacggaggcttcatggtggtgaccaccttggcactggcctcgctggtgattgcactgatcggcttcaagcagatcaagggctccaccgagcagccgaccctgactgaagtgagtgtgtgagacgtatgctaagccccctctgacgagggggcttagcatacgtcaaaacgctacttcggccagcctttgggcgtgtgctccaaggaccagatgccgagcttgtgggagaagctgttctgccacttggcttcaagctcctcggcattcagtcgattttcagcggacttcagacggttcatcgcattggtgtgcgtatcgtcgagcagccacttgcgaatcaagaagttccagatcattaccacggcagtggccaccaacttgccgatattggtgcgcaacagatattcggcatgctgcgatacataggcatcatggttcataccataggtggaaatccagataatcgcgtcattcatgaacagaccgactacagcgcccgccacgaagataaggatctccatccagcgtgccatgtcatcacgatgcttgaatacgaatttcatgctcgccagatagttgaaaatcagcgagatgatgaaagagatggtggcagccagcacgttgtgcatgtggaatatgccaaccaataggttgaggataccccagtcgataacaaaggcgataacgcccacaatgccgaacttcatcagctgttcaatcagttttctcacaagagtattcaacactattgggctgactgcggaacgtgtattggctggaaaggccaataatatccccaattggccttgccccggtccgttctgcaagcagcttcctacgtccgcatgccatgttcaacagcagccgctgaggctagactggaagtgaaccgaatcaaggaggaattatgcccgttattcacactcatgtgtccgtgtccaccacccccgagcagcgtgaggcactgaaggccgcctacggcaaggcgattaccgctgtgccgggcaagtccgaaggctggctgatgtgcccgttcgaggacaatatgccaatctacttcggtggtagcgatgaccagcccgccgcctatgtggaggtcaacgtattcggccgctctgtgccgggctctgcttgggaaaagctgaccgaaagcattatggccgcgctgaactccacactcggcattcccgaggaccgcacctacatccgctacaccgccaccaccgattggggctggaatggcggcaacttctagttgccaccattcccctcgcagcatagctgttcgcatcgcctacggaaagcccagtgggctttccgtttaatggctcagggtggcaactagtttgcgtattctggctcccctcagtcagcttagctgacagctccccctcaaagagggaagctcagatgtagaaagcccgccggtggcgggctttctacgtttcaaggggctgatttccaacattcagaagctctactagcgtttcaaggggcttttaaaacaagaaacccggagtataaacattgcaatttcaatggtcatactccgggtttcgcaatcgaagagcccctcgaaacgcagatagacctccggaaaaccggaaatccgcccctcgaaagcgagttacctcacctcatgcctgtcatcacacaatcttgggcatgggggtggtgaggctggtggtcaggttgacgtggaccagaccggcaccggcatgcacctcgaccttcttcagggtcacggtgcgctcttcttcgggggcgcggtcgttgtcggtcatggtcgccggggacttgaccgccacgaacgccagatcatccagcgagatgcctgcgctctggcacagttccatggcctcggacacggactcggtgaagcccggcttgtagatcacgcgctcggccggtacgccgtaggcgttctcggccacccacttggcgttctcggtcagggccatgcccttgtgcgaatgcggttcggccggcatggagccgttctgcagcgcgtcgacgaaaccgtcaagctgcggggccagcgcctcgccgccgtcgcggaacaggttgccgatgatcggcgtacggaagcccagctcgtcggcggtggcctgcagggacgggacctgatcgtcctcgccttcccacaggttgatgagcgggaaggtcggaatgtccaggttctccaggcgctgcacgtggaacgggtagcgccaggccagctcgggatcgtcgcgccaggtggaggcgcgggtcaccacgatggcggcggacggccactgcgcgccatactcgcggcaggcgatgtccagccacttctgggcaccggcgtcggtgccgtaaccggcttcgacgacaaccacatcatgcagagcgcaggccatttccacggaaaccagcgtcggaatgccgatggacacgttggcgaacgggccaccgtgcacgtagaccggggagccgttcacggtctcggtcttggccggcttgaccgcgtcggccagaatgccggtgatgcgccacaggtccacgaactcgccgaaggtcacggccttgccgtccttggtgccggcgatcatcttggatacacgctcggaaatctcgtccatcgagcgggagagcaccatgatctgcatgagctcgcaggtcggcgtgagcacgaccttctccggcacgttgcccttgccgtagtccacggcggtggagcgcagggagcggctcggcacctcggagacacgcggcacgagaatcgtgtcaagcttgccttcatcgatggccctctcggcgaaggagacgagcaggttctgggccgcctcgatggcgcccatttcgccgcacagaccccagtcgatgagctcggggtgggtcagggatgccttgccgccgccggaggcaccgcccttggaaccggctgcggtgatgcccatgctcggctgacgcagcacggcggccgcatcaatgccacgcttgttcagggcgtcgatcaaggcgatggtcgtggtggtcttgccttcgccgcgcgatgccttgagcggcgtatcggcggtgacgagcaccaccttgccgtgcttgcacggggcgtccgggttctcagccaggtacttcatgtaaccgaatgcgtcgatcttctggaccaggccgtactggctggtgaagtcttcgatggtggtcatttaatgcctttctgtgttgatgatggcggagcggggtggtggggcggccgccgccgcctcttcgcctagaaacagcccactgggctgtttcttaacagcttagcccctcagttcgcttcgcggtcagctcccctcagggaggggagctcaatacggactaaaagtcggacatgtggaagccgttcttcatttccatgctgcgagtgtacagcacggagtcaagcagcttgtcggtttcctccttgagctggtcggccatggtctggttggcggcggcgagaatctcgcgcacctcggggttacgcagcgcggcgatggtctcgtccggggtcatcggctgcacatcgccatccacgttgtcggcctcgaattcctcttcagcggcagactgcgcggcttcctcggcggccgtcaagcccagacgggcgatctgctcgtcggtggcggcgaccaagcggtgacccatcgcaccggtcttctcctggtagcgctcgacggcgttggacgtggagcggaaggcgccatcgcacagggcggcgatgatgcggttggcccagtagaagttctcggacgtcacgcgggtggtggtgtcctcaaggtaagcgggcgtggcgtccacgttcgggaagaacggcaccagcgtgttgaacgggttggagccgtatgccatccactggatggcgcgggaggcttgcgggcggtacgggcggatctgcatcaccgcaagctggctctggcggttgatgccgatcgtgcggtacatgtggcgggtgcgctcatcgcccagctggccgtatggatcgaacggggtgccctggtagtgggagctcaacacgtacttgatgtcctcgatggtcaccttgcgctcgggctggcgggcccacggaatgtcgtcggaggtgggcttgtggtcggcgtccgggccgtcccacacctcgtcgtacgggttgaggaagcgctgcatgtaccaggcgcgcggggtgttgtacacgtggtcggagtcggagtgggagccgaaggcgtcgcgcgggttgaacggggtggtgttctccaccgcgaggtccaggtggttggtttcgatgaattcggcgagatcttcggagcacatgtgcgcttcttggtcgcccagagcgtcctcaaggtcgaattcgtcgataccgagctggttcggcatggtcacgtaggcctcgtccggcacgcgcttggcaatccagtgatggccgcccacagtttccagccaccagatttcgttggagtcggagaaggcgacgccgttcatctcgtaggtgccgaattcctcaagcagcgcgccgaggcgctggacgccctggcgtgcggtcttgacatacggcagcacgatggtcaggaagtcctcttcgccgatgccgccgggcacctcgggctcatcgcccctggccggcgtgtattccacgaacgggtcggcgccgagcacgcgctcgttggtggtcagggtctcggtggcgctcatcgccacgttcgcctcgttgacgccggcctcgccccagatgccttccttgaggtccgcgttcggcacggcggtgtactgcagcgggtcgtccggcagagtgatggtcaggtgggagatcactgatttgtattcgcgcggctgttcctccggtttcacgacgatgaagcgcttcgggttgaactcgccgttcgcggaatcctcgttgcgggcaatgatggtcgaaccgtcatagctcgcgtctttgcctaccagaatcgtggtgcaggccatagtgtgatggtgtcctttctcttattcaagctccccttgtcaggctgagccgttcagcaaacagcccggtgggctgtttgtaggcgagggtgggagataagtcccaccacagatgttgcgggcggtagcccgtccgtaattgcaggacgagctgtctcgcaaagcgagactgaggggtagtcactctagctgtctctcccccagtccgcctacggcggccagctccctcatcagagggagctcacatacgccaactaaaaatcacgccttaccggtcaggaagatgccgtcggtgtcgggcgcttcgccgctgttgcgcagcgcgtgcaacagctcgttgagccagaagccctgattcaagccgggcaacggcttcttggtggcccacacctgcaggtagtactcgtggtccttgtccggcggctgcggaccgttgtaccgcatgatcaccgctgggtcagtgctgcggcccaagaacttggaggccgaagaattgcggccttgcacggtctcgggaatcatggccggcagctgacgggagaagtccggcgggatggccaacgcatgcgaatcattgaagtcgtacatcagcgcgtcaatcggcagattggccacggaccagtgaatccactcgaagccgcagaccggaatcgaatccgggtccacgaactcccagtgcaggtaacgggcctcggggttcacatcaccgatgtagaacgggaaggagacgaccggcacgccgccgttgaagtactcaggcgcggcggccttggcaaaatcgtccggaatgacggtgaaatcggcggaaatcttcatatgtcccagtatcgctcatatgtgtgacgtactgggggctgtgcgttacgggggtctctcccccagtctcgccgcgctcgacagccccctcgtcagagggggctgggttgcgtcgggttatggaattagggcgcagaagagggattcgaataccagtagcgggttgccgttgccggctagacgcttgcgggcgtgggccacttcgtccagacgggtcacggcaccggcccggttcaaccgcaccgacaattcggtgatcggcgagcggttctccaggttgatgaggcccaccgaatcctccgcattgttctgcagcaccgccacatcccggtagatggaggcgatggagttcagcgcacgatccaatacgtcgcgcgtacggcgggtgaccaaacgcttcacatcgtctttcttggcgatctggttgaacgcgccacgcagtttcggcgggatgcggtcgttcggtgccagtccgttgatgcggcggaattccgcttcctggccggcggtgatgcggcttgcgtccgcctcggcctgggccttggcattgtcgataaggctgccggccagcagcaccgcgtccgaggcgcgagcgaggttcagtacgcccaccaccaattcgtcgcgatccgtcatcacctgctcgtcagtggcgtacaacttggcgatgccgatgtgtccctcggccagacgggccgcacgctgcgccacttttggctcgacattggtggtggaggtcaggaatccggccaccgcctgggtggagggcacggcgaggttcacgatgcgcgtgcgcgagcggatggtgggcagtacatcctgggcactcggcgcacacagcagccagatgcagtgttcagccggctcctcgatctccttcagcagcacgttggtggtgcgctccagcatgcggtccacatcctcgatgatgatgatgcgccatggtgccgtggcaggcatttgctcggaggcggtgatgatctcgcgcacctggtcgatgccgatggtcactttgttggtggccagcactgtgacatccgggtgggtgccagcgagcacctgttgggtgacgcgcgtgggctcatcgttcatgccgtggtcggggctttccagcgccgccgcgaatgctcgggccatattggaacggccggagccgggaggcccgcaaatcagccacgactgggtgatctgacccgggtcgccctgcgcgatgcgactgagcatgtcgattaccggctgctggccgactagtgaatcccatacgctcatcggacaccgcccatcgtcacggctcctgtagacgccccggatcgcgccatcaccgtatccacatctgcaacattgtcccgcagcagtgtctgaatgtccgcttcgatggcggaccacacctgttcgatggactggctggcatcgatcacgtggaaacgattcggctcggccacggccaagtcgaggaacgcctgacgggtgcgggactggaagtcgctgccggccgactccatgcgatcttcggcatgctcaagacgattgtgggaaagcgccgaatccatatccagcagatatgtgcggtcgggcagcaggttgttggtggcccacatgcttaaggctcgaatctcttctggcgtaagttcgcggccaccggcctgataagccaaggaagagtctaaatagcggtcggtgatcaccacttcaccgcgctccaatgccgggcggatggtttcggcaacgtgctgggctcggtctgcagcgaatagcagcgcctcggcgcgcggtgcgatgtcgacggcgcccccatccacaccgtgcaacagcagttggcgaatggccttgcctagcgcagtgcctcccggctcacgggtaacgaccacggtacgcccctgagcctcaagatacgcacgcagccgctcgacttgcgtggtcttgcccacgccatcgacaccttcaaacgaaacaaacagaccgctcatgctattgaccttagcgttaggcgcagagttgtgcccaacaggcagttaaaccagctctacctccgtttcaaggggctgatttggtcttttctgaaggtctacttccgtttcgaggggctgttacccaagtagacaacgtcccaaaacggcggaatgacgttggcgcggagccgttcatactcgtggttcagcagatgaccagccccttgaagcggaagtagatattctcaaaacgagaaatcagccccttgaaacgcaagtagagcaataattccgctcagccacgcttgggaattacggcggggcgctcgtagccctcgttggcggtcagccagtcgacatccttcttgacggtggcggcggtggagctgagcttttcggcgatgcgctggttggaccagcccttgtttgccagcttcttcacctcggcacggcgtccggcgcgcttggcctcggcggcattggtcgcagccgaagcagcgcccttcttggctcccttggctcccgacttcgcggcaccggcacgcccagcaccgcgacggccacgggtggagggaccagccgcacgcttttcggcgagcagtcggaaggcgtcatcaggggtgatggattcaggcgtgtactgacgcggcaccgtgcgattggtctcgccatcggtgatgtacgcgccgaaacggccgtccttgatggtcacgttcttgccggtgttcgggtccttgcccaaatcacgcagcggcggcttggcggcaccacggccacgcccgcggccgtacttaggctgcgagaacagttctttggccttgtcgatatcgaccgtgaagatctcgtcttccgaggccagcgagcgggtctccgacttgccgtcggcacccgtcttggtcagataggggccgtagcgaccgttgttggcggccaccgtgcattcggatacctcgccggtttcggcgttggtttcctcgtatgtgcccacttcgcgcggcaggctcagcagctttagcgcgtcttccagcgacagcgattcagggctcatcgtcttgaacaacgaggccatcttcgggcgcgacgcggcggcggccgcggccttcttcgaacccttcttggccgcagaagcaccagcagtatcgccagcagcgccagccgaagcctcagccggcggcaccagcgccacatacgggccgaaacgcccattgcgcacctcgacggtaccgccggataccgggtcaacgcccagctcgcgcggtccaccggagtggttgtcgatcaaatcgcgggccacggccaccgtcagctcatccggcgcgatggtgtccggcagagacgcgcgcttcgggttgccttcgacgtccagatgctccatgtcttccagatacgggccgtaacggccgacgcgcacgtgcaggccgtcgccgatgtcgatggtgttgatggcgcgcgcgtcgatctcgccgagctgcgcgacctgctgttgcaggccttcgtgcgcctcgtcggcgttgcgggcggcgccctcgccggaaccgaagtagaagtgggtgagccagtcgcggccggattcctcgccgtgggcgatgcggtcaaggccgttttccatctcggcggtgaactggtagtcgaccagcttggggaagttcgtctcgagcaacttggtcacggagaaggcgagccagctggggatcagcgcacggccacgctcgtatacgtaaccgcgatccatgattgtggagatgatgctcgcgtaagtggacgggcgaccgatttccttggcttccagcgtcttgaccagcgtggcctcggtataacgggccggcggctgggtttcatggccgtccggttcgatgtcgcttgcctcgacctgctggccgacgctcatcggcggcagggaggtgttggattcggaggcgtcacccctgacggccttgacgtccgtcttgccggcggcagcagcctggtccgagccagccccagcgccgggagcggcggctttgggcttgcgcccctcccccgtggccttcataaagccggggaattcgatgacagtgccggacgcttggaacacggcctcgccctcagtggggccggccggcgcagacaggcgcacggtggcggtggagccggtggcgtcagccatctggcaggcgagcgtgcgctgccagatcagcgtgtataggcgcagctggtcgccgggaagtttggaagccagctcatccgggtcgtggaagcgcgagcccgccgggcgaatacactcgtgggcttcctgcgcgccagcggttttggtggcgtactgcttgggctcggcggagaggaacttgtcgccgaaatggtaggagacggcgttgcgggcggcggtgatggcctcctgcgacagcgtcaccgaatcggttcgcatataggtgatgtagccgttctcgtacaggctttgggccgcgcgcatcacgacgcgagcacccatgccgaggcgattgccggcggtctgctgcaaggtcgaggtggtgaacggcggctgcgggcggcggcggtacggcttggtttccatcgacatcacagtgaaatcggcggtcctcagcgcttcagccacggcagtggcaccagcctcatcaagctggcgaacgttcgccgcgaacccgtccggggtcagctggccgtcggcaccgaaatccttggagccggcgagtcgcttgccgccgagcgcgatcatgcgggcggagaattcggcacgctcccccagcgcgtcaggcgcggccaacatggcgacgatatcccagtacggcacacgcttgaatgccatgcgttcgcgttcgcgttccacgatcaggcgggtggccacggactgcacgcggccggcggacaggcccgggcccaccttgcgccacagcaccggcgacagctcatagccgtacagacggtcgaggatgcggcgggtctcctgtgcgtcgaccatattgccgtccacgtcgcgcgtgttgttcagggaggcgttgatggcgttcttggtgatctcgtggaacaccatgcgcttgaccggcaccttgggtttcaaggtctgcaccaagtgccacgcgatggcctcgccctcgcgatcctcatcagtcgccagatagagttcgtcggcgttcttcagggccgatttgagttcgctgaccgtacgcttcttgtcgccgtcgacgatgtaatacggcttgaacccgtcgttgacgtccacaccgaacttgccgaacttggccttgtctgccgcgggcacctggctgggctgcgcgaggtcgcggatatgaccgaccgacgccatgacggtgtaccccttgcccaggtagtcaccgatcttgtgggccttggtcggagactccacaatcaccagtttggtagccatacccactccttatgtattgcgcgaaacacacgacgtttctggcgtcataatactcatgaatcatatccaactgccaaattccgccgttgtgccgggcaaattcggccgttcgcacctcatgttttaccgtttgggcggtgccggcggagcgccgatcaggcccagcctgcttaagggcgctgcagtgatctgacgtagggccagcaacagtccgaatgcgagcatggccacacccgtaatgcccacaacagcgctgacattcgccccctgaaccgcccaactggcgctgacattgagccccggcaccacctgccagatcacataaccgctgtaggcgagcaacagcaggcccccggtaatcaacacgctgccgacgatctgcacactcactgaggagacgcggtggcccggctcgtccatgccggacttgcgtgtaaccgccagagcgagcagggccaatcccgccaccagcaggatggacatcgccacatccgaagggcgatgccattgcccgtatatcacagagacaccgacggtcgccgcccaaaccacgccgatgacgcccgccaaagctcgaaccgcgcgaggcacggtaagcagcagaatcaccgcacaggctgcggccagcatcgtgtgtccggaaggcgcggaattagcggcaggcgattcagtgttgatgatgaacggacgcggcaacagacccttgatacgggtgacggccaagcagaccacggcgaacacggcgatttgcccggccaaccaccagcggcgtcgaatcagcgccgtaataatgccgattgcggcaattgtgcagctgacagcgataaccagccaggattgtgcgacggcgttcatcatgccggtggtccaggacggtacatcgttgtgcaggtttttccagaccagttcgtcgtacgattgtccgttttcggtaaacacgcacccccaccacacgccgaagccaatagcgatcaggagcagaccgaataccacgcacagtacgcggctggagattcgcgggcgcacggtaagcgggtcaagccgggccaagccacggtcgatatcagatgccccatccgcatcgtccatgcccagcggcctgaaatcccctaaggagcctgatgtggatgccgatgcatctgaaccggagaccgggccgagcgcagccaatgggtcaacaacgttcgacgacgagtcaggctgcgctgcgcctgagccgaccagattgaccgccgcatgcgggtcgcgaattctaggggtctgtgcgtcattcatacgttcgactgtacggccgcgccccggacagggagccgtgctcgtgccagctcacggccaaatccgcacaaatggaaaacctccacgcacccgtcagaggccacttacccttgctgcattcctgccctgggggagttgggtgacatagcgccgcgtggaggctggggataagtctatggagacgtatggaccagcgcagcaacacgaaacgtgcgcgccgggtcgcacggcaggccaaccagcgcattcaggcaatattcatgcagcatcaaggaacgtgcccaattgtaagaattccggaaaaataccggcataaatgcgtgtggttacgctcacgtcaaacgattgttcaaggccaacagttacggtggacaccatggcttcttatactcgtcgtgcacattcgggaggcaatggccccgctctgaggcaaccgcgcaccgcgcaaagcagagccgaccactccgcacaggagggcccctatacgccccaggagagccgttcccgccacgcaagccacaaggcttccaatagccatcgagccccgaacaggaagaaaaagaacacaggaaaaggcaagcaccgtgtactgaaatgggtgctgggcatcttcttctccctgattggactgggcttgctggccggtatcgcagtattcgcatacctgtacaccaccaccgaggtcccgcaacccgaaaagttcgcgttggccgagaaaaccaccgtgtattacgcggacggcaccaccgcgatcggctcctacgcggaacagaatcgttcaatcatctcttgcgaggggctgccggactacatcggcaacgcgattgtggcgtccgaaaaccgtacgttctacacggataaaggtcttgatctgaagggcatcgcccgcgcattcattaataatgtgaccaagggcacgcgccaaggtggttccaccatcacccagcagtatgccgagcggtattacatgggcgaaaccacatcctatgtgggcaaggcgcgcgaggccatcgtggccatcaaaatcgcgcaaaccgagtccaaggacgaggtgctgtgcaattatatgaacaccatctatctgggccgcaactcctacggcatccaggcagcggccaaggcatacttcaataaggacgccaaggatctgacgctgtctgaagcggcgatgatcgccggcattattccgtcaccgtccacgtgggatccggccgataacgccgatatggccaaatcgcgcttcaagcgtgtgctgaacatcatgcaggaggatggttacatcactgccaagcagcacactgatgccaagttcccgcagactgccgcggtggcgcagcaaaacgaatacgcggggccgaacggttatctgctggatatggtgcgccgtgagctggtgcagtccaaggcctttaccaaagaggatttggataccggcggatacaagatcatcaccaccatcgacaagagcaagcaggaccttatgcagtccatcggcgacacccgtctggacgacatgcctgaatccctgcaaatcggcggcatagcgctggacccgaagaccggtgaagtattgtccgtatacgccggttcagattatttgtccaagcagctcaacaatgccgatcaggccgtattcgaaccgggttcgactatgaagccgttcgctttgctgggggccgcgcaatccggcgtcagcttcgatacgttgttcaacggcaattcccaccagcacttcaccggcttggatcaagaggtgaataacgctctggagaacaactggggcaacatcaatctgtatcaggccaccgccaactcggtgaacacggtgttcatgaacgtcaatgagcatctgacgccgaagcgcacggccgcaatcgcccatgaagcgggcattcagggcgatatcgatgaaaactccatgtacaacgtgctgggcatcaacgccctgaccgtgtgggatttggcgcaaggccattcgaccatcgccaacaatggtgtgaagagcaccttgcacatggtgtccaaagtgcttgattccaacaataaggacatgtacaacgcgcccagcaaaggcaccaaggtgttcgatgccaacgactgcgctttggtgcagaaggccatgcagggcaccaccacgtacggtacggcggccggcacatccaacatgctgggccgacccatcgccggcaagtccggtaccgccaacgacgaaatggcttcgtcgttcgtgggatacacccccagcatgatgaatgtgtgggctatctggaacccggacgataagggcaatccgcaggcggtgccggccttctccggatacggcatctcttccactggataccccgcccacctgttccaggagttcatggctcaggccttgcaaggtaccgaggtggagcagttcccgaccgctaaagacaatggcaagatcggtggacccgacggcacttggggcttgggcaagggacagagcagcggcctgtccaacaacaccaacaagcagtccaccgaagacgcgcagaagcaggctgagcaggacgcacagcagaaggcggccgaagaggaagccaagaagcaacagcaggcccaggagttcgcccagcagtgcctcgccaatccgagctattccaccgagtgtccgaattatcccggcaccactaccggcggagatggcaacaatggcaacaatggcaacaatggcaacaatcccggcaataccggcgggaacaacgggaacaataccggcaacgataatggtaattccggaggcaccggcgggaacaccggcaccaacggcgtcacccagtagtaagtaagcacagacaacaaagctccctctgatgcaatcagagggagctttgttttgttgttagcgctcagcgcttgcgctgggaacggttgatggcagagataatcgacttcagagcgctggtggtgatcgacgaatcgatgccgacgccccacacgatctgcgcatcatcggcctcgccgacctggcattccacgtacgaggcggccatggcgtcggtgccgacggacatggtgtgctccacgtaatccataatcgaggcgtcaacgccaaagttggaaatggcgttgaggaaggcggcgatcggaccgttgccgatgccggagacctcgcgctccacgggcgcatcgaccccgacgttcacgccgcggtcgagcaggcgagccttgagcacggtatcggagccatcctcaccggagctgacggccaccttgagcagcttcaagcggccccacggcgcgagcgaggcgtcatgagtatcgcccacaaccacaccggcggcggtcatgccggactgttcgatcggcaggtactcgtccttgaacagacgccagatatcctcgtccttgacttccttcttggtcgtgtcagcgtagtcctgcacgatcttgtcgaattcaatctgcagacgcttgggcaggtcaagattgtggttggtcttgagcaggtaggccatgccgcccttgccggactgcgagttgacgcgaatgatggcctcgtacgtgcggccgatgtccttcgggtcgatcggcaggtacggcacaagccacacgaagctgtcgagatcggcgccagcgcgctcggcggccacctgacgagcctcgagacccttcttgatggcatcctgatgcgagccggagaacgcggtgaacacgaagttgccggcgtacgggtgacgctcggagatcttgatctggttgcagtactcaaccgtcttgcggatctcgggcacgttggacaggtcaatctgcgggtcgatgccttgggtgagccagttgaggcccagcgtgaccaagtcgacgttgccggtacgctcgccgttgcccagcaggcagccttccacacggtcggcgccggccagcacggccagctcggtggcggccacgcccatgccttcgtcgttgtgcgggtggagggagagcactacggagtcacggtcgtcgaggtgggtggagacgtactccacttcgtcggcgaacacgttcggcgtggtcatttccacggtggcgggcaggttgatgatcatcgggtgctcgggagtcggcttgataacaccgatcacggcgttgcacacctcgacggcgtactccggctcggtgccggtgaaggattccggcgagtactcgtagtacaggtcgatgcccttggcctcgttctcgaggtccttgcacagttcggcggcgtcggtggcgagcttcttgatctcttccttgttcttgcggaacacgacctcgcgctgcagcacagacacggagttgtagaagtgcacgatggcgcgcttggcacccttgagcgcctcgtaagtacggcggatgaggtgctcgcggcactgggtgagcaccacgatggtcacgtcgtccggaatcagctcacgctcgatgagcatacggatgaagtcgaaatcggtttcggaagcggacgggaagcccacctcgatctccttgaatcccatggagacgagcaggttccagaaacgcagcttgcgctcggaatccatcgggttgacgagggcctgattgccgtcgcgaagatcgacggagcaccagcgcggcgcgcgctgcagtcgcttgcccggccacgtgcgctccgggtaatcaaacgggatctgcttgtcgtaggcggcgtacttgttatacggcatacgactcggcttctgcggatcgccgatgaatcgtgccggaggcagcagcgggtcgttgttccccccattggacgccgcagccactgccgcgagatcaaaaacggatgattgaccctgacccattgttcctcctttactgtgcgaaccattcatacaatcgcttattggatattcgtttacgcattggtaacatgcgtaacttcctccatcctagcgacggcccattccaacaccccgttcatctcacaatatgccagcacacgtagcgcttcccggcgcagtactactagacttgcaactatgcgtggaggcgcatgggcttccacagcgagagaagaggtccattatgacaaatccaagtatgcctcc

SEQ ID NO: 2191 - DNA, 13587 bp, Unknown
  R51_24m  MAG No. k141_21533
cgccgcctgcggcatcaccatcaaccgcaacaccgtgcccttcgacccgcgcccggcctcggtggcctcgggcctgagaatcggcacgtccgccctggccacccgcggcttcgggccgaaggaatacgaggaggtggccgacatcatcggcaccgcgctcgccgccggaccgtccgccgacgtgaccgcgctgaaggctcgcgtcgacaagctcgccgaagacttcccgctctaccccgacctggaccagatccactgatttgctgattcactaatccaccgtggtgtaccggttagtgatgattcgctgaccggagcgcatcacgtcaccggcttcccgcctgagacggaggggagccggttctgtttgcgattcaaaatgtcagacatcccataacaagcgggtcggagtaagcaatcagccgcgttgtgagttacgcttgactgttatgagcgatgaattgagtcctgaggtgttcgacgcggtgtgccgccaggccgatcaggccgcacgcgcacaggagcgtcttgcacaggcaaataccgaagccaaaaacgaactgctgctcgccattgcggacgcgctggacgagcacgccgcggacatcgaagccgccaacgcgctggacatgctcgaatccaaggaaaacggcatggatgcgggcaagcttgaccgcctgctgttcgacgtgccgcgcgtggtcgccgccgcccaaggcgtgcgtcatgtggccaccttgcctgatccggtcggcgaaatcgtgcgcggatacaatctgcccaacggtctgcgccttacccagacgcgcgtaccgatgggcgtcatcggcatgatttatgaggcccggccgaacgtcactgtggacgtggccagcctgtgccttaaatctggcaatgccgcgttgctgcgaggcggtcacgccgccgaacgcaccaatgctgccacgctgggcgccatcgccccggtgcttgaagcacacggtttcgaatccgcactggtgcaatccgtcgaccagtacggacgcgccggagccgccgccatgatggaggcgcgaggccatatcgacgtgctcgtgccgcgaggaggagcgggtctgatccaagccgtcgtgcgcaactccaaagtgccggtcatcgaaaccggtgccggcaacgtgcatatctacatcgacaagtccggtgatctcgccaaggccatcctgatcatcatcaacgccaaaacccagcgcgtgggtgtgtgcaatgccgccgagaagctattggtccataaggatgtcgccgccgaattcctgccgcagatcgccgccgctctggccgaggcgaacgttgtactgcaggccgacaccacgtcgtatgacatcatctccggcgcggcgatcgagggccttgacctcaaccgcgccaccgaggaggattgggacactgaatatctggccctcaagatgggcatcaaggtggtgccggatctgggcgcggccatcgaccacatcaacacgcattccacgggccacaccgaatccatcatcgccgaggattatgcggccatcgaggaattcgccaagcgcatcgactcggccgtggtcatggtcaacgcctccactcgcttcaccgatggcggcgtgtttggctttggtgctgagcttggcatttctacgcagaagatgcacgcacgcggtcccatgggattgcgggagatgaccaccaccaagtggatcggttacggaacaggccaggtgcgcgcatgaacgaggacggcaacatgaacactacggctgacacggcaaacaaggcaagcgaactgcggcccgacatcgacctcaacgatcccaagctcggcctgaagatcgcggccgaacggctcagcatcgtccgctatgtgttcctcgtgcagattgaggacggcatcgcctccgccgcccagcgtgcgtcgctcgaatacgcggacgccgtgctcatcggctggcccgagaccgattcacccgaagtcgtggacctcaacgatgcccagctcaagatcgtgcgcgaacacatggaactcatggaaggctacatcggcaaatacagccagatggagcacgacggcgacctcgacggcatgaccgacacgctcatccgcatcaccgagcgcgtggccgaggtccgccgcctctaccagccggacttcccgctgcccaccttcgccgagattcgtcgcgtggtccaagacgaatgggatgaagacatgggcaagatcgatcccaaggaagacaatccctccgccggcgaaatcgaagaggaaaccgaatcagccgatgacgccgccggcgagggcggccaggcatgagtggtgttaccggcagccacaaaacggctgcgtcagttcagtccgaaaaaacagtggaatccgccgagcccgccgaaatcattgccgtcacccaaggcgaaaccgaacggcgcatgtccgacctgtccgtaccggccggggccagcagccacggcaaaggcaggctttccgcacgcggcaactggcatacacgcctgcgcgtcggcatcatgggcggcacgttcgacccgatccacaacggccacttggtcgccgcctctgaagtcgcctgggtgtatgacctcgatgaggtgattttcgtgcccaccggccgacctgtgttcaagctggacaagcacgtcaccaacgccgaggatcggtatctgatgactgtgatcgccaccgcatccaaccccaaattcaccgtctcgcgtgtcgacatcgaccgtccgggcgtcacctacaccatcgacactctgcgcgatatccgcgcccaacatcccgacgccgagctgttcttcatcaccggcgcagacgccgtggccgaaatcatgcagtggaaggacgccgacctcatgtgggacctcgctcacttcgtggccgtcacgcgccccggctactccagcccggacggcgtgaccttgcccgaaggcaaggtcgatacgcttgagatcccggccttggccatctcctcgaccgatgtacgccgccgcgccgaacacgacgagccggtctggtatctggtgcccgacggcgtggtgcaatacatcggcaagcatggtctgtattcgtacgaggactgacgattcgtacgaggactagtgtgcatttgtacgagggctggtgaggattagcgcgaatcagcgcgcatcaatcctcgccagtgcaaggatgaacggtcaggccagtcccatcttgattttcaatgtcattacgcgagtcgccgccgccgtcaccttcgaagcgaaagccggatcggactccgcccgttcgttgaggccgtccacaattggctttacataatccgtctgaccgatgcaggacatgtcgccgcccgtctcgacaagatttactcccaattggcttacatcgtagctgctcaacgcttcggcagacatcgaatccgaaatcaccacgcccgtgtacttcaggacgttgcgaatatgaccgtcgataatcgtagaagaaaacaccgccggattattcgggtcgatggattgatacgtggctaacgacatcatcaccattgcaggatcggccttggtaatcgcctggtcaaaggcacctgcctcggccccgtccaacgtggtggtcgtatccagaatgccttcggtggtgaagtcggtattgccgcttaccgcgcccgacccaggataatgtttgaccgccgcaccgacttgagcgtctcgcaaaccttcaataacggcgatgccatgttcggcgttgccggccgcatccaatccgaaatcacgatccagcgcgccaatcggagcatttgaggcacgatcgcccaccaccgtgccgagcaccggtgccaaatcgacatttatgccagcagcagctaattgcgaaccccacgtgcctgccgattgacgcaatgcgtcagcggacattgtgccctgctcaacggcactgggcattgtgtcgaaaccggtaccagtcagatgctgtacctgaccaccctcctgatcggtggcgatgatgagacgattgccggccggcgcatatccttggagttgcgcggtcgcggtcttgaccgtatcgacgccggtattccaattgccaatgagaatggccgagccaatgtgttcgtcggcgattgttgaagccaacgaggagggttcggaaccggcgaacaacggcaccatcactaactgtcccacacgttcctcaagcgtcatggcggataccgcacgttgggcttgtgccgccggatcgtcgttcttcttcggggaaggaacgtcggtgcgcggtaacgcactcgtctgggaggtctggggagtggtggtgttgccgtttgatgtggatttggcgaaccatccgacatgccatccgtagactgccacaccggccaacaccaccgccaaagcacatattgccgccacgattggaatgctcctgtgccgaagttggcgtgtggcgtgtgctgagggacgcatatgttgtggccgttgtctgtccataccggcaagcgtagaacagagcgtagaacaggatgttgcctcattctgtgctcagggcataaccgacctcccgccctttcgataggcttgagttatgtcttttaacgatcctttctcagtactgttcggcaatggcggcgattcacgacgcaacaatgcgaacaatgacgatccgatcatcctcgatgtcgaggccgatggggacggtccggcccacaacaccaacgctggcccctccgggtcatcccgccctccacgtggtccggccaatccgcgtatcacccgtaagccagcgtccggtggctcaggagccagccgtggcagcaagattctgatcggcgtggtgctggccttggccatcatcgtcggtctgttcttcggcctgtcccgattcatcaccgatctgatgtggtacggccagctcggcttccagtccgtggtctggacccagctcggggtgaaaatcggtctgtgggtggcctacgcgctgctcatggccctgaccggcttcgtttccgcctggctggccattcgagcacgccctgattcggccgacggttccaccattcgcattaacggcgatgtggtcgaggtcggcaaatccgtcagctcgaaaaccgctcgccgcgtggccgtggtgatttcgctgatcgtcggcgtcatcttcggttcccagtttaacgcgaactggagcgagattctgctcatgttcaacgcgcagtcgttcggcaccaccgatccgcagttcggtctggacaacggcttctacgtgttcgtgctgccgggcctgaagctcgtgctcgccgccgtggccatgctgctgggcgtgggccttgtgttttccgtggtcacgcatgtgctgatgggcggtatccgcattaccatgccggttaacggacgcggtctgttctccattaccaagcgttgccgtcgccagcttggcatctggctgatgctcaacatgttcgcttgggcagtgcgccagatgattggcgtcttcgaccagctcaccgtgcagggttcacgcatcaccggtgcctcctacaccgccgtacatgccaacatccccgtcaccttcatcatggccgtgctgaccgccatcctcggcgtggtgctgggcatctggctcatgcgctcccacacgctcgaaggccaggcgtccatcggcgtgcgcgcttccgccgcgctcaaggcctggcgtgtgccggtgacctccattgccgtcgtggtcgtggtgggtcttgtactcaccgtggcatggccggtgctgttgcaacgcttccgcgtcaacccgaacgcacaggagatggaatccacctacatccagcgcaacatcgacgccacccgcgccgcctacggtcttgacaagctcaagaccgagcaatacaaggtgaccgacaagggtgagcagggcgctctggccaaggaggccgacaccaccgcgcagatccgtctgctcgacccgcaggtcgtcagccccacgttcaaacagttgcagcagtccaagcagtactacaccttcgccgacaccctggcggtcgacaagtacgagattgacggcgtctcccaggacaccgtgattgccgcccgcgagctcgatctggccggcaatgacaaccgcaactgggtcaatgaccacaccgtgtacacccacggttacggcgtggtggccgcctacggcaacaaggtgaccgccgacggccagcccgaattcttcgaatccggcatccccacccagggcaagctcaccgaatccgaaaagtacgagcctcgcatctacttctcgccgaacaccaccgaatactcgattgtcggtgcccctgaaggcacgcaggcttgggagttcgactacccgaccggttcggaaggtgctctgaccacgttcaagggcgacggcggcccttcggtcggcaacctgttctccaggattctctacgctatccgcttcggctccgatcagattctcttctccgaccgtgtgaccagcgaatcgcagattctctacgatcgttcccccaaggagcgcgtggccaaggtggcaccgtacctgacgcttgacggccgcgtgtatccggccgtggtcgatggccgcgtcaagtggatcgtcgacggctacaccacctccgacgcctacccgtactcgcaaataaccgacctcggctccgccaccaaggattccaccaccgtctcttccgcaacggtctcgtccctgggctctcagaaggccaactacatccgcaactcggtcaaggccaccgtggacgcctacgacggttccgtggacctgtacgtgtgggatcaatccgatccggtgatcaaggcatgggagaagatcttccctggccagtaccaccagctctccgatatctccggcgacctgatgagccacatgcgctacccggaaagcctgttcaaggtacagcgcgagctgctctccaagtaccacgtgacctctgccagccagtactactcaggcgaagacttctggcagacgccggtcgatccgaccgaatcccagtcccagcaggaccaggacatcctgcagccgccgtactacctgaccttgcagaccggtggcaccgaggaaccggtgttctcgctgacctccacctacattccggctggccagtccacccgtgagatcctgaccggcttcctgtcggtcgactcggatgccggcaatgagaagggcaagataggctcgaactacggcaccatccgattgcaggagctgcccaaggattcgaacgtaccgggccccggccaggcgcagaacaacttcaacgccaacgccgatgtatccaaggaactgaacctgctgcaatccggcgacacgcaagtggtgcgcggcaacctgctcaccctgccgctcggtggcggactggtgtacgtgcagcccgtgtacgtcaagtcttcgggcgtgacctcattcccgttgctcaagaagacgctggtcgcattcggtgatcaggttggattcgcggatacgttggatgaggccttggatcaggtgttcggtggcaattccggtgcggccgcgggcgatgccgagaacgtgtccggtgaccaatctggttccgataccaatggtggtcagtccggcaccacggacggaaagtcggattccggctcgtcttccgaccgcagccccgaactccagcaggcgttgaacgatgccgcccaagccatgaaggacagccagtccgccatgaagaacggcgactggaccgcctacggcaaggcgcagcaggagcttgaagacgccctcaacaaggccatcgagctcgacaagtaacttggcttccctcagggtgaggggagctatcgccgaaggtgactgaagggagtcggttacttcaactgacatagcccgtccttatcataaggacgggctatttgcgtattcaaaggaacttcatgccatacaccttccatccggccgtcgaatccgacatccaagccatcaccgacatctacaacgctgcggtggtggcgggtggggccaccgccgacctcaccccgcgcaccctcgaccaacgccgcgcctgggtcgaatcccatacgccgccctacggcgtttttgttgtggaatcggaagacggttcaatcatcggcttcggtgcgctctccgtgttctacgatcgtgccgggtatgacggcgtcaccgatttggcctattacatcgatccggcatggcaaggcaggggagtgggcacgttcatgcttgacaggctgctcaccgaggcgcgggcccgccacatgcgcaaggcctgtggcatcattttcgccgataacgtcggctccattgccctcatgcgccgcttcggcttcacccaattcggcctcatgcccgccgctgccaccgactccaccggcaccatgcgggacatgtcctactggtatttggacctgtaggcccgaggcggtttacccttgctctccatggattccggtgtcctataacactaaaaagttgtatcggatcagctcttttcctcgaacgccatatatcggacgcgcttatcccagataacggcaaactacgggacggcacgcgattttcgtccgttttgacgtggtatcccgcaatcacgtgggatgccacacacgtcaaacgatgcacatagctcgcgtcccgcaactcttcctgcgaaatcattggaattctgccattcttatgattcggtgcagataacgtgcgataacgcttgcgggatgccacgccaagaacgcccaaaatccgctgccgtcccgcaatatgtcatccgattgcagggaagcgtcatctgtctgagctgtttcccttgcttggcgtcgtaaacgacaagttgttgattgccgctgcatgtttctcctatttgagaaccgaatgctacatactgagattttttccaaccggagttgatgttaaagtgacgccaagctgggacacgctgttcgtgtgcggcatcctgtgcaacgtgctcgtctgcctggccgtgcgcatcggattcgccgcgcgctccgtatccgacaaggtgctgggcatcctgctgccgatcgccggattcgtggcgatgggcttcgaacactgcgtggccaacatgttcttcctgccgatgggcctggtcgccaaaacgtttggtttcggcgccgacgcggcgggcgtcgcggcgctcgacgtgtcgggcatcctctataacctgtccgcagccacgctcggcaatatcctcggcggccctgttcgtggcgctggcctactggtacctcaacggcaaacagcgcaaaaaggtcgctggcggcaccgcctaatagacgcgattcactcgtccccatctcttgtaatactggtattacaaggaggtgcgatatgactatggccatggtgacggcgcgcgtcaatgccgaacggaagcgcgacgcggagaaagtgcttaagcgtaatgggcgcacctattcggacctgattcgtgatctgaccgactaccttgcggatacgggggaactgccggaattcgagcgtctgacgctctccctgattcaggagcgggagcgtaggaaaaagcaggagttgattcaacgtttcgccgaccggaatttgccggaggcggaaggcgatctttcggatgaggagattctcgcgcaggcacgtatggaacgatttgggggacgggatgaaactgctgtttgacacgaatattctgctcgatttgtgcaatgacaaacgagcgcctttccataaacaatgtgttgatttgctcatggaagccgttgcacagccaaacattgagatcatggcgccggtatcgtcattgaatgacgtgtattgcgtgttgcgcaagcattatggcgaggagcgggcggcgcgagacgatatcggtggactgatggaattgttcgacatccgtccacttatggaacgccatgcgtgtatgtcgtaccgatccgatgagcccgacttcgaggacgggctcatccgtgccgttgccgaggacaatgacgccgacgtcatcgtgactcgtgacgtcgaagcgtttcaccattcatcggtccgatcgatggatgccgagcaatgccgtgccctgctgcttgccgattccaaggcttgacggcggcgttgagtacaatcttgacggttgaatccggccgggcatgggccagtgcgcgaggcgaacgcgcgcatgacgtacggaacgtacagaacgtgcatacgggaatataggaagacggacgaggagtggattatggcatcggatttctggctgattgcgggactgggcaaccccggcaaaaaatatgaggacacgcggcacaacatgggcttcatgaccgccgacgtgctcgccgaacgttggacggtgaacttcgccgaccacaaaggtctggccatgctcggtaaaagcgtgatgaacctggacggccgcaccgtcaagttctttctggccaagccgctgacttatatgaatgattccggcaatgcggtggcttccattagcgcctattaccagatcgagcccgaccatatcgtggtgattcacgatgacatggacttggaattcggtcgtatcaaggtcaaggcaggcggctccgcagggggccacaacggcatcaagtcgattgaccgttccctcggcacgccgaaatacgcgcgtgtgcgcatgggcgtcggtcactccaagcgcggtgcgaacgcgcatgacaacacggtgaactgggtgctgggcggattcggtccggaccagcgcaagcagctgcccgaattcctggctgacggcgccgacgccgccgagggcatcatcttccgcggtcttgccaagacccaggagaagttcaatggccggtgaggcgacgcacccggacctgatcaacggctcactggtaggcatcctgtctgagctggaacaggacaagaccttccttagactcgccactggtgacatcgaggtttcggacgacatcgacaattccgttctggccggtgtttccgaaggcttgcgcccggctttggccgccgccatcgggcagggtgtgaccggcaaacccggcaagccggtcgtgctggtcgtggcctccggccgcgaagccgaagagaccgtgggctcgctgcgctcctggtatgacggcgacccggacgacatcgcccagctcgaagcctgggaaaccctgccgcacgagcgtctgagcccgcgcgcggacaccgtggccagccgcatggccgtgttccgcagactcaagcatccgagcgataccgatccgatgttcggtccgattcgcattctcgtcatgccgatccgctcgctcatccagccggtcgtccaaggactgggcgacgtcgagccgctcgtgttcaccgtgggggaggacctgcccctcgacgaagccgccaaacgtctgatcgaaaacgcctacacgcgcgtggacctggtcatggaccgtggcgagttcgcggtgcgcggaggcatcctcgacgtgttcccgcccaccgcaccgcacccggtgcgtatcgaattcttcggcgacgaaattgacaccatcaaggaattccacgcctccgaccagcgtacctacggcgacggcctcaagaccatctgggccaccgcatgccgtgaactgcagctgaccgacgccgtgcgcgcccgcgccaaagccttggtcggttcgattcccaatgctgaggacatgctcgaatccatcgccaacgccattccggtcgaaggcatggaatccctgatgcccgcgctcgtggaccatctggaaccggtgggctccatgctgcccaagcacgccgtgatcctcctgagcgacccggagaaactgcgccgttccgccgaagacttggcaaaaaccgcgaacgagttcctggccgccagctggcatgtggccgcctccggccacggctccggcgcgcccatcagcttcgacgaagccagcttccttgactatgcggaaaccatcagcgccctcgaatactccgaacatccggtgattcgcctcaccagtttcggcgtggacaccacgctgaccggccacgtgcagctcgacgcccagaacccggccgaattccgaggggatgaggccaaggcctcccaaggcatcgaaggcctgctcgacgccggcttccacgtcaccatcaccgccgctgcggccggcaccttggccaggctcaggcgcgcgatcaacactaccggcatcgccaatttcgacgtcatccgctctcaggccatcgacggcttcgtggacaaagccgccaaaatcgccctgctcaccgaacgcgacctgaccggccgcacttcagccgtggccgtggccaaaacgccgaaacgccggcgcaaggccatcgacttggtggaactcaaaaaaggcgattacgtggtgcacgagcagcacggcattggccggttcatcgaaatgcgccagcgcaccatcggcaccggcaccaacaaaaccactcgcgaatacctggtcatcgaatatgcgccgtccaagcgcggcgccccggcggacaaactgttcatccccaccgaccagctcgaccaggtcagcaaatacatcggtgccgaagcccccaagctcaacaagctcggcggctccgactgggcggccaccaaagccaaggcccgcaagcatgtccacgagatcgccgacgacctgatcaagctgtactccgcccgccagcgcgccaagggcttcgcgttcagcccggacaccccgtggcagaaggagctggaggacgctttcccctatcaggagaccgccgaccagctcaccaccatcgacgaggtcaagtccgatatggagaagcccgtgccgatggatcgcctgatctgcggcgacgtgggctttggcaaaaccgagatcgcgctgcgcgcggccttcaaggccgtgcaggacggcaagcaggtggccgtgctcgtgcccaccacgctgttggtccagcagcattacgagaccttcagcgaacggttcgaagggttcccggtcaatgtggcggccatgagccggttccagaccaccaaggagatcaacgggaccgtcgagggcctgcggtccggcacggtggacgtggtcatcggcacgcacaaactgctgaaccccaagatcacgttcaaggatctggggctcgtcatcatcgacgaggagcagcgtttcggcgtggaacacaaggaaacgctgaaggcactgcgcaccaatgtggacgtgctgtccctgtccgcgacgcctatcccgcgcacgctggagatggccgtgaccggcatccgcgaaatgtccacgctggccaccccacccgaagaccgcttgccggtgctgacctatgtgggagcctacgaggacgcgcaggtcaccgcggcggtgcgccgcgaactgttgcgcggcggccaggtgttctacgtgcacaatcgcgtgcaggacatcgcgtccatcgccgacaagatccatacgctggtgcccgaagcgcacgtcggcatcgcccacggcaagatgggtgagaagcagcttgaccagatcatccgcgacttctggcatcgtgacatcgacgtgctcgtgtgcaccacgatcatcgagacgggtcttgacatatccaacgcgaacacgctgatcgtcgaccatgccgaccgtttcggc

SEQ ID NO: 2192 - DNA, 4264 bp, Unknown
  R51_24m  MAG No. k141_21870
gagcattgatgcctttgaacattgcgatcgcgtcagcgacatcgtggtggtggtcaatcccaaggtgcgcggtgaagtggaaacgttggttggcgagatgggctacaccaaggtccgcgtcatcattgacggcggtgacgagcgtgtggacagtaccgccgccgcgctcgacatgctggctactgctggcattccggacgatgccaagattctgatccatgacgccgtccgtccgttcgtggaacagtccgccctcgacggttcgattgatgcgctcgaccagttcacggccgcgaccgtggcctacgcctcaaccgacaccgtgctgttgaccgaggatctgggcgatttgaaagtggtcaagtcggtgccggaccgcccgaacaccttccgcgcgcagaccccgcaatccttccgtttcgcgacgattcgtcacgcttacgatctggctgccgccgacccggacttccatcccaccgacgacacgcgcgttgtggtcgattatctgcctgatgaacccgtcgccattgtctccggtgcggaaaccaacctgaagatcaccacgctggaggatattcccacagctgagcgtatcgccgaggagattctcggtcgtgatcccaaggaagaggcccgcgcccgcatgcacgccctgctggcccaagcggccggccagatgcatcgctagactggcattatgcgtgaactcaatgttgtgatctccggcttcgaccactatgacggcgtggaggtcaatcccgccgtcgaagtgcccaaggccatcgccgagcaggggttgggcgtctcctctgctccggacgatccgttggagcaggtcgccgtcaccgtccatgccgtcagcatcccggtgagcttcgccaaagcctggcccacgctgaaagagacgattgaggccaccaagcccaatatcgtcatcgccaccgggctcaagcacgcagcccgaggcgtgatgcttgaacgatgcgccaccaacctgatggacgcgatcaagccggacgcggacaacgtgaccccacgccgcgaacccatcgaccccaatggcccggccgcctattggacccgcctgccgttgcgctcgatcctgaatgatttcacggacgattcgattccggccaccctgagttcggacgcaggcacgttcgtatgtaattcgctgttctacaacttgctgaactggaccgccacccaggagcgggtgctgggcggattcgtcagcttcccgccggtcgtgccggcggattccagccagcatggtctgccactcgaccagcagatcgccgctggccgtgatgtggtgcgcgaagccgtgcgctactatctcaagccctccagctccggcatcctcatcgcctagcacgctgcgcgccacgccggaatagaacatggttcgcacgcattgtaacgattgcgcgtcactcaacgcccagcgctagtgcgatgcgctacagtgcttcaaggatgtgccaagagctttatgcgtgtgcgaaaggaataaacagcgatggtggatcgtttcccggtggtgctgcgaggatatgacaaggagaaggttgatgctgccttcgacgctactcaggagagtgtgaagcgtgcgcagcagacgttggccagcatgcgtgagcagattgcggcggatgacgaccgtattctgcaactgcaggcccagcttcaggaagagaagaacaagaagccggaaggcaacagcttcgcttccctgggggcgaacgcccagcagatgctcgcctccgccgagcagacgagtaccgaactgttggaacgcgccaagcaggacgcatcctccatccgtaccacggctcaggctcaggccgaaacgctgatcaacaacgccaagctggatgcccagcatattgttgacgacgccaatgccaaggccgcctcgattctgacgaacgccaacaatcaggccgaatcagtgaccacctccgccaacgaggacgccgcacaactgcgctccgaaaccgccaagaccatcaccgaacagcgtcagaccgtcgagcttgagctcagcaacgcgcgcgaagagcacaccaagaagatggcttccgaacgctccacccaagagcgcgaaatcgccgatatgaaggcggaagctacccagcaggttgccgcaatgcgcaaaagcgccaatgaggagatcaccaagcttaagtccgattccaacgatcagattgaggcggcgctcgccgaggccaacaagaagctcgccgacgtgcgcgagcaagtgtccaagatgatgaccgaagcccagcgcaaggccagcgaaatcattgatgcggccaagaccaagggtcaggaaatcactgatgaggccgaggtcaagcgcaccagcacgatgagccaggtcaacgccgaagtcgagcagatccgtcacgacatcgccgctcagcaggatgaggccacgaagaaggtcaacgaactcctgcagcacctcgaagagcgtcgtgtggcggccaagcgggaagccgatgagttggtcggccaggccaagaacactcgcgaccaagccgattcatatgccgcgtccaagcgcgaggaggcggacatccaggccgccgcaatcgtgcataaggcgggcgaggaagccgatgcgcagatcgaggagcgtcgtgccgccgcccaaagcgagcttgacggtctgtccaagcgcatcgccgatctgcaggaacgcgagtccgtcatcacccagcgtgtttcggaactgcgttctatgttctcgcaggcgttctccggattcgctttcggtggtaatgcggcggcctctggtcagagtcaggaagccgctgccgtggcgtcattgccggtggtcgcgcccgtcccggaagtcaagcctgtacacaacgaggccgatgatcagccgggtgagttgagcggaaacgagtcggctgccgacgatcacaatgagacagatgcggcaccggctgattcggctgattcagctgcgcagaatgagcagtccgaatcgtctgagccgtccgagcaccagacacagggcgaaccggaggccccgactcaggagaatccagccgtatctgagcagaacggcgaatgacaggccttcgattagactactagcggtaagaattacggcacctgcgctttcgagccaggtgccgtattcgtttggatctgcgccacaagcgcaccatcacagaaggagtatgacatgagtgaattgacgcctctgaccggcgaagcattgaataccctgcgcggcgatttcgcacagagcggcaccaaccgtctggccatgaacgcggtgaccgccgccggcatcgacaaggtggctcgcaattatgaccgcgctcgtctgatgcagcgccgtttctccaccatcgttgacaatggcgaagccacccatcaggatcgctccggccgctgctggctgttcagctccctgaacgtggcccgtttcgtggccaagaagaacatgaacttgaaggagttcgagttctcccagaactacgcgatgtactacgacaagctggagcgcgtcaactacttccttaaggatgtggccgctctggtggctgccggagagccttccgactcccgcctgatgcagcacctgctcgccgacgtgatgggcgatggcggccagtggaccatggccatgaacgtgtacaagaagtacggcgctgtgcccaaggacctgttcccggagaccgaatcctccaagaacaccggtgaaatgaacacccagctgcgccacatgctgcacaccgccgtggcgcacatgtacgccgctgacggcgatgcctccaaggtcgaggcgattattgccgacgccactgctgccggccaccgtattctgaccatccacctgggcgagccgccggtctccttcgactgggaatggaccgacaaggatggcgaattccaccgcgacggcgagattacgccggttgagttctggaagaagtacgtgggtccggctggtcttgaggactacgtgtgcctggtggatgatccgcgcaccgagcacgccaagggcaagaagatcggcatcgagcacctcggcaatgtggctggcggcgacgccaccgagtacctcaacgtgccaaaccagttcatgaaggactgtgtcaagcagattctcgttgagcagggcatcccggtatggttcggtgccgactgccacccgttcatggaccgtgagaacggcgcttgggccaccgacctgttcgagtacggccgcgtgtacgacgtggacttcgatttggac

SEQ ID NO: 2193 - DNA, 15699 bp, Unknown
  R51_24m  MAG No. k141_21931
gtcagagaacctgagtctccgtaggaatcactggctcgcccttcatgaggctctgcgcggtgatgggcagttcggacaacgccttggcgtggtagtcgtgggcggccatgatggcgtcatggccctgccactgagcgtcgatctgcccatgatccacaaagtcgaccagcaggttcttccacgtcggttcaggcgtgaaaccggccagcttctcctccgagccggaaatcacgtgttcggcttcggctaacgcgtattcgtaggagcggaatgccagtttgcgaccgggcactgtggccttgtccttggatttcttcatgaccggaaccatcgtgccgtcagcgccttcacgttcggtgagcttgtacaccatcgcacaagtgggagcgccggagccggtgaccagcatggtgcccacaccataggagtcgaccggcgcggtctgcaatgcggcgagcgcgtactcatccaaatcgttggtcacggtaatggtggtgttcgtggcgcccaaggcgtccagctggttgcgcacacgctgggccatggcggctaggtcgccggagtcgatgcgcacgccacccagttcgggaccggccacctcgacggcggttttcacggcttcctcgatgttgtaggtgtccaccagcagcgtggtgttcttgcccaatgcctcgatctgcgattcgaaggcgtcacgctcggaatcatgcaccaacgtgaagcaatgcgcggcggtgccaatggccttcagaccatacagctgggcggccagcagattggcggtacccttgaatccgcccactacggcggctcgagcggcggccacggcggcccactcgttagtgcggcgtccgcccatatccatgcaaggacgatccttggctgccgacgccatacgtgaggcggcggaggccactgcggaatcgtagttcagcacggatagaatcaacgtctccagtagcgtgcattcgccgaacgtgccttcgacctgcaaaatcggggagttcgggaagaacatctcaccttcgcggtaaccgcgaatcgtaccggagaagtggaagttctccagccacttgatggtctcggggcttaccacgtgacggtcggccaggaacttcaggtccgcttcgtccaagtggaaatgttccagcgcatccagaatgcggccggtgccggccaccacgccatagcgacggccttcgggcaggcgacgcgtgaacacctcgaacacgcatttgcggtcggcggtaccgtctttcagagcggcgtcgagcatcgtgtattcatacatgtcggtcatcagagccggcgaataatcgaccattgcaaggcctttcctacataagtggtgaagttgcacctaagtgtagtccgggcaaagccatacagcccactggcgaagcggtagactcgatgcatgagattcatcgtggcgttgtggcgctttgcgatcgccggtttctgcttcgtgggcacatatgaggcatggtccaaaccgcagttctgggtgtatttcacgttccagaccggtttcgtgctgggcatcgtgatgctgtgggccggcgcggccacactgctcaaaggtattcagccgcctgcatggcctaagggatgcctgactgtgtacgccatagtcaccgcactggtggcgttcttcctgatgcctccggacgacccggcatacgtgccacaggttattggcatcatgaccaatacgatgctgcacaaaatcgccccgattatggcggttatcgatttcgtgctattcgacccgcaccggcgtttccgctggcattacatgttctcgtggctggcgtacttccctgcatacttggtcttcgtgctggcccgtgcgacgatttggccggggtccggaccggcggccggcggcagtccgtatccgtacgacttcatcaacctcgacgcactcggctggcaagggttcggcattagctgcggcaagctggccatagcgttcttcgtgatatcgctcgttgtctggctgctcgaccgcgcactgccgagcaaggccttactcggatagacgcgcccacgatcgacgcacatcggtcttagtgcccagccggcatccagctcagcactcgatggcctcagcattcaatggaataggcgcggtttttgtactcgcgccaatccggccagtcttcaccggcgtagagggctgcatatggaactgcgtggccacctgacgaatggtgtaggacatcatgactccttactgcggcgacacgccgaagcgtcgcagccgtttgcattcaagttcacttgaactggaaccttagtatctaagaacacttacgaataccactcgatcggcgtcggtttgtccatcgcagaccagcattcgtaagaacaaaaatgacattgtaaggagactcaatgttcgagccaaccaccacctacgctcccaacccgcaccgttacgacacgatgacctacaaccacgccggcacctccggcctcaagctgccggccgtctcactcggcttctggcacaacttcggcgacatcacgccattcgaccagatgaagtccctggtcttcaccgccttcgacaacggcatcacccacttcgatctggccaacaactatggccccgaacccggccaggccgagaagaactgcggcctgctgctcgccaagtacttcaggcaccaccgcgacgaactcgtcatctccaccaaggccggctacgaaatgtgggccggcccctatggcgacctcggcagccgcaagtacctgctcgccagcctcgaccagtcgctcgaacgcctgggcctggattatgtggacatcttctaccatcaccacccggacccggaaaccccgcttgaggagacgatgggcgcgctggctcaggccgtgaactccggcaaggccctgtacgtgggtctgtccaactacgatggtccgacgatggagaaggccgccgcgattctcgccgacctgcacgtgccgttcatcatcaaccagaacaaatacaacatcctcgaccgcaccgtcgaggagaacggtctgaaggagaccgccttcaagctgggcaagggcctcatcaccttctgcccgctggcacagggcctgctgaccaaccgctatctcaacggcattccggccgacagccgcatggctcacgatccgcgattcctcaacgattccgccctgaccgagaaactgcacaagcaggtcgtggacctgaacaatctggccgccgaacgcggccagacgctggccgagatgagcctggcatggctgctgcacgatggtaaggtgacctccgtgctgaccggagcctccaagcctcagcagattctcgacaacatcggcgcgctgaagaacacccacttcagcgacgaggagctcaagctgatcgacgagatttcggctcggtgaccattttggcttccctcgctgaggggagccaagtaccacctttagcgcgtcatttcttcgtagatgcgcttgcaatcggggcaaaccgggtacttggacggatcgtgcttgggcacccagaccttgccgcacagggcgaccaccggacgaccggtcgcgcgtgattcggcgatacggtccttagaaacataatgtgcgaatcgatccgcgtcgccgccatcgtcacgaaccggagactccttggtttccgggcgttccagcaccgacgtgccggcaccttggtccgggttgcgcagcggttcggcatcatcaacgaacatctcggcaaaagtcatggtgcacttctttcctcgtattcaacgattcgactgcactccatcatagattcccgtcgttacccgcgaaacccattggcgcgtaatccgcacacctccacacacccatgtcgcgcatcacgccaccccgccacatacaatgccacataacaatgccgcacacaacgccgcaccgacgccacatacggtaccgcacacactgcctcatacgccgacgcgacaacaatgcacgctcggcagcacgaagcacaccattcgcggtaggctataaggcatgactatcgcagtatgccccggctcgtatgaccccgttaccgccggacacttggatgtaatcgagcgctcggcgcggtttttcgacgaggtgcatgtggtggtggccgtcaacgccgcgaaaacaccgatgttttccgaagccaccagagtcgacgtgatccgccgtgcccttgacaaagccggttgcaagaacgtcactgtttcttccaccgacggcctgatcaccgactactgcaagaaggtcggcgccaccgttatcgtcaagggtctgcgccagaacggcgactatgaagccgagctcggcatggcgctggtcaatcgcaagctcgccggcatcgaaaccctgtttttgccggccgatccgattcttgaacacatctccagttccatcgtcaaggacgtggcccgccatggaggcgacgtgaccggcatggtgcccgattgtgtcgtgccgatgctggccgatgccctggccgaggaacgtcagcggaaggactgatgcactaatgactatgagcgatgaccaccccactggatacgtcgatctgaccaaaccgaatgcggacgccgcatcgtccactccggagccgtccgccccggaaccgcccgcgtctacgcaagccgcgccggcacccaccgaagaggccgatgttctcgccggatcgccgcccgccgcgcctacccctactccggcacagatgcaggccaaagcgcaggcccaagcagctcagcagacccgggcacaagctcagaccgctcaggccgccggcactcgcccctcgttcatgaacgaaatgcccgacctgcgagaaaccacggacgacgacccggccacggtcaagagccgcgaggaattcaccacggtgtatgacatcatcgaccagctcgaggcggcactgggcgaagcgaagtccagcatattcgcccccggcatggtgaaggttgaccgcgacgaattcaccgaccagctttccgagttgaagaaaatgctgccggtgcagttggagcgcgcctccgccctcatgcgcgaggccgagcgccgtctggaatcggcacagacccagtccaacgccatcgtcgcctccgcacaaagccgcgcagccgacatgatcaaggacgccaacgaacaggcacagttcctggccggccaagagaacgtcaccgagcttgcacggcagaaagcgcgcgcgattcttgaccaggcacagaccagagccgaccatctgacccaaggcgcggaccagtactgcactacggtgatggaagggctgtcccagcagctcggcaaactcagtcgggatgtgcaggccggtcttaacgtgctggaagagcgccagcgtgcggccggcgaacagatgccgcacctgacgctgaacgactatcccgaagcccagtaacgccagcagcaccagcaacatcagtaacgcgaataacgccagtaacgaataactccagccaacatacgaaaggcaccaagaacataccatggcacgagttgaagattccccgtgggccattccggtagcgcagattgcttcgcgcgccggtcaatccaagccgattgacgccgatttcccggccccttccggcattggcgacagcatcgtcggcatcaaggatggtgagcccgtacatgtgagcgggcagttcgattcgattgtggacggcctgatcttcaccggccgcctggtcgcgccattcgtcagcgagtgcacgcgctgcctgaagccgattgacgaggactggccggttgatgtgacggtgttcttcccgtatgagtcgggtcaggacaaggccaacggcaagggcggcaagaacaagaaggacgacgagatcgacatcatcgccggcgaggacgagtcggaagacacgtatccgctgctggagaacggcgcattcgcggacatcgaggcgatgatccgcgacacgctggtcgaatcgctgccgttgcagccactgtgccgaccggattgcaagggcctgtgctcgcagtgcggtgccgatctgaacgaggatcccgaccatcatcacgatgtgacggatatccgttttgccggattggcggggctcaaagcccagctcgaggccgagcagaacggcaagcaggccgagtgacgcgcgcctgaacggagtttgtacgagccgtgcgttaagataacggacgcttaagctcaattgttcgaacgaaatagaggatactcaaatggcactgcctaagtacaagacctcgcgcgccaacacacactcgcgtcgcgcgaactggaaggccaccgctgctgcgaccgtgaactgcccgaactgtggcgctccggccctgccgcacatggcttgcccgagctgcggtaactaccgcggccgcacctaccgctccgccatccagccggctcacaccaagtgagtcctgcgataacggcttgaatgaaggccctgccatcgacgggtggcggggtcttcgcataagtgcaccattacgtacaccatcgcattgcaaacaacacaacacaacacacaacacatcaccatcgcgtgaaggaccatacaacaatcatgagtaatgaaaccccacagcagccgacgccggccaacgagcttcttgaagcgttgggcaccactctcagcccggatctgctcgtgcaggcactcacccaccgctccttctcgcatgagcaccccggcgtggccaattacgaacgcctcgaattcctgggagacgcggtgctcgaactggtctccactgaaacgctgttcaccattcacccggatatgaccgaggggcaactggccaagatgcgcgccaaggccgtctccgaagacgcgctgagcgccatcgccaaaaccaagctcaaggtgggcccctacattctgctgggtcacggggaaaccgagcagggcggcgcggagaagaactccattctgtgcgacatcgtggaatcgctcatcggcgcgaccttcctggaacacggcatcgacgaggcacgcaaggtgattcaccggcttattgacgacacgctcgccgaagtggccaccgagggcccggcacttgactggaagacctcgctgaccgtcaaggcgcacggcctcggcaaggatgagccggtctaccatatggaggtctccggcccggagtacgcgcagatcttcaccgcgcgcgtctcattgggcgagaacggcgacatcatcggcatcggtaagggctccagcaagcgtaaggcgcagctggcggccgccgaagcgggctggaagtcactggactcgctcaagacgcggactaagtaagcccgctgtcagatttgcgaatagactgataccaacatgagcgacgagtcgtgccggggccacaagtctcggagaagcgactggaatcagacacgcgggcacccggccccatcccaaggtcgggcaggttcgcggcaaaatctatgaggtgagaggaatcatggctttacccacgcctttgcaggcattcagcggcgtgccgaaaatcaacgcggcccccgataagcagaccatcgttgatggcgagaagatgactggcgcccaagcgctggtgcgttcgctggaggatctcggcgtcgaggacgtcttcggcattcctggcggcgcgattctgcccgtctaccacgagatcaaagacaacacgaagttccgcttcgtgcttatgcgccacgagcaggccgccggccacgccgccgaaggctacgcactggccactggcaaggtgggcgtgtgcatcgtgacttccggcccgggtgccacgaacgtggtcacggccattgcggacgcgaacatggactccgtgcccatggtcgtgattaccggtcaggtgggcgtgcaggccatcggcactgacgccttccaggaggcggatatcgtgggcatcacctacccggtgtccaagcactccttcctcgtgacccgcgcgcaggacattcctcgcgtgctttccgaggcgtactacatcgccaacaccggccgccccggcccggtggtcgtggatctgaccaagaccgcacagaccggcgacatgtactactcatggccgcagcgcatgattctgcccggctacaaccccaccaccaaggcgcacggccgtgtgctgtccgacgcggcgaagctgttctctcagtcgtaccgcccggtgctgtatgtgggtggcggcgccgcccgctccaacgccggcgcacaggtcaaggctctggccgacctgaccggcgcccccgtggtcacgaccctgcccgcacgcggcatcattcccgactccgacccgaagaacctcggcatgctgggcatgcacggtacgattgccgcaaccggtgccgtgcagcgcgctgacctgcttgtggccatcggtgcacgtttcgacgaccgcgtgaccggcaagctcgacgccttcgcaccgaccgcccgcgtgattcatattgacatcgacccggctgaaatcggcaagaaccgtcagcccgacgtgccgatcgtgggcgatgcggctaccgtgctcgacgacttgattcccgaaatccagcgcacgcaggccattcagggcaagccgaatctggccccctggtggaaggcgatcgacggctggcgcgaggaatacccgatgacgtgggatgagccgaccgacggatcaatggccccgcagtgggtcatcaaaaagctctctgagatggccgatccgtccaccatctgggtgaccggtgtgggacagcaccagatgtgggcttcgcagttcatcgatttcgagaaccagcacgcttggatctcctccggaggcctcggcacgatgggctacggtctgccagccgccatcggcgcatccgtgggctcggcccgcgagttcgagggcaagaagccggtgtggctgatcgatggtgacggttccttccagatgacctctgaggagctggccgccgcgttcctggaccacgctccggtgaagatcgcgattctgaacaactccgtgtacggcatggtccgtcagtggcagacgctgttctacgagcaccactactcgcagaccaacctgctcgatggcgaggcgcacggtgccgatggtgcggcggcactggtcgacggcgatgcgccgctcgaagtgcctgatttcatcaagttggccgaggcatacggctgcgtgggtatccgcgcgttcaccgaggaagaggcgattgccgccatcgaaaaggcgaaccagatcaacgaccgcccggtactgattgatttccgcgtgtggaaggatgcgatggtgtggccgatggtagccgccggcgcttccaacgacgaggtgacgtacaagcccggcatcaagccgctgaccggcggcaccccggctccgggaaccggtccggacgagcatgcgaccggcgtgttcgagcacgagaccgccgctgccgctgcgagcgagcactgaggagaggagaacactcatggctaactatcctgcatcccagcctggttcccagcgtcatacgctgtccgtgctggtggagaaccgcccaggcgtgctggcgcgtatcgccggcctgttcgcccgtcgtgcgttcaacatcaactcactgtccgtctcccccaccgagcgtccggacatctcacgcgtcacggtgaccgccgacgtggaggccgtgccactggagcagatcatcaagcagctcaacaagctgctgcacgtgctgaagatcgtggagctcgacccgaactccaccgtggaacgcgaactggtgctcatcaaggtggccgccgacgaatccaaccgttccgacgtgctggagatcgtgcgcctcttccgcgtgcgtgtggtggacgtgaatccggaatcgctgaccattgaggccaccggtgccgaaggtaagatcgatgcgctgctggggcttttggagcattacggtgtgattgagctggtgcgctccggtgccgtagccgtgacccgcggcccgcgcgccctgagcgaaaaggtcgtcggttccgaggttaccggacgctgattcggcgactgcggagagacccagtccaagctcaaagggcggatgtgcatgatgcatatccgcctttttcatgcgtgcatacctcatcacccgtgctgcaagcaaaatgacagcaccttatgctagcattatgacagcaacaaggaggtgcatcatggcaacattgaccatccgaaaaatacccgatgagcagattcaacagctcaaagaagtggccgagaaaaacaaccgctccatggaatctcaggtgcgatccattcttgaagaatggctggccggcacggtggcgcatgaaatcacacgaaagaccaatttctacgacgagatccgcgaattcatgaagaacatggattttgagggactcgacaagggggaactcccactatccgagcgaaattccgccgatttccgaccgccagtatcttttgaataggaatcggccatgattattctggacaccaacgtcatcagcgaaatcatcaagaaacagccagacgaacacgttgccaattggctgaggaaccaagatacaagcaatctggcaaccaccgccatcaccgtcgccgagttgttggtcggaatatgtcgcatgcctgaaggcaaacgacgaaagtacacagatacgaccgtcaagctggcgcttatgacattagaggacaggacgttcgcatttgacacccaggcagctgcggattatgcccatatccttgtcgaacgcgaacgcaggggcacacctaccagtattcaagacgccatgattgcggcaattgcctgttcctgggatgcggccatagccacgcgcaatatcaaggacttcgaaggtaccgacgtggaattgattaatccgtgggagtttgcatagcggtaggccccggcaaactaccgaggccttgtgaacgttacggtttctcccgctactccaattgttcggagagttcgagccattcggcttcgagattatcgctttcagtattgacggcggtgagttgttcattgagcttgttgagaccctcgtagtcgctcgggtcatgggcggccatctgtgcctcaagttcggtcttccgctcttccagtttggcaagcttgcgctcgatggcattcacgcgcttggatgcctcgtggaaggccttgccggtgagcttcgaggtggagtcctcaccgttattggctccctctgacgagggagctgtccgcgaagcggactgagggagagatgcagcagcattgacggcggccgccttacccctaccagacttcgccgagctgctaccggtgcccgcgaagccaggcgtgtcagccggcaatcccttgccgttcttaatagcctcaaccatatcgaggtaatcctgcacaccaccgggcagatggcgtaccttgccgccaatcagcgcgaactgctgatcggtgacgcgctccagcaggtaccggtcgtgggatacgacgatcaacgtacccggccaagtatcgagcaaatcctccatgacggcgagcatatcagtgtccagatcgttgccgggctcgtccatgatgagcacgttcggctcgtcgagcaggatgagcagcaactgcatgcggcgcttctgtccgccggagaggtcgcgaatcggcgtcatcaactgggcggattcaaagccgagacgctccatcaactgtcccggcgttacttccttgccatccacaatgtagctcggcttatagcgggaaagcacttccttgatcttgtaccggcccagtttctccagctcatcaagacgctgcgagagtacggcgaacttcacggttttgccgatgttcacatggcccacggtcggagtaatcgaaccgtcaatcaacttcagcaatgtggacttgccggcaccgttcgcaccgacgatgccgaaacgatcgccggggccaatcagccaagtcacatcgtcaagaatctcgcggccggaaaccgtcaccttgcgtgcagccgaggtgacaccagccgcagcagtgccatcatccgaattcgttgcagcagtgtcaccgccgatggtttcaccacccgtgttcatgcgacgaacctcgcgatcgtcagcaagctgcggattgccgctctcagcctcggccttcttacgcgcttcctcagcggcctcgacggcttccggcacgccggcgtccaccaggcgcaggtcagtcatgtcggtgaccgccacctcaacggaaccgtgcagctgcggctcggcgtacatggcgttgaccacatccacgcgggaagcggacgcggagagcgccgccacatccgggtcgatatcggccatgccctgcggtttttcgaaaatctgcgtcacgtcgaccaaatcgaccacctgtttgccgaggcgtgaggtggccatttgcttcagttcaagtgtgttacgcatcggcggcacatcggcaatcaattcgcgtgcggccttgacgtggaacttctgcttggtggaacgggcacgggcaccgcgggaaagccatgcgagctccttgcgggccagattgcggcgcttcgtttcacgcacatcagcctggcggtcgcgttcgacgcgctgcagcatatatgcggaatagccgccctcgaacggctcgatcacgccatcgtggacttcccacatcgattcgcagacctcgtccaagaaccagcgatcgtgggtcacgagcaacagagcgccctggcctttggaccagcggttcttcagatgttcggcgagccagtggatggtgaccacatcaaggtggttagtgggctcgtcaagcgcgagaatatcccaatccttgagcagaagtcgggccaaatcggcgcggcgacgctggccgccggacaaggagccgaccttggcatccagactcatgccgccgagcaatgcctcgacgatttcacgggaagtgttatcggacgcccattcgtagtcggcgcggccttcgagcgcggcttcgcggatggtggcgttgtcgtcgagcggatcgcgctggtcaagcatgccgaacgtgagtccgccgcgcttcgtcacgcggccggaatccggctcctgggtgccgcggaacaggtgcagcaacgtggatttgccgtcgccgttcttgccgacgatgccgatgcggtcgccctcgaaaacaccctgcgtcacatcagtgaagatggttttggtggcgaaggcgagcgaaacgtgttccagtccaatgtcataagtcggcatgactcaccaatgtagcgccacgcttgcccagcggcggcccacaaacgttatttgttcagcgtctgagcgtaggagttgcagcgggccgcaaaaccggagaacacttgctcggcgagcggatgcagtagctgatcgtattgggcgaactgctcgcgcaattgggacttggacccacccgcggccttgagatccttgaccatgctcggctcatccagccattcgtccagcagcgagccgcacacctcaagatggaactgcatgcccagcgcggatcccagtcggaacgcctgcaccttggtggaagacgaacgtgccagcagctggcctccctcgggcaagcccaccacgtcgttatgccagtgcagcaccgtcagctgcttatcccacatggagaagaagtcatgcttgtccacacgcttgatcggcgcgaacccaatctccggcgcatcgcccttgcgcagctgcgcaccaagcgcagtggcgataatctgatgccccaggcatacaccgagaatcggcttgcctgaagccacggcggcacgtgccaacttggcttccgccttcagccccggatacttgtcgtaatcaagcgcgcccataggcccacccatgattaccacgccagccagttcgccgaaatcaggcaagtccggtttctttttgtcgacgatattcatcgtcaccgtctcaagaccgatgtcttcgaggttcgacaatatgcgtcccgggcgttcccatgggacatgttgcaaaatgagcacttgtggtgtggccatgacttctattgtggcacgagcgttccccgtttgcgtaacgagcagggcaaatccatgaatctcgcagtttccgcagcggtcaaagacgtattctcgcgagactgttgtcctgcttctcatccgtctgtcacctcgttcgggccccgcctgtgaagcgttcatcaagctcttcgagtaacgattcagcatgtctggttcggaccctacgcttgagcgttatgggaaacagccaagaaccgcaggatttcaacatttccgtcatgccttcaagcctgacgccggtgcatgtcgccaaggccgcagaaggcctgaatctgtatgacaccgcctcgcaccaggtcagccatttcgtgccgctcaagccgggcgaggtcggcatttatgtgtgtggcgccaccgtgcagtcgtcaccgcatatcggccatatccgtgccgccgtggcgttcgacatcgtgcgccgctggtttttgaagctcggttacaaagtcacttttgtgcgtaatgtgaccgatatcgacgacaagatcctcgataaggccgcggccgccggccagcgttggtgggcccgcgcctattactacgagcgcgaattcaccgaggcgtacaacacgctcggcgtgctgccgcccaccgtggaacctcgcgccaccggccacatgtcggacatgatcgacctgattcagcgcattctcgacaacggccacggctatgtggtcacggatgcggacggcaagcccaccggcaacgtgtacttcgatgtggcatcctggccgcattacggcgaactcacccaccagaagcagacttccgaagtcgatgaggccgctgccgtggccgaccgcatgggcccgtccgtggacgccaccggtgccgacaagtacaatccggtcgacccggccgacgcctcccccgacaagcacgacccgcgtgatttcgccctgtggaaggcccccaaggacaccgatcccgaggacgcccgttggtcgacgccgttcggcgtgggtcgccctggctggcacatcgaatgctccgccatgtcccaccgttacctgggcgatggcttcgacattcacggcggcggtttggatctgcgcttcccccaccatgagaacgagatggcgcagacttgcgcggccggctacccctctgctgcgcgctggatgcattcggcatgggtgaccgccaagggcgagaagatgtcgaagtcgctgggcaccggcctgtccgtgccgagcgtgctggccgagcattccgcttgggtggtgcgttacgctttgggctccgtgcagtaccggtcgatgctcgaatggtccgatcaggcgctggtcgaggcgcaggccgcatacgaccgcgtctcgaacttcatcgaacgagccggtgtggcactgggcggtcagccttctcgcgaggaggttgctgccgtctccgccgacgatttgcccgccgatttcgtggccgccatgaatgacgacgtcaatgtgtctggtgcaaccgccgcgatcttcaccgccatccgttccggcaatacgttgctttcacagctggctgaccgcgccgattccgaaaccgccaaggccgaggtgcgtgaggcgctgctcgccgtgcgtgccatgctcgacaccttgggtctcgacccgctggccgagccgtgggtgtctgctggcggtgccgctgatggcacggccgagtcgcccgaacatgcggcgctggaggcactgattgccgagcagctcaa

SEQ ID NO: 2194 - DNA, 12359 bp, Unknown
  R51_24m  MAG No. k141_22443
catcgactggtcgcagacctaccacaccatcggccagcacccgcggcgcgtggctcagaaggccttcctgcgcaaccttgcccgcggcgaggcctaccagcaggacgcccccggcctgtgggacgtgaccttccagaccgcagtggctcaggccgagcttgagtcccgcgaatacccgggcttctaccacaaggtggctttccgctttgaggacggcaccccaatctacatcgagaccacccgccccgagctgctggccgcttgcacctcgctgatcgccaacccgaatgacgaacgttacaagcagtacttcggccaggaagtctactccccgctgttcaaggtcaaggtgccgattctggctcacccggccgccgaaatggacaagggtgccggcatcgccatgtgctgtacgttcggtgatgtgaccgacgtcgagtggtggcgcgatctgaagctgcccacccgcccgatcatccagcgcaacggccgtatcgtgatggacaccccggattggatcaccgacccggccggccgtgaggtctttgccgagaccgctggcaagaccacgttctccgcccgtaaggtcatcgtagacaaactgcgtgagtccggcgacctggacggtgagccgacgccaaccaagcgtatgacgaacttctacgagaagggcgacaagccgctcgagatcgtcacctcccgccagtggtacctgaagaacggcggtaccgacgagaaactgaacgccgagctcatcgagcgcggcaaggaactcgagttccaccccgacttcatgcgcgtgcgctacgagaactgggtgcacggcctgaacggcgactggctgatctcccgtcagcgcttcttcggtgtaccgttcccgctgtggtacccagtgaacgcttccggcgagccggattacgatcgcccgatcaccccgagcgaggatcgtctgccgatcgacccgaccatcgatgtgccggagggctacgacgagtcccagcgtgatgtgcccggcggcttcaccgccgaaaaggacatcatggatacctgggccacctcttcggtgaccccgcagatcgtgacccactgggctgagccggacgaggcctccaaggccctgttcgcttccaccttcccgatggaccttcgcccgcagggtcaggacatcatccgcacctggctgttctcgactgtggaccgcgcgcacttggagaacaagtgtctgccgtgggcccatgccacgctgtccggctggattctggaccccgaccacaagaagatgtcgaagtccaagggcaacgtcgtggtgccgaacgagccgatcgagaagttcggcgcggacgccgtgcgttactgggccgccgccgctcgcctgggcctcgatgccacgtacgacatcggccagatgaagattggccgtcgactggccatcaagctgctgaacgccaccaagttcgcgctggccatcggccgtgaggacgagaaccatcacgtgggcgctgccgccgagacctcgtggaacccggccgatgtgaccgaaccgctggatcgcgccgctatggccaagctggctttggtggtgcgtcaggccaccgaggcgctggaatcctacgagcattccaaggcgctggaagtcatcgaatcctacttctggcagttctgcgacgactacatcgagctggtcaagaaccgcgcctatggcactccggacgagcacggcaatgtgccgtccgagaaggctgtgaagtccgcccgcaccgctctgggtctgggcttggacgccttcgcacgtctgctggccccgtacctgccgtacgccaccgaggaagtgtggagctggatgcacgccggttccggttccgtgcatcgcgccgcctggccggtcgtggacccgtatgtcgaggccgccaccggtgcttcccccgagctgctgacttgggccggcaaggccgtggagcagctgcgtaagatcaagtccgaggccaaggtctccatgaagaccccaatcctgtctgtggcactgtccgctgcttcggaaggtgtgaacgcgattcacgccgccttgggcgatatcgcgcaggccggtcgcgtggtcggcaagttcgacttggtggccaagcacgccgaggaatccgccgccgaagacgcgcccgaaaccgaggtcgccgtcgaagccagcgagctcggtgagccgccagccaagaagccaaagcactgagcgttgcgcacaacaacagtaggtctcacggcaatgccgctcgttccgagcctacgggaagcccaccgggcttcccgcttaacggctcggccagccaagaagccaaagcactgagcgttgcgcacaacaacaaaagaggggaacttcctattgaggttcccctcttttgttttttgacgttcggatgacacgactgtgggacggcacgcaaatatcccgcattgtaagctggcggcccacaatagcgtgggccaccacgcgtgtcaaacgttttatatacgcggcgtcccacagaccgaatcaacaaatccttggaatttagccattcttcaaactatagttagctctgacttacaagagggtgtgggacgccgcatcgaaaaagccagtttttgatgcggcgtcccacaccgataacgcactttacgcgtattgggcacctgtcgcatgcggattttcccgcatacaccatcacaccgtcggaatcacgatgaggtatcgggtttcggcggttttttgttgcgtattggggctatcgagctgcgcgacggcctgcgccaagagcgtgccagcatcgctgatctccacggtctcattgatcagcgcgctcatgtcatgcttgagcagcgtgccgccagtgccaaagccgaacagtactggagcggtgtcaagattgttgccggaatcgccagtatcgctcgacttggctgagtcgttcgttcccgaaccatcgctcttggacgaatcgaacttacctccaccaccgatggccgaagtaagaccacccgcatagttcatcacatcgccagcagacatggacatggtgtcatcgaccagtgaggccttggaatgctgcgactgctgctgttgcgcggctttggcctgcttacgggcggcatcggccttacgcttggcttgggaggcccgggtcttgccgtagaacgattgcgattgcgaatcgaccaggccagtcagtgcctgagcctcggtcaccggaccggaagagacatcaccggacgagccatcgccatcgctgccggaagccgaggacgcgactccttcgaactgatcggagaatcgcaatacaatctggcgcaaggccgtggctttgcccgtatgctcggaggcggtggcaagcgtgctcatcgcggcatcgaccttggattgagcgtcggcgagttcatcgctaccgttggtttcggcgatggcttggctctcgtaagcggtggcgcccgaagacgtgccgccggtcagggcgctcaaattggccgtgtagacgtccgtgtatttcatcgaatacggaatcattgcggcggagagctggctctggccatcggcgtattgcttggagcctcgagtggcttcctccgaagcctcggcggtcagatcatccaccagtccggtggtgccttgctgctggatgcggcgaatcacctcatccaacgcatcgaccgcaccggcatgctgatgtgcggcactgacgttgttcaccgcgttggccaagtcgagtacggcttgtgccaaaggcgtatccccggacagttcgccggccgtgcccatcaacgccggcaactgggtggaggtaccaatcgatccagacaggtgcgtggtatatgagcccacatacgcggccatatagtcttcaaacgtccgcttatgggcggtttcgcgttcggccactacggacttgtccagcgcacgctcattatcgcgcagggtttgaagctgctcgatgagctgttgatgctccccggaaccggcgtcggtcagtgaatcgaccagtatggcggcagaggcgacgagttgggcgacatccgtatcggcagcaggctgtgcggcggcattcgcggcatcgggattagcaccaaccaccggactgctggaattggaaggcaatacggcgagcgccacggaactcatggagaagtctttggcgttcatatagcagctgaattccaagccggttgcggcttttccagctgcggcgactacggtattggaaccttgcgtggttaccgtaatggagttgtcagcggaaacatcatcggctacctgcgtaggcacggtaaaggcgacaaccgggatcgtacggttggcctccttggtttgcggcttaatatcgatatacacgccgatcagtccagatgcgccggcaacctcgtttgcctcgacgtttggaccgtcaagcgagtaggtgacgctgactttccatggcagggtggcggcggaagcggggatacgagaaaccttggacgtgccggaattactattggcggaatcggtatcagtggaaccgctattgccggaatcggcactggcaccattgccggcgccgcccttccctaccacataccaacggaccggctccccttcggcatcggcgacggcgtacatatcacttgccgtagcgagcaccggaccgtaatcaaccggagtcggacgagacatccaagcaccgccgagaatcgaagccacgcacaatgcgcaactgaccagtgcggcaccacatctcatctacgtatcccattcatacagtcggccactatgggcattccattcccgtattaatgtagtcgctgccggcaacttgccctatagacgaatatccgaaaggtgcccattcgctgcgggcgaatcaggcgaatacgtcgagtacgcccgggtcaccaccggcatcggcgatgcgctggtggcgcttcttggcttcggtaaccacgaattcacggtacatttcggcaatttccggatcaagcccggcatcgatggcgatgcggtggaggcgttcgatctgatagtcctcacgcttggtgtcttcgggcgcgaatccggcgttggctttgagcacgccgacctgcgaggtggccttgaaccgctcggccagtaatgcgatggccgccgaatcgatgttatcgatggtttggcgcagcgttttgatgcgcgccaccgcttgtgcggtttccgggtgggccgccgcctgggcggagtcgatggtggtcctttgccagccgctgctcgtttcgctcatagattcgaggatactcccgattgcggctttgcacgatgcgcaaagtcagatatctcagatgtcatagtcgccgtaggggatatggctggcatccgcatcgccgaacatggccgcaccattgcccactcccaaaacaatcgaacccattgatacatctttcatctcatatatcgtcagcgtgcatgtgaacgttgacggcaatactacaactgcaatgtgatagttgatgtatttgcatcatatacggcaagggctgcgccccgtatcaatcggggtgcagcccttacactattgttcagcggtctggtcagttgccgttgaccgcgttgccggtgttggcctgctgcacgatggcggcgaggaagtcgcggttggtggcggtcttcttgaggcgcggcaccaacgtctggtaggcctgctcgggctccatgccgcccagcagtcgacgcagacggtagataatcggcagttcctgcgggttggtgatgagctcctcgcggcgggtgccggaagcgttgatgtcgatggccgggaacagtcgcttgtccgccagctcgcgggacaggcgcagttccatgttgccggtgcccttgaactcctcgaaaatcacctcgtccatcttggagccggtttccaccagcgcagaggagatgatggtcagggagccgccgttttcgatgttgcgggccgcgccgaagaacttcttcggcgggtagagggcctgcgcgtccacaccaccggacaggatgcggccggaggcgggggcggcgatgttgtaagcgcgagccagtcgggtcatggaatcgagcagtacgaccacgtcctggccgagctccacaagacgcttggcgcgttcgatggccagttcggcaaccgtggtgtgatcggaggccggacggtcgaaggtggaggagatgacctcgccctggaccgtgcgctccatatcggtgacctcttcggggcgctcgtccacgagcaccaccataaggtggacctcggggttgttggcggcgatggagttggcgatgttctgcagggtgatggtcttaccggccttcggcggggagacaatcagaccacgctggcccttgccgatcggggaaacgatgtccatgatacggccggtgagcttgttcggggcggtttcctgcttcaaacgctcctgcgggtacagcggcgtgagcttggagaactgcggacggttgagcgcttcttcaacgctttggccgttgatggaatcgatggcctgcagtggcacgaacttctggcgttggttgcgacgatcgccttcgcgcggggcgcgaatcgaaccatggacggcatcgcccttgcgcaggccgtacttcttgacctggcccatggaaacgtacacgtcgttcgggccgggcaggtagccggaagtgcgcacaaaagcgtaggagtcgagcacgtcgacgatgccggccaccggcaccagatcctcctgcggctcttcgcggcggctatcacggtcattgcgatcgctacgattatcgcgatcatcatagcgacgatcatcatcggcgttgtcgcgatcacggccacgcatgcggcggttacggcgatcgttgcgatcattacggttatcgcgatcgttgcgatcgctacggtcgcggcggttacgacgcacaaactcgtgatcgtcgttctgctcgccgtcttcggacgtttcctcgtgcttctgcgtgggcagcgtggccaggatatcgtcgaggtcacgcacggtttcttcgctgttttccgcagtgcgacgacggcggcgaggctgctcgtcctcatcatcacggactcggcgaatcagcggaacttccacgtcctcatggcgctcgcggcgacgctcggtaggcgctgcatctcccaaatcgagcgtggccagcagatcgccggcctcatcggccttcttgcgcggcttgcggcgagcgaaatcggactggtcgtcatcgcgacgatggcgggccgcacgcggttcggatgcggcatcatcggcggccttacgacgggtgcgtcgcggttcggtctcgtccttcttggcatcgtcggccacgggaagcggcaaatcgagctgcggttccgtggcggccagagccggagccggcgactgggtggccacgccagcattgtctgtggtattggcctcagcggcatcggactgcggagccttgacgaccttggcggttttggcggccttgggagcgcgcacggtcacaccggccggcggctctccaccattgcgcgccgcctgcagggtggcgagcagctcgggcttgcgcatggtcgacgtgccgcgcaggcccatctgtttagcgagctctttgagctcaggcagcttcatatcctcaagattctggctatttgccactggttgccctttccataccgaacagacccatgcctatccaggcgttaagagtgattattgcggttgcaccgctcatgaatgttcgctgcgtctctgagttttcacgaacttcgtttactgtacaacgccaactcgaccaacgcaaaacggcccgccgaaaaccaaaaaagctccctctgtgacgagggagctcaacaaggtttattcacttttcttcgtggtaggacttttcggtgttgacggaccacacgttcttcttggacgtcttgccggtcttgatgttgccgacggcctccatggcggtggccatggagtggtccatgttgttgtagcggtgctggccgttgcggcccacgcagtagaggttgccgaagccgtcgaggtactcgatgagctcgtccatgtgctcgtaggtgtcgaagtaggcggggtacgccttcttgacgcgctcacgatgggagtcgatgacctcgtccgggccgttgatcacacgcatgcgggtgagctcggagatcgcgaacttggtgacgtcctcctcgctcatgttccagaacgagtcgccctcctcgcagaagtactcgaggccgacccacacggtgtcgtccacgttcttgaccaggtacgggctccagttgttgaagatctgcagacggccgaccttgtagcccgggtcctgcacgtagatccagcagtccggcacgatcggcggattgccgagggtggggatgttggtggtgttcttgagcttcaggtgcttgaccagcaggcccacggtcacgaagtcgcggtacggcaggccgttggccacctcggtcatatcggccggggcgggcttggaatcagcggcctcgggatcgtcgccggccgcgtcgatggcgttgaccaggtccttgaccggcatcgaggagatgaactggtcgccggaaagctcggtgcggttgccctcggaatcctcgtacaccacggaagacacggcgccatcggtctggcggacctcgaccaccctggcgtcggtcagcaccttgacgccggcggcctcgcaattggactcgacggtctcccacagctggccgggaccgtacttcggataccagaactcctcgatcagcgaggtctcgacctccgcgttggagcgcttcctggggctaagcttctggaaggcgttcttgagcacgcccatgatggacaggcccttgacgcgctgggcgccccagtcggcggagatctgggaggggtggcggccccacagcttctccgtgtagccctcgaagaacatcgaatacagcttgcggccgaaacgattgatgtagaagttctccaggttgtcttccggcagcttgtggaacatggacttcaggtagctgaagccggccaccatggtgagcttgaagcccatggccttcaacgtgttggggctcagcgaaatcgggtaatcgaagaagtggcggttccagaagatacgggacacgcggtggcgcttgagcatcaccttgtcctccgtctccggatcggggccgcccggctccatgtcgtggtcgcggccgagcttcttgtcatcataggagggtgcgccctgcaacggcagaacggtcttccaccaatccatgatgcgttcgtctttggagaagaaacggtggccgccgatatccatgcggttgccgttgtgcttcacggtgcgcgagataccgccgaattcgcgggtcccctccagcacggtcacgtcatagttttccgcgccgccatccttgacgagttcccatgcggcggtaagtccagccggaccgccgccgataatcactacggattgcttgtcggtcattatgctccttataaacgcaaaatcagagacagtttactagaagccccggaatcgcacaccgaaagatgagcgaatgcttacagaattctcccgatatacgaccgatgcgccgtcttccatcagcagaaaggcgacgcatccaatcgtgaggtaggggtattcggcaacgctgcgtcacgcacagcgcggcgaatcggtttggtcttgggctaattcgtcagcgacgaaccttccatagattcagcgagattcctgcaagtgcaagcagcatcatcttctatcagccgcaagcaaacaagacacacgatggcaaggttacgagtttgaacttttgctatgcgttgtatgaacaatgcgcgacgccccgccgtaagatgacggaatgccgcgcattgtcaatacaggctgtatcagacgattgcctgtcagtgaatatcgtcgggaatgtcgatatcggttttctggacttcttcgacgttcacgtccttgaaggtcacgatgcgcacggacttgacgaaacggctggaacggtagacatcccatacccatgcgtcagtcagctgcacatcgaaatacacgtcctgaccagcggaacgcacgttgaaatcgaccttattcgccaagtagaagcgacgctcagtctccaccacataggtgaacagcttgatgacgtcacgatattccctatacagcgcgagttcggcgtcggtttcgtaattgtcgagatcctcggcactcatgcttgtttactcactcactttccgtatcgcgtttgcggccgcggcccagcgtacgccaccatgcttcctttgagggcttgcgttccgcctggccgtacggccagttgctttcctcttcgagactgtggcgcgtgttcttctgcgtatcgtcgtggtgcccggcctgtggctcgactggctgtgcggccgccggcgtctgggcctgggactgcacgtcactcgtcgtgacggcggctgcctcaccacgctgtgccggctcgggttccggcttgttctgctggatggcgatggaatgctcacgcgcggacagcgcttccttgacacccgggttgtcctcaatcaagtgcataccaaaagcgtcaagcgaacgaatcggatcgtactcgtcgaccaacgtgtccatgacgataaggtcctggtatttgttgttttcgacatcccacaacgcgtcgcgcgaggtgccggacggcacgaagccgagcgactgatagaccgaaatcgaacggctgttcttttccggcacgctcacccagatacggtgcatgcccaggccggccggttcgggcgcaaagccgtaagtcatcacacgcggcatggcgtcacgggagtagccgcggccacggtactcacggcccaagatgatctggatgcgggcggacttggaccagccgtcgatgtcgatgaggaaaatcatgccgatgacattatcggtgctggccgcatcgagctgaccgtcatcgtcatggtcggcgtcagtcaatacggcccatgcgatggtgcggcgggattccgggtcgcccacgccggattcggcgggtgcctgaccggcttcccaggcttgggagcggcggacccatgtgtgtacgatggcgcgttcggtgaccgcatccttgccggtgatcttggatgcgccatagaaggcatcaagttcatccaaacgagccaggtcctcgacggtggcggggcgcaggtgcaccatttcgccacggattggcggaatgacgatgctctgtggcagatcgcgcttcagttgcgcttcggtagccatgctcagcgtctcgttggttgcggtcatcggtatacatcccccggttcggcttgtttcggctcacggtccagtgccgaacatatcttactcgactgggtgaacgctggaaatgctctgagacgactttcttacagaatcaataaaggctcccgctggcgggagctgtccaacgaatttgaactggaggatttccttacaaataagtgctcccgctggcgggagctgtccgcgaagcggactgagggtggtcatccgtacatggcgaccaccctcagtctcactccgttcgacagctcccgccagcgggagccagtgaatctaatcagcccttgatcttgcccatgacgaccttggtgacggccttggcgtcggcctgaccgcgcgtggccttcatcacggcaccgatgatcacgcccatcggcttcatgttgccgctcttgagcttctcgacgacatccgggttggattcgaacgccgcgtcgacggccgcctcgatggcaccgttgtcttcgacgatcttgtagtcgtgcttcttgacgacttcatccggggtgccttcacccttaagcacgccttcgacggtctgcttggcgagcttgtcgttgagcttgccggaggcgatgagcttctcgacctcggccacatcggccggggtgatcggcagctcttcgagggacatacccttggcgttggcttcgcgggaaagctcgcccagccaccacttgcgggcaccggcggccttggcaccggccttgacggtttcctcaatcaggtcgagggcgtcggcgttgaggatgtcgcgcatctgcagatcactcaggccccactcagacttgaggcggttgcggcgctcacgcggcatttccggcatctgggccttcatctcctcgatgtgctccttggtgatgtggagcatgacgaggtcggggtccgggaagtagcggtagtcgtcggcatcggacttcagacggccgccagcggtggtctgcgtagcctcatcccagtggcgggtctcctgcagaatctccttgccgtcatccagacgagcggcctgacggcggatctcgtactggatggtcttctcgatgccgcggaacgagttcacgttcttggtttcggaacgggtgccgta

SEQ ID NO: 2195 - DNA, 6869 bp, Unknown
  R51_24m  MAG No. k141_22757
ccgccttccttggtgacgagttccagatactgctcggtcagcttcttcagaccgcgctcatccagctcaggatcggcgatgaacatcagttcgtacttgtgcgcagacatcacccacctccttcggactattcggccacggacgttccgtggcaggagtgtgtatgcgtgttagcccatgacgcagcaccaaaccggcaccgcatcttcgggcaacttggacagtctatatataaggcgggacagggtatggccatattcctgccggtttcgcgatgcccaccattttggccaagcccgcgcagccaagcccgcgcagccaagcccgcgcgccatcacccagtattgtccatttcgagcctcgccctatggtcatggcgctgattttgcgggtacgatagtgctcgaagaagcatcagaagaaagggggactatatgttctgtcctaattgtggcgcagctgtgcgcgaaggagcgcaattctgcggttcctgcggcaaccatcttgccgcggcgtcagctccagcagcagcgacgcccaccgcacccacgcccggtcaacccaccggcgccgttcccacgaccgcacagcccgcggctcccacaccatcgattccgttgcccggcgcagcggctgtgcagccgacgcctcagcccgctgcacagccgcaggcccagcccgcaggcggaccggcattcaccgcaccgaccacggccattccgaacccagggcagcccggcccatcgccggctcccgccgctccggcacaacccatctcttccagcccactggtcaaggaactgttcggcgcccccaacatgcagaccatcggcattgcggccggcatcggtacggcagccgccttggtgctttcgattttccctgcaatcgcaatgaattccatgagcaccgcagcacccagcctcggggccgattcaacactgaaccaagccgttggcggcatgttcatcaccggcaacggcatgaacttcttccactacctgttcctatcgttggtcatgggcctgtctggcggtattcatttcgacatcgtcgacctctcatcctccagcatggacgccagcaacatgatgtcgtacccactggggctcaccggcttggcattgctggtcggcaccgcattcggcgcattcatgctggcccgttccaagagcattcgattcaagttcaccggcctggtctccggctttatcaccggattgctgccggccgtggtcatcacgctgcttgcggccatcgcggcggcaccactcgccagtggcaccaccatcgtggccaaggtgaccggcgccacagtgcgtacgttctttatggcctacctgctctccgcgctcggcgctctggccggctatgcactggcccaatatgcttccgattccaagaatgtgttcggagctacttggcagtgggcacaccgcgttcgcggatacacgcgcacggtggtcagcgtcttgagcttccagctggctttgctcttcatcgtcggcctggtggccctgttcgccgtggcattctcctcaggtcagggaatcctgatactgacgttcccggtcacactgctgatgatcggcgagttcttctttacctggggaaccttcggcgccattacactgaccgagtccggtcagctgccgcaggatctcagcctgttcagcatcaacctcagcgttaccgtatggcctatttggatcctgttcgccgtgttcctggtcctcaccttctacacggcattgcgcgtctccgcacgcaacctgtacgaccgtgcctacatgggctggcagcactgctggaaagccccgatcgccatcatggtgttctgggcgattgccacgctgctgatgggtactatgggcaaccgcacctccatcacgcaagttcagaccatcggacctgccatgtggtacttcctggtcatgggcctgtgggcattcctggttgaggtcgttgcgctgacgttcggcccgaccatggtggtttccatgccgggactgcgggcactgcttgtaggcggcactgtgcgtgccacgcctcagccggtggtcgactacatctatgccagcggcgcaatggtcggcaagtggcccacgtggggcacgccgagcgccggtgtgggtacgggcgcaaacgctgcgcagcctcacgtcaacgtcacgccgacgtccgccggccagcctcctgttgctggtgtcggtgtacccgcgcccgctgccccgggtgctccggccgcccctgcaacccccggtgctccgggcaccacattcgcaaccgcggctcccaccactcccggagcggcaccggtagccgcacctggcgcgacctccaccaccatgaatgagcagcagaagaagatcttcatcatcgttggtgccgtggccggcttcctcgtactgttcggtatcgtgtatggcgtgctgtcttccgccgtgttcagcgcgaagagcgtggcgaacagctatgtggccgccatctcctccggcgactacgacaaggccaacaccatcgccgatcctcacgtggatacgaaccagcgcgcactgctgaccagcaaggcatcctcgggcgagaacacgcacatcaccaacgcgcgcatctcgcagacttccaacaatgccgatggcaccgtgagcgcccagctgacgtacacgcttgaaggcaaggaggtcaccggcgattccatcaagatggtggccaacggcagcaagttcctgatcttcaagaactggaccgtcgccgaaccgttggtcaagaccatttcggtatatgcgccaagctcgctgggcagcatcaccgtcaatggcgtgaccgtaacgcccaagaacgccgtgaacaacgacgcggacgaaaccggcaactaccggctcaaggtgtaccccggcgtctacaaagttggcgtggtgaagtccgactattacaccgccaagaccgtgtctctgagcaccaacagctccgatagcggcactcttgacgctcagcctacggacaagttgacgtcggaaatcgacacggcggtgaagagcaagctggatgaatgcgcggcttccaccgatgcggaaccgcagggctgcccgttcggctactacacctccaattccagccgataccgcaacttcaagtggacgattgacggttatccgaaggtcaccagcgtgagcctgtcggatagctcgttcagcaccgacgaaggtgatgtgacggcgaattacgagtaccgttacagcgatggctgggaaccggaagacgattccagcactttctctgtgtacggcaccttcaccatcaaaaacaataaggtcagtgtcgagttctccgaataatttcggcaatctcaacactcttacgaaataggcaccccgccgtggcgttcgctgcggcggggtgcttgtacactggttaaggcgtaaatcacacagcgactcaaacaaaggatgcgaacgcatgtcggcgattcttgaaggcactccggataaacgactcgtattggtcacgggccgcgcctaccccgagctagctgagaaggtggccgaatgtttgggaaccgaaatcctcgaaaccacgtcctatgactttgccaatggcgagatgtacgtgcgtttcaccgaaccggtgcgtggtgcggacgtgttcgtgctgcagtgtcattcgggcgatatcaacaagtggatcatggaacagctcatcatgatcgacgctttgaagcgcgcctccgccaagtcgattaccgtggtggcgcccttcctcggctactcgcgccaggataagaagcaccgcggtcgtgagcccatcaccgcccgtctgattttcgatctgttccacgccgccggtgcagaccgcattatgacggtcgatctgcacgccgctcaggagcagggtttcttcgatggtccggtcgatcatctaaccgccatgccggtgctgctcgattacgtgcgttccgcccttgatctgggcaacaccaccatcgtgtccccggatgccggccgtatcaaggtgtccgaacagtgggccgccaagctaggcaatctgccgctggcattcatccacaaacagcgtgatattactcgtccgaaccatgccgaggcacatggcattatcggcgatgtcgacggccgcgactgcgtggtcatcgacgacatggtcgataccgccggtactatctgcgaagccgtgcgcaccctgaacgaatccggcgccaagtcggtgacgctggtcgccacccatggcctgctctccggcccggccgtggagcgcctgtctcactgcggcgcgcatgaaatcgtgtttatggacaccgtgccgattcccgaagagaagcgcctgccgaatatgaccgtactgtcttgcgcaccgctgctggccgcgggtattcgctccgtgttcgaggaaggttccgtggcgattctgctcgacggcctgcccgaggacatgcgtccgcgcaatatctatgcgtgattggtgcgccgaaaatccttacgaaaaaacgccgcttgactatagctgggtgtacgtaagacagtattgcgccaagatcgacgaagcggcacgaaaccgcatggagctgatcgtgcggtcactggcagagcaaaacggcgtgaccgagcaactgaaagccgaaaaccaaatggaatgggtgcggcagatgaacgcttgcaaggcacaggcagaggagattgtgaaagcggaattgatttatgattgagtgagaaaagtccgggcagaaaactgtccggacttttctcatacagtccaaaatgacggtagaattattcacaattttatggtataatttgaatacgaaaattgagaaacaaatcggaatttataaagaagaatattgatgaaactatttttatgttcacacttttcaagtgtaggaagtctgataaaggaagaaattgaaaataagaaagtcgcatttattccaacagcttcactgcgtgaaggctacaccggttatgtcggctcggctcgaaaattattcaaaaagttgagagcaatcgtaactgaaattgatatttcaacggaggcttattcaacgatacagtctgtttttgaagaagcagatgtgatatattttaccggcggaaattctttctttcttatggaccagctccgtaaaacgggaactgatggactactgaaaaaggaattggcaaatggaaaattgatgatcggtgagtcggcaggcgcaattatatgcgctccaagcatccaatatatcgagcaaatggatgaaaagccagaggactactcacaagaagatgatgcagggcttgatttgattgatttctatgttcttccgcattatcttacagcaccatttaagaaagttactgagaaaataatgactgagttttcggatttgaatctatacccaattaacaaccgtcagggaattgtaattgatggtgaagattcaaaggttatttgcaaagactaatttgaaaattccgatttgtcgagaagttaagcggagcaaatccctttaggaactaaagggcgcacttctatactctcctatcgggaatatgtgcgtcctgggtcgcttcattctccgtcagcaggaggatactgcatgaccgagaatgttgcgtcacgaccttccgtcaaggtggctacacccccttgcgctgctaaagcggctatcccctgtggacttgccgtccgcaaacggttttgacaaaccgtttgccgccagcaagtttgaagattagacataaacaaatcctccgcatggtctaagccatacggaggatcaactgttttacggacacccgtctattgatcaagcggcgttttttcgtatagctccaatcagatgaaggcgcgctcgccgaagatggcggtgccgacgcgcacgatggtggagccttcttcgatggcgtaggtcatgtcgtgggtcatgcccattgacagttcggtgcagtcggccgtgccttcggcaccggaggcaataatctggtcgcgcgtgcggcgcagatgcgcgaagcccgcacgaatcgtgcgctcatcatccacatgggcgccgatagtcatcaatccctgcaagcgcagtccgcccatcgcaccgatgcgctgagccaagtcgatggcgtggctgggtgcgcagccggacttcgattcctcgccggattcgttgacctccagcagcaccccgaccgtaatgccgcgcatggtggcacgacgggcgatcttctcggccaactcaatagaatccaccgattcgatggcgtccactaccggcagcaccttgccgattttattggcttgcaattggccgatgagatggaagggaatgtggtgggcagcatcggccgcggcgcctccctcggtctcaaccacgcccaatgaatacccacgttcggccagcagccgggccagtcccggcgctttgacgataatctcctgcggccggttttcgccgattctatgaacaccagcgtcgattgcagccagaatctcccctacatcacgggttttggtggcggccagcagatgcactgacccggcttcacgcccggcgactgattcggcttcggcgatgcggtcaagtacccgatgtacaccgtcagtgatttcacgcgcgcgcgactgctcgataacctcatttgcgaggtctttatgctccatgtatgccgtcattgctgttctccccggtgaatcgacactccatcatacccatacgggaaggcgtcgcgccgacgcctcatcgcttcttggttttgcggccctttaagtagatgtcgatgacgatccatacgccaagggcgaaggccacgacgtagcccatgaagccgatgaccggaatgccgaagataatcggcttcatgccggcgtagtagacaatcgac

SEQ ID NO: 2196 - DNA, 20505 bp, Unknown
  R51_24m  MAG No. k141_22968
ggtcggcgtgcgccctttttgcgggcttcgtcgccggtgaccgcgccagccgcggcctccagaatcgtgagactcttgcgtgcgtcgccaccggccatgcgcacgatatcggcgatggcttcgtccgtggctttgacctcgtccctgagaccgcggtcatcagtcagcgcgcgctgcaccagttcggtgagctgatcaggctccaatgactcaagcttgacgaccaccgaacgggagagcaacggtttgatgatggaaaagctcgggttctcggtggtggcgccgataaaggtcacgtcgcggttttcgacggcgggaagcagcgcatcctgctgggatttggagaagcgatgcacctcgtcgatgaacagtacggtttcccggccgcgtgacacgagccgttcgtgagcgcgggtgagtacgtcgcgcacgtctttgacgccggaggtcacggcggagagttcctcaaacacgcggccggattggccggccacgatggtggcgagcgtggtcttgccgacgcctggagggccgaacaggattacggagctcggcgcggtgagactgcctttgctggccggattggcgaggcggcgcagcggcgagccctggcccaacacctgcgtttggccaatcacctcgtccaaagtgcgtggacgcatgcgcaccgccaacggccgtgtcatcgactccggcgcatcagccgccccaaacaaatcgttctcactcataacgtcctatagtaccccagtgttcgaacagacgttcgagctgcaccttggcttccctcagagaggggagccaggaatcagttactcaccttgtagtcgtggaagactacttcgccggtgtcttgggtggcgtcaaggtccacgatgccttcgatggcccagtcgtggtcgccatcggaatcatcgataatctgacgcaccttccacgtatgctcgtcgttctcgtgcttgtcatccaacatgaacagttcgggcgagcgtgcttcggcgccgatgcccacgtactcgtgctcgtcgtagtagtcgtcgagcacatcttcccattcgtgcacgccgtagccccagtccttgtcgagcgcgccgagcttgtccggctggtcgaggtccataagccgcacacggcggaacatggcgtttctgatcagcacgataaggcctcgtcggtcctcgaccaccgcgttcttcttgcccggcgccgccaaggaggccgccgcctcggactggtcggcggaatcgccggcgttctcccattcatccaccagcgaggagtcgatggagcgcacgagcacgcgcagccaggagatgatgtcttcgagttgctcgtcacgtttttcgggcggcacggtacgcgccagcgtgcggtaggcgtccgagaggtagcgcaacagggtgccttcggagcgggcgatgttgtatcgggtgatgtatccggtgaagtcggaggcggtttccaccatgtcgcgcaccacggatttcggcgacagccagtagtcgttggcccacggcacatcgtggcggtactgatcgaacgcggcttcgagcatgtcttccagtggcttcggatacgtaatctcctgcagcttatccatacgctcgtcatagtcgagtccgtcggccttcatatcggccatcgccttgtctcgggcctgacgctcctgggcacgcagcacctgcttggggtcttcgagcgtggcctcggccatggagatcacgtccagcgcataggtgtcggactcggggtcgagcagttcgagcgcggccagcaggaacggggagagcggctggtcgagggcgaagtcgtccggcatatcaagggtcatgtagtagtccttgccgccgtccttgcggtcctcggtttcgatgacttcggtatcgaacagggtttggaagatctcgtcggcccgctggtgcagatgctccttctggtcgggggtctgcgcggaatcgtcgatgagatcgtcgatacgggcacgggcgtcaccgccctgcgccacttcattgagcaccatcgaatgcgtgattttcaggtgcgggaccagggtctccggttcagcgtcgatgagcttatcaaacgtgctctggttccaggtcacaaaaccttccggcgccttcttgcgcttgaccttcttgagtttcttcggatctcccccggccttggcgatggctttctggttttcgatttcatattcgggagcctcggcgatcaccagtccctcggtatcgaatcccatacggccagctcgtccggcaatctggtggaattcgcgggcgcgcaggcggcgcatcttggtgccgtcgaacttggtcagggccgtgagcaccacggagtgaatcggcacattgatgccgacgcccaatgtatcggtgccgcaaatcaccggcagcagaccctgctgggcgagctgttcgaccaggcggcggtagcgaggcagcatgccggcatgatggatgccgacaccggtgcgcagcagtcgctgcagaatcttgccgaaggctgtggtgaacttgacgcctttgatggcttctgcgatggcttggcgctgttccttgctggatacaccggtggaggcgagcgcttgcgcggtctccaatgcggcgtcctgcgaaaagtggaccacgtaaatcggggtttcgccgttgcggaaggcgagttccacggttttttccatcgggtcgagcgtgtattcgtagctcaacggcaccggtcgcggcgcgtcggcgattacatccacgtccggggtgtcgttcagatcggagagcttgtcggcgatggcgtccacattgccgagtgtggcgctcatcagcaggaactgggtctgcggcagcgtgagcagtggcacctgccacgcccagccgcgctccggatcaccgtaataatggaattcgtccatcgccacgaggcccacatcggcatgggtgccttcgcgcaaagcctgattggcgaggatttcggcggtgcagcagatgatcggcgcgtccgcgttgatgtggctgtcgccggtgatcatgccgacattgtcgcggccgaacacttcgaccaagtcgaagaatttctccgacaccagcgccttgatcggagcggtgtaataggagcggcggccagtgcatagggcggcgaagtgcatgccgagcgccaccagcgatttgcccgaaccggtcggggtattcaaaatcacatggtcgccggccaagaggtccataatggcctcttcctgatgcggccacggctcgatgcccttgacgtcttccacccagccgaagaaccgttcgtagatgtcgtcggccgtaagattccgttcgcgtccgtcgccgtcccattcgggggccagccgccccagggatccgtattccttctcgtcagtcataatgctcagtctacctagtggcctattccgacggcacgagccgccctccgtcgctatgcgacgcctcccgccagcgggcggagccatgcgaagagctgtgccatgcacttggctccgccaatgggaggatcgctcacgccaaccggcggcgcacctcgtcggggtccacctcgggttcgaggggaggccaggtcatgttcatgttcttcaaggtggtgcgcagcagttcggagaccacggctcgcgaataccagcggttatcggccggaacgaggtaccacggtgcggcggccgtgctggttttctcgaacacttcctgccaagcgaacatgtactcatcccatcggtcgcgggcctcgaggtcggagatatcgaatttccagaacttggtgggatcatccagcctcccaagaaagtgttttttctgttcttcctggcttaccacgaggaagatcttgaggatggcgcatccgctggcggccagttcacgttcgaaatcgttgatctggtcgtagcgggcacgccatacgtcttcgggataggtgccatagacgtgcggcatgaccacatcttcataatgggagcggtcgaatacggcaatccaccccggcttgggcaattcacgcttcacacgccagaggaagtcgtggtcgagctcctcggccgtaggcttgccgaagccatggtaatggatgcccatcgggtcgccttggctgaacacatgacgcacaatgccgcccttgccggaggcatccatgccttgcagcacgatgagcagccgccgtgccgagcctttgacgccattcgcgtacatgagccgctggtatcgggcgatttcggaggagctgatcgaaatgaacttctcggcgtcctctttattgccgtcgaatccgggagtggaatcgccttcgacatcagtgacctgcatgccgtggtggaacataagacgttgagcgggcggcaacgaccatacggcgctgagcagttcactggatttcgccgcacgcgccagtcgttcaggcacgctggcactggagtcgatggtgtctatgcgatccaccgcgagctgtaataccttgtcgatccgtcgatcggttttggattcctttcccttgccgttcttgttgttctttcctgaggattttccggccgtaccccacttgccggcctcttcaggctcgttggttctgtcgtcgtccttggtcatgctcccgattgtacgtcttgtaactcaggagacctagcaacgtagcgacattcacatttcgcctgttactgcaaatctataggcatgcagtcgttcggaccgtaattgttggctttgcaccaattccaagcctcatctgtcgagtcgaagccctcaccggcaagaatcacatagtatttgtcggaattgctgctgtaggcgggccagtcacccgaccagataagcagtacgtttgaattcttgttgtgcatcgtgatgaattgcgcaagaatatcgcggtagttccaggtcttgccttcagcctccatacccttacgcttgctggacagctgtgcggtatacgtggaatagaacagctctgcggagtccttgtcgtgctcgacctgccaatccaatgccttgcttgcattattttcggcttcgtcatccgtaacgttgctgccgcttatcacgcctggatcagacgatccccagcaatatcttctttccggcagacccaccggaacgcggctgcgcagcgccaccgttgcctggcgccgtcgacaatgtcgaagtaggtgcggtcgccgtgttgaaacttggaggcagcggcatcgaacccgctggcacctgctggggagcagccggtaccagcgttgggccatccatcgactgaggacttgggcttggcgcagactgtgccatcggcgcaccgcattccgtgcagaatcggcttccctccggcatctccgttccacatacctggcacttcatactctctccgttctccctcgtccctatcggccaatcccccgtccgtttgcagtacataaagaagcggcaaacggcccgaaacatacctgagctatcaggaagacggcacgatctgctacgagaaagagatcatcaccgaccggcaaatcgtcggcatcatgctgaagcatccgaccagcgcacgcggcttcaagcgctacttgcgcgccgcatcatgacgcttgaccacgatggtgacgccacccgcagcgaacagcgtcgccagaaccacaaccaacgcaaccgaggcaccggtatcggccgtacgttcggtctgctgtggcttggtgctgccattggcattgacgctaccgctatggttgccgttatccttgtcgtccgtcccggtggacactccggtaacggcaacgggcagagcgaccgtggtcttattggtcgcaccggtcactgtcaggcttatatcaccggtcttggttccggcgggaatcgtgaccttgagctcggcggtatcgccattcgcaacctgtgcttcgccgaccatctgctcgccgatggtggcggtcagcttcgtctcgtcaggcacgcccagcgaggtgagcgtgagcttcgagaagtgcagggtgaacgagccaccggccttgaccgcaccggtcgggataccggtgacggccactgcacggcggtcgtagcgcggggcaaccggattgttgtccttgagatagtcgatccaagcatcgcggtccaccagaccggtgtccttggtgttcgtgccttgggcgaaggcgcggaagttatcgccgccctccaacaggaagctgaacgaaccgatacggtagttgcgtttcaggtccagaggctcaccgttgacggtcaccgaggtgatgtgatggccttgcgcggcatccggatcatacgtgtagctcacgttgtgggacagtccgagttgcagatacgcgcgcgatggcgtgctgccgtccgcgttcgtctgccactgctgttccagcgcttccttgaactgcgcgccggtaagcgtggtggtccacaggttgttcaggaacggcagtacagcgttggcctgggcgtaggcgatattgccgtcggcatcgagcgtgcaggcgtcattggtgccggacttgcagaattcggcacgcagaccgccggggttgaccacaccgatttcggccgcgccgcggtcctcgcctttgagcgaatcgagcagcgcatcggccaccagattgcccatggtcgattcggaggcgcggtcgtcacgcttgccgtccttgaatgcggtggtgatatccgcagacaccttgccgaccttctcgctgcccttttcatcggccaccttaagggcctggtacacgatgtccttcaccttggcgacagtcgggttcgcggcggcgagcaggccatcgttgtattcggcgtaatcgttgtagtgcggatcatttttgtcggcgggctgcgaagccacctgcacggccgtgttgccggacttgtcgtaagacaccgcaccggtggccgtattgtaggtgagcaccacttggccgatgttggcggcatagctaccggtctggatgatcggccggttgttgtgcgcgggatcggtgtacgagtacttcatgtgggtgtgtgcagtgaagatcacgttcactgccgcatcggtatcgtccacgatcttcttgaacacggggctggcggccttctgctcgtcaagtgtgggcttggcggtggcgtcatcttcattggaggctgcaccctcatggtattcggccacaatcacgtcagcctcgccattggattcgtcgccgtcggtgagctgcttggccacacggttcacggcctccaccggatcgccgaattcaatgtccttgacaccaccgggagccaccaatgtgccggtttcctgagtgaccgcaccgatgatgccgaccttcacgccgttcacttcctgaatactgtactcgggcagagccggggttgtggtgcccttcttgtacacgttggcaccgaggtaatcccattgggcgttgcgcgcgccctccttgccaatcacacgatcggtaaggtcggcatagccttgatcgaactcgtggttgcccaccgccgaagccttgacgcccaaagcattgagtacatcgatggtcggctggtcctgctgtaccgaagagttgaacagcgaagcaccgatattatcgccggcggacagcagcagtgatgagtcagggtattcgcccttgagctgctcgatggtggcggcgaacggcacggtgaggttcttgtcgatacggccgtggaagtcgttgaagttcagcagattgatggtggtgctggcgggaaccggctgattggttgccatatagcccatacgcaatgaatggccattggtcacgccgtcgtctgcccagaacaccggcttgtacaccttgccatttactaccttggtggcttcggtatcaggggtgatggcaaaaccttcggtgttctgcgtacggatttcatccggagtgtcggtcagcttggtcagctgcagcacaccgttcttgaattcgtaggtgccgattttggcaccggtgttcgcgtcattgtcgctttgggcgagcagctggttgtgctcggcgtcccaagtcagatcgcgcgggccatcatagccggcgttcaccgcggactgcggcaggtcgatgtcggccaccggatgcaccaggtcctcatcattcacggtttgcagtgcgaaggcgtagatatggccggttttctccagtgcggcgaagaacagaccgccgaaatcattgccgaaaccgtccgggtcgtaggtcattacgttcttcgggtcaaggttggactggaatccgttggcggtcaggaccgagtcgggaataaaggctatgccttccaccccaagattggcgtccgctccgtggcccagcgtcacgccgaactgcgtgagtgctgcggtgagattccactcgtgcgtagcggtcagctcttgcgctccgtcgccgttggcgtcggtggttttcgcggtcacgtcatactgcaggatggaaggccgcggcacattcttgttttcgttgtcgcgctcggcgccgatgaatatgcccttggatgaatctccgttgatcagcgtgatgccttcggagtccacaccgcccttgccgtccttgaagtgcagctgcttgccgcccttggtctgaccgttgttggtgaaggtccagccatcagtgggatcctgctgccatgtgccgttctggtagacgaacttgttgatggagccagggcccttatcagcggtgttgccgagcgtggggttcagatcgttgtcggccgcccacagcacgccttgcttgccgtctttaccggcttcatacaccagaccagacagattgccgtcagtgtggtcgccgccttgtcctttggcgccaaattcgccttcggcatccactgtggtcacatcggccaatcccgaccatgcgtccacggtcatggtctcgccggcgggcggagtcggagtcgggtcatcgaacacgttctgtgcaccgggcgtgggcgtatcggaaagcgcgaaagtgccatcgtccttacgggaccacgactgactgtcgctcatcttcttcacgccggttgtatcggtattccatgacgtggaatccaccacatcgctatcggtaaagtcgccgctggtagtggtcagataggcttcgtcggcatcggaacccaggccgggctcggccttgtcggggtcgatgtatgccaccagatatccgccggctttgatgacggtgtccgtatttgttacttcgctggtgccgatggtgtagtgcttcttggctttcttgccgctgtcgtagatgccccagcccttcacgtcaacgtctgtggagccggtgttcttgagctcgacccaatcgcaacgcttgctatccgggtctccggcagctttcgtattgccggcatagacctcgttgatgattacggatggtttggcagccgtgttctgttcggcagtggcctgctgctcgtccgcagccgcagcgggcacgccgatcagggcgatgctgctcagtgtcaccgcagcggtgagcagcgcgatggcgcgccgcgacatcgcggtgaaattgttggtgtggaacattactcccgttccttcctcgggttgtgccgccgcagcatgatgctcttcggcggatgacaccccgagggtatgagagagaaatgaagccgacaccgtatgaaggcaaactcggcagatctccaaactgaactttggctgaattaccgctgaagctggttcttggatttgcgtcgaaccgtccgtattccgccgacaatcgcgattacagcggtaccgatggctacgctgatcaacgccggtcgttgcgcggcatggagggtggcgagatccggcccggccgcaatggcgctgttttcacccgccgagccatcagacgccggatgattacccgcgtcggcgtactgggcattgaccacactcgggccggtaagcgccacctggtcggcggtctcgaccttggccacatcgccgtgcttatccaaggtgacgcgggcgcacagggctttggcccagttgatacgctgccagccgtcgctcgattgccatagggggtatccggaatccaaggcagtggctttcaaaatcgcgttgcgctgatcggcgtgcagttcgggataggccagtcgcagcacgtccgccgccccgcgcggtgccacgaaatcagcgccggactgggcggtgtcttgcgggaaggtgtaggtcaggcgtgcggtgtagacgcgcacggccgaggcctggtccgcgaccggctcggtggccaccgggtccagaaaatcgttggtgtagccgcccgaaccggaggccttggtgttggcgatgcaggcggcgagggtagtgccgtggccgtccgcggcgcagcgggacaccagatagtcccgcagctgccgggacgcgggcacgatggacgaagcgaattcgttatgccagtactgcccgttctgggcggatgcgccaatgcgcccgcccatgatgtcaagcggataatgcacgccgagcacgatgcggttgttgccggcctccgaagtgcgggccatgatttgcggcgcgagttcgggaatcatgccggccagcgcgataccccacgaataggcgccggtagtgtggccggaggggtaggaactgtttttctgcaagttcgagtagccgggcacgtgttcgagccatgagggtgattgcttgatgtcaagcgtggcgggcagtccggcgagatcgttagtgccgccgtagctgctttccgcacggttcagataggggcgcggatgcatggccgcacgttttgaggcgtaggtggaggccacattaaaggagaagatatcggcgacggcgttgagtttcccggatttgagcccttcgctcatatatttgccaagcaccggaccgagcgcgtccggcatggcttcctcggcttgcagatcggagtcgacgagcgcacgcttgcgttgggcgttcaggccatccttatcgagattttcggcggctttgtggttaatggccacggccaaatcttcgtcgagtttcattgtatcggcgtcgagcaccttgccaccgtgctcggcatcggtgggggcctgccaatagttcttttcgtagtcggagagcaatgccacccaatccgggttgggcagctggtcggcctgtgcgattgcgggcgtcgcggctagcgtggccgccaacgccagcggcgcaatggtcgcaatagcaaaaacggaggataggtgccggaacatcttcatatgttccaacctatcctccgtgaaggctacgtagccggagcccagtcaaacactcagtaaattcttcgtgccggcttagcggcgattgagctgaccgtcaggcctctgactcgtcttcggacttgcggaacgccgggaattcgccggtttccgggtcaacctgtgactcgggctgggtggcgtcatatccctgttcgtagcgggtgcgccgccagttgcgaatcgaggcgttggtgccacggtgatgcacatggtatttgcgcggcgcaccaccaaacggcagctcctcgagctccttggccaccgcgatctgattgacattggacgggtctccggcggcgatcggcgccacgggctcggcctcggtgggcgcggccgtgcgctgctgcatgcgcgaaggcagccattcggcgagcctcgacagcagccagcaggcgacgaagtagatcaccgcggccatgaccagcgtctgcaggatgttgaagtacatcgagccgagtcggcgcgattcctgcagcaggtcggtatacatgatgatcgagcctagggcggtgtccttcaacaccacgaccagctgggtgacggcggccggcagcatggcgtagacggcctgcggcacctcgacctccatcagcgactgcgtttcggtcaggcccaaagcgagcgaggcctcacgctggccgcccggcagattgccgacgccggagcgcacgagttcggcgaccaccgaaccgttgtacagcaccaaggccagcaccacggcccaataggacgggctgggcaggcccgcgaacgcgaaccatcgccagaagaagatcatgagcagcagcacgggaaccgcacggcagaactcgacgatcacggcggagacgccacgtaccaacgggttcggcagcagtcggcccacgccgaacaccaagccgaacaccacggcacccaccacggccacgatggtggccttgatggtcatccacagtccgggcaggtagaagtcggtccacgcctctcgttcgacggcgggcttccacagctcccagctgagctggttctcgccgtccggcgggttgtgcaggcgcatgaggataaacacgagcaccaccgcgaacagaatgcccgcgatccagttgacgatgcgaatggtgcgccggcccttgggacctggcgcgtcgaacagcacggaattcgaagtatcggccatatccgtcacctccttacggcgagtttgttggacaggtacgtggtgagcatgccgatggggatgatcaggatcacgtagccgagcgcgaagatcaggaagatttggatgatcacgtcgggacggaattcgatcatctcgctcatcagcgaggatgtttcggtggccacggatgcggcggcggccacggtggagttcttgagcagggcgatcagcgtgttgccgagcggtgccacggagcctcggaaggcctgcggcagaatgatctcggtggcggactgcatgaagcccaagcccagcgctcgtgcggcctcggcctggccaatcggcacggtgttgatgcccgaacgcagagattcgcacacgaacgccgccgtgtacaggctcaggccggtgaccgcgagccagaagaagttcgtggtgaaggtgtcggagaagctgagcttcagctgcgcgtaggcacccagcaccatgaacaccatgatgatggtcagcggcaggttcttgaacagttccacatacgcaccggccacggccctgagcgaggaaatcggcgagatgcgcatcaccacaaggatcacgccgaggatcagggagaacagggcggaccatagggtcagttcgatattgaccagaaacgcgccgagcacgtcatactggctgaagagttccaggaatccgctcatcaggcctcctctccttcgtccggggtgggcgggttgtagcgtacgtcgggcgtgtagttggtgcccttggtgttatcgctgatggcgttctcccacgagccgtcctgaatcatgtccacgatggcgttgttgattttggtggccagctgcgtgtcgcccttcttgatgcccacgccgtagtgttcctgcgtgaacggtttgccgaccaccttgagcttgccgcgcgaggcggaggccaggccggccaggatgatgtcgtcggtggttaccgcgtccacgatgccggagaacagggcagtggcgcattcggcgtaaccgggctgttccataagctggacttcggaggcgaacttctccttgacggtggcggcggaggtcgaaccggtgacggagcataggcgcttgccgttcaggtcttcggggccgttgatggagttgtcgtccttgcgcacgagcagatcctgtccggccacgaagtacgggccggcgaaggagacggccttcttgcgctcgtcggtgatggagtaggtggcgaggatcatgtccacgtcgccgttctgaatcatggcctcacgctgcttggagggagcttccttccagatgatctggtcttcggaatagccgagtttcttggcgatgtacttggccacgtccacgtcgaagcccacgtaggtgccggacttcttgaagcccaggccgggctggtcgaatttgatgccgatgcggatcttgccggtttcgtccgcgccgcaggcggccagcgacattgtgcaggccacggcggcgagcgcggcgatcacgcggcaaaccttccgtttgaacgtattggtgaatgtcattggattgcgtacccgtctttcagtgggtgaggatcttcgagaggaagtccttggcacggtcggtctgcggatgctcgaagaactcgtcgggcgtgttctcttcgagaatctggccgtccgccatgaagacgatgcggtcggcggccttgcgcgcgaagcccatctcgtgggtcacgcagatcatcgtcatgccttcatgcgcgagttcgaccatcacgtcgagcacttcgttgaccatttccgggtcgagtgcggaggtgggctcgtcgaacagcatgaccttggggcgcatggcgagcgcgcgggcgatggccacacgctgctgctggccgccggagagctgggagggcatcttgctggcttgggagtcgacgcccacgcgggcgagcaggtccatggccagttgctcggcttccttcttgtccatgtgacgcaccttgatgagggccaacgtcacgttttcaagaatggttttgttggcgaacaggttgaacgactggaacaccatgccaacttcggccctgaggttcgcgagctccttgccttcctgtggcaggggcttgccgtcgatgcggatgtcgccggaatcgatggtctcgaggcgattgatggtgcggcacatcgtggacttgcctgagccggacgggcccacgaccaccagcacctcacccttggtgacggtcaggttgatgtccttcaggacgtgcaaagcaccgaagtgcttttcgacgtgggtcagttcgactagcggacggttcaggtcctctttgccgggaaccagcggggtcaatttggccttgcttggtgatgttgtgcttgtcgtgcgcgaacgcactgctgtttcattattcgtttcagacatgagtgggaggataacacaccgacgtttccaacgtgttcacagtatgtccacacagttgctcagtcgatgtctcatttccgcatcagacatcgtgaaggcggcattgggcatcggcatacattctcgctgagtcgcgcatcgctcggcgtctgctgtgcgctgattgcctgctgcgtggcggctgagacgttgctgcgacggcaaagcgggcacgtgttgtcctatctgctgattccatgtttggccttggtgtcgttggcgttgctgccgtgtatgccgcagtcgggcgcatggctggcggtcactttgtattgtgtggggctggtctcgccgtttcccatgtcgtattcgtataaatgtgctaggcattttgagcgtggctagctgttcgcacacgatgagtgctgttatacggtggacgacactcccgaagcgcggtggataaccgggcgcggcacacgatatgccggtggataaccggttcgcgccgcttaagttatccccatttttcggttttgcccctgtgccaccgtggaatgcgctacgctcggcgcatgaacggatacaacgaagcgccgcacaatggcgaaatcaacaactatctgcgcaaagatcttgacgccaaagccacggccaagaacacggcctgttggaatctgctgggcaaagtgcgcacgaaacgcacgttgtgtttctcgctgtataccgcattggaattatgcggcgtggagttgccgaggcacagcacgttgccgcagaaggatttttatgtgacggtgaggagcaaggggacccgctcttcattggacaatgtcgactatcgcatatggaatgcaaagttcagcagtatcgctttttcaaacggcgtaacctgcatgcatcccatggatgcgtggatacagtttgcccaatatctcaacctcactgaattagtggtgctggctgaagcgctcatcagacgttatggatatgccattgaacaattcactcaacgactaacggcctttcaccgcgttattggtcgtgcgcgttgtgaggcagcgctgaagctcgtaaaaccatcggattccgttcaggaaactcgtacacgcttggcgcttatgcttttcggcctgcccctaccgcaaacacaatatggcattaccgattcagagaacggatacacctacaccgttgacatggcttatccacaatacaaagtcgctattgaatatgatggcgatcatcaccgtcgcttccgcaaacaatatgtgcgggaccagcaaaaacgtcgacgtctgcggcaattgggctggaccgtcatcgaggtgttcgccgatgacctgtggaataccgccaaacaacgtgccttcgcacaagaggttgccaccgcgatgcaaataccgcttcctggccgtcctcaaccttcatgccgggtattaatagacggcagccttaccatcaatgcacgcaaaggggaatacaggaggcggaaacaagcaaaacacaacaaagcctcacaacattgatcaaatacggagttgcgatcgctcctcatggggcggtaattcccccatggggcggcaattcccccatggggcggcaatttgctcatggggcggtttgaagaaattgtgaaaccgcggaattaagccattttgacctaccgccccatggggttttcaccgccccatgggttgtttaccgccccatgaggaagttaccgccccatggggggataatcggcaaacgccaaggggggacaccgcatggtgcgaggtttgccgcatggcggaggtgccatcgggcggagtatttggcaccccttggcaggtattgggcacattgggccccacccgcaaaaagcaaatggcccttggaattattccaagggccatttgcggctaatagcaccggagcattactcctcgaaaattaatctacgcatgcggagaccgctgttcgaagccaaaggcgcactaaggtgcgtcgagtgctgaggaaaggcggtatacgctccgtagattagttttcgtcggcgtccgggtcgtagtcgacgccggtctcggcgcgctgctcgtcggaaatcggggccggagcaccggtcagcgggtcgcggccgccgccggccttcgggaaggcgatgacgtcgcggatggagtcggcaccggccaggatggacacggtgcggtcccaaccgagggccaaacccgcgtgaggcggagcgccgtacttgaatgcctcaagcaggaagccgaacttctcgtcggcctcttccttggtgatgcccagcacatcgagcacacgggcttggatgtcgtcgcggtggatacgtacggaaccgccgcccatctcctcaccgttgcagacaatgtcgtaggaatcggacatggcgtgctcgggatccttgtcgaacttgtcgatccaatccttggagggcatggtgaacgggtggtgcatggaggtccacttggagtggccgacagccacatcgtcatcatccggatcgtcggtgggcttgaacagcgggaagtccacgacccaagtgaaagcgaacttcttcggatccagcaggccttcgcgggaggcgagctccacacgcacggcacccagcagcagctgggcggactcgcgagaaccggcggcgaagaagacggcgtcgccttcctcggcaccgacggcctcgcgcaggccgttgcgctcctcatcggacaggttcttggcgacggggcccttgagttcgccgttttcgccgaagaccacgtaggcaaggcccttggctccacgctgacgagcccaatcctgccaagcgtcgaactgacgacgcggcgtggcggcaccgcccttgaagaccacggcacccacgtacggggcctggaacacgcggaacggcgtgttcttgaagtactcggtcagttccaccagcgggttgccgaagcgcaggtccggcttgtcggagccgtacttgtccatcgcatccttccaggtgatgcgcggtagcggcagctggacctcatagccggcggacttccagatggcggcgatgaccttctcagtcatggccatcacatcttcctggtccacgtaggccatctccatatcgagctgagtgaactcgggctgacggtcggcgcggaagtcctcgtcacggtagcagcgggcgagctggtagtaacgctcgacaccggagaccatgagcagctgcttgaggagctgcggggactgcggcagggcgtaccaggaaccgggcaccagacgggccggcaccacgaagtcgcgggcgccttccggggtggacttgatgaaggtcggggtctcgacctcggtgaagtccatgtcttccagcgcgtggcgggcggccttagccatgtcggaacgcagcttcagattgtgctgcatggacggacggcgtaggtcgaggtaacggtacttcagacgcacgtcctcgcccggcagcttgttctcggactcattctcgagagcggtggaaacctggaacggcagggcgtcggacttggcgaggatctcaatggtctcggccacaacctcgatcttgccggtggccagatgggtgttctcgttgccatccgggcgcaggcgcacttcgccggtaatctgaatcacgaattcactgcgcagcgggcgggccatatcctcgtcgtaaatgacgacctgcacgaggccggtcgaatcacgaaggtcgatgaaggccacgccaccgtgatcacggcgtcggtcaacccaaccggcgagggtgaccttctggccgaccagggcctcggtcacttcagtggcatgatgtgttctgtaagccgtctggctcattatcttgtttctcctcgatttttcgcgcgaatacgtcagatttcgacggtttgctgggcaaccacagtatccggctcccacgacgtgcaatcggcggcaacctgctcgcccgtgacgatgttcttgacctcgtcgccagcgggctctgcgccttccgcaccttcggcagcggtggccgggaaccacacgtacggaatgccgagtttgtccgcgtacttgatctgcttgccgagcttggccgcggtgggtgccacgtcggtggcgatgccgcgcgcacgcagttggttcgcaatacggttggcggccgggcggtcctcttcattccacacagcgaccagcacggcggccgggctgacgcggttggcgtgcgcgccggcagcgtgcagcatgtagctgaccagtcggctcaggccgatggacaggcccacgcccgggtacttgcggttgccctgggaggcgagattgtcgtaacggccaccggaacagatggaaccgagtgatgcggcaccgtcgaggaaggtctcgtagacggaaccggtgtagtagtcgagaccgcgggcgatcttcaggtcggcgatgacggaaccggggcggatggcggcggcctcgtcgacgatcatggccagggtatcaagtccctgacgagccagcgtgtatgcctcggaatccttggcgatgccgtgagactcgcacagcgcatcgaacttggcggcaagctcagcaccgtcggaggcggtgagctcggccaattcgaggcaggcgcgtgcctgtgcttcggtggcgccgcaggtctcggtgagcagtcgggccacctcatcggcaccgattttgtcgagcttgtcgatctcgcgcagcacgccttcgacgtccgtcaggccaaggccgcggtagaagccttcagacaacttgcggttattggcgtgcacggtggccttggggaggccatacgcgcgcagctcttccagcgcggagaccatgaccagcggcagttccacttcatagtggtcgggcaggtcgccggcaccgatcacgtcgatatcggcctgcacgaactcgcggaagcggccttcctgcggacgctcgccacgccacaccttctgaatctgccaacgcttgaacgggaacgccaacgcacccgagtgctcgaccacataccggctcagcggcacggtcagatcgaaatgcaggcccaaccgctcttcaatcggagtgtcggattcatgaccgacctcctgcaaacggctcagcaggtagatctccttgctggtctcgccctttttcagcaaagaagcgccggtttctaccgctcgcgtctcaatgccgatgaagccgttgagctcaaaaaccttacgaagcgtatcgataacacgctgctccacaacacgttcggaggggagccactccgggaatcctgatattgatgcacctttagccacgaaatcaatataataggtgagggttgcgtcaaaacttcctggttcgcccgggatgggagacgctcccgcttatgcattctacgctttaaggagctggccatggccgacgaaactgtcaccgaacccgtaaacaccgctgcgcccgaagagcaggcaacgacacccgcacccgaagccagcgcggccacgccggcgccgactccgtcccccgcttccatgccgaaaccgcacgcgccctcccccgccgccttcgccaagaagactccgtcggccaagccgcgcgctgccgccccggccgccgccaccgccacctattccgaggctgatgtcaaggccgccgaggccttcggccgcgtggatgacaacggcaccgtcttcgtcaaggatggcgacgccgagcgcgaggtaggccagttcccggatgtctccaaggaagaggcgttggcactgtacgcccgtcgtttcctggatctcaaggccaagctcgatctgctggccacccgtctggcttccccgaacatcaaggcccgtgaaatcgacga

SEQ ID NO: 2197 - DNA, 18833 bp, Unknown
  R51_24m  MAG No. k141_23122
acgcacttctggttcgatgtcatgcggcgcttcggcggggtctgctcaccaagaaggtagggaatgaacggcaccatgccggcgatggtgaacagcgtggtggggttcggggaaatcagggatgccgaaggcatgacgagatgatcatgtttggcaaagtaatcgaggtatcgctttgcgatgtccgcagtgcgcatgagcggatgaactccttgtttgggtaatgggcgcagttgcgcctggtattggtggaaaaagactggattatgaggactagtttgttctagctggttcagtgactagatggcaaggcggcatgcgcgtgtcagttggcgcgctcgatgtactgacggttgagctcagcctcgcgggctcgacgggtggcattgaactcgttgaccaacccttcgagtgttttcatcggcacattgtcctgatcggggccaagcaggaactggcgtgccgcatcaggcgtattggccttgacataggcctgtgccttggtgacggcaacgattccgatggccacgccgacgccgacccagaagatgcgtttgaacatcactcccccttctcggcggtgtcgttgacggtggttttcgcggcgttcttcgcaaggaaggactgacccgtggttttcagcgcgtagaaggtggaagcgatcttgatgatgggcttaccgaggaaagagccatacagatcagtcaacgcaccaacgttgttggcggtggtggaagccgcggcggaaatcttgttcacgtcttcaagcgacttgttgacctgcttgacggtggtcacgccttcgtccagcgcggggatggcgtgttcgccggactcccggaccgtctgcgatatctgatcaaacatcttgcccagcctgatcagcggatagatcatgaaaccggccaatactgcgaacgcgatggccgcgatcaggccagcgatctctccgactcccattgtttcctccttgcggtcacacttactcgcctaagggtagcactccttccctatttcttggcataccattgcacgcgcagggcgaaaaccgtgcgcgtggatgcatgcggctataggcgaaaggtgtcctgctgacgctttcgtttgcggcgtgccgccgtggaccgtacgtgctattcgatatgtattgcttgctatttgctacttgccgtacgaaacgatggtcacggcctcgccgaacggcttgtcggtgtcgaagtcgagcacggttaccgaaccattggccgggcgttcgttcagatcgaggtcagggccgccgaaccggtggccgaggctaagcagtgtgttgccatgcgaaatctgcagcacatcgtcgccatccttgagattcgggttgtcggcgataagacggaacgcgccttcgacgcgcgtccaatattcctcatcggattccgcatcgtggaagggatcggcttccttgagaaaatcacgcgaggcccccaacccgaacttctcgacgatttggttgtaggttttggcgccgtgaggcgctcccgcggcgtaccaggccatggccatgtcaagtccctcgtagtagccgtagaactgctcgcggaagtgcatgtccgtcacgagtgcggggcgcgggttacccgcggcttcgttgatgtcgagaattttctcggccgtctgccgggcacgcgtggtgtccgaacagtaggcggcggtgaacgtcaatcctttcagtcgctcaccggccttgacggcatcagcgacgcccgactcggtcagcggcgaattcgaccatccctgcagacggttgtatcggttgaaataggtctgtccgtgacggaccaaatgcagatgaagaatcatggttccgattatgtcaccattccggcggtttcggtgcgggctgccggaagtcataagtcataacggcataggtcactacctgagatatgcgtaatccgggtagtatacctgacgattcctgagagtacacttagggtactatgagcataacctcgaaacctgcaccatctcaatcgtctgagcctgcccatttcaggggtatcgatggactgcgcgctctggcgattcttggagtcatagcattccacacccgcccgtcgctattgcagggcggattcattggcgtgacgatgtttttcgttatcaccggttttcttgccacacgttcagtactgaacatggtggaccgcaccgggtcctttggatatggccgatatctgatccgccgcattactcgtttatggccggtgatgctggcgaccattgccgtggtgccttggctcacttggatgttcgctcccagcctgttgcagaaagtggtttccgattcgctgccgagcgccttgttcgccagcaattgggtgtacatcttccgcaaggtgccgtatttcgaggcggccggattgccttctcctctgacccatctgtggttcttgggcgtgacgatgcagttctatctgatttggccgttgctgatggtggtgctcggcaaaatcaccaagtccaaatgggtgcgctccatggcgattcttgtcatcatggctgcttccaccgccgccatggtgctgctgtttgacccggccaatacctcccgcgtgtattacggtaccgatactcgtctcgccgagctggccgccggcgcgctgttggctatctggattgcgccttcctcgcgaggtacggaagttgcggaagctggagcggcttcgcaaacagtgcagatcggacgtcaggccggcgacaagacgggcgcccgtctcactatcgtctgcaatgttcttggcaccgcggctttggcggcactgctggccggattctggttcgccaacgggtatctgtcgtacatgtaccaaggcgggtacctgattaccgcgttcatatcgttgtgcgccttggcctgtgccgtgaacaatgactcaatctggtcgcgcgtgctgggttgcgctcccctacgctatatcgggtcgcgatcgttctcgctgtacgtcatgcattatccgctgctgcagttcatgaacccggcgacacgaacgcaggcgttgccgtggtggggttgggttcttgaggccatcgtggtgttggcggcgtcggaagccttctaccagctggtcgaggcggcccgtaaatcggtgcagatgcctcgcagccaacatgccaagccgctgccgaaagccggctaccagctgcgcccgggtgcgtgggtcatgtcggttatcggattggtgaccgttgtggtgctgacgtgggcaccggtggattggaatggcatcgctcaagcgcgagccattcagctgcgccccgaactcgcggcacccgccaagccggtcaagaaaccggcgaagcccgagcccgagtcttctgccacgaatgccgcgaacggcgaaaccaataccgctgacgcgaataagaacggttcggattctcagccgcccaccatcaaaccgattgcggaaaaggtgccaaacaatcttgacatttcgaagtacgcctatgatccggcaacggaaagctgcaacgcggatatgatgatggtcggcgattcagtgacgtcgggtacttcggacgccatccaggccgcattcccgaacgcttttatcgatggcctgccgaaccgtcagatgccgcaggcggtggatgtgtatcagcaggacaccgctgccggccacagtggcagtgtggtggtgtttggcctcggcacgaacggcgtgatttcgaatgagcaggaagtgcaacagctcattgacctgaccggcggcaagccgacatacttcatcaccatccgtatgccatacccgtggcaggagaacaacaacaatacgatgctgcgtgaggccgccaagaagaacaagaacgtgggcatcatcgattggcatgggtatagcgaaggtcatagcgaatacctcaacgatgacggcattcatccgaatatgaccggtgcctatgcgtacgcgacgatgattcgtcaggcggtgtgcggccagtaatcgccctacaacgcaggaaccccgcggcttctcgaaagaagcgcggggttcgagcggtatgtcctggatttgttgaccagagggcccggatcagcgggcgtagaattcgaccacgtactggatgttgacctgcaccgggatctcttcgacctccggcttacgggtcacagtggccttcagggacggcaggttcacgtcgaggtagccggggaccgcaggcagcacgtcacggtgcacgccttcggcggcgatctggaacggaaccatggtctggctcttggccttcacctgaatggtctggccgggcttgacgcggtaggacgggcggtccacgatgttgccgtcaacgaggatgtgacggtgcaccacgaactgacgggcctgggcggtggtgcgggcgaagccggcacgcagcaccaggttgtcgagacgggtctcgaggtcggtcagcatggcgttaccggtctggccggcagtacgggtggccttctcgtaagcggcgcgaagctgcttctcggagatgccgtactgagcgcgcagacgctgcttttcgcgcatacgcaccgcgtaatcggactcggtgcggcggcggtcacggccgtgctcgccaggagcatacggacgcttttcgaagatgcgctgagccttgggggtcagtgcgatgccgagggcgcgagacagacgcacctgacggcgagaacgctgaacgttcgtcattggattaatccttctgtcgttatctgaacggaacgcttgccttgcatatgcctggcaagcgctgagccgggcctccccagcgcttcgtcgtgaacgaacacgaacgggttggttttcttgcgatcacctaccgccgacccgctgatgggctatgactccagacggtatctacctgttggcagacaccaacagatcatattacaccgaggctatggacagcactccggcgtccatgcgatacacccggtctgcgtattcgagtgcatcgggatcatgggtgaccatgagaatcgccgtgccgttgttggcttggtctctgagcagacgcattacgatgtcggtgctctcctggtcgaggtcgccggtcggctcgtcggcgatgagcaggctcggctggttcatcagcgcacgggcgatggagacgcgccgcatttcaccgccggacagctcgcgcgggtagctgtctgccagatcggcgacaccaagctgggtgagcagcatgcgagctcgggtggcgaacaggtccggacggctcgcagccgtgtttgacggcgtgttttcccggtctgtgattggcgcaatgacatccggcatgaacaggtcggcggctgcttcatcattggtggcagcggcttgtgccacggcatcggtcgacgcaacagcgtccacctgagcaacggcatccgttgcttctgcgttttgggcgaacggcagcggctccggaaacatcgttgcgggcagaatcacgttgtcgagcacggtcaggttgccgagcagggtctggctttgggtcacgaatccgatggtgcgattcctcagcacggacagtgctttatcgcccaagtcggccacattgcgtccagccacgctcacggttcccgaggtcgggcgaatcagcccggcgaccatgttgatcagcgtgcttttgccgttgcccgaccggccgacgacagcgatgaattcgccggcatcgacggtgaggttcacgtggctgacggcgtcgaacggcgtgccgcggcggacgaactggcgggtcaggtccgtcaaggtcagcagatggtccggggagggcgtctcggttacgtgcggcgaatccggcgcagtcggcgcgttcggctgagctggcgtggtcggctggagcttggtcggctcaaccgtggtcagctgagtcggcgtagttgtctcagtcatatcactccccctctcgcagggtcaggtaggcttcgggccggccgagacgccacatggtggccagcgaaccgatgatgccgatgaccgtagagcacacaatggtcacggcaatgaatccgatcaccgcaaccgggctggcttgcagatacggcaattgaagttgtttgccgatcagcgaactgaatgggaaaatcaccaggctggccgcgccgacgccgattacgccaccgatcagaccgatgatggcggattccttcagaatgatggcattcaacatgccgcgcgtggcgcccatgatgcgcagggacgcgaattcgcgtttgcgttcgttcaccgacgaggcgaatacggcgagcagcacaatcacgcccattacccagatcaccgccacgaaaatcttgaggtaggtgacaagcgcggtcagcgaagttctggtgttggcggtgatgccgccggggtatacgtaccccaaatcggcgaaccgggagtcaagacgcttgatgttttcagccacggtctgcgcttcgtaaccccgctgcgtcttgatcatcacggtggagacggcttcgcctgcatattcggcgggcatgacctgcttggagaccttggccgaggcggcgaccatatcaggcacggtgttttggttgatgaacaccgaattgtcgaggctggtgccggtgttggcgagctgggcgacgaccggccacttatggccgtagagttcgatggtgccgtcggtggacacgttgacgtttgcgccggcaatcatctgaccgtcttcaagggggccttcgaactgggatgcgacccatggttcgatgacgaagtcagtgtccgggtcgtaaccgatgatctgcagcttttcggcacagcaggcggcggccagcgatgatatataggtctgttcggtggcctgtgcgatgccgtcggcctgcatgacctcgtcggcgatgtctttggtgaaatagaaagtactgggattgccgctggtgagcagcgcttcagccttctgcgcggtgttttgcggcacgaccataaggtcggcgcccaggcgcttctccatactggtcatgccggtgttgaggttcatggtcagcatggtgccgccgaagaacgtcagcgcgaggatggtgacgacggcgagcagtgcgccggtgcggaacggcttgcgtttgaggttttcaatcggaaggccgcgcaatgcgatatgggatggcacgatgagtccttatgttgcttatagtgcggttgcaataagcgagaccggagtccagcgttcggaatggctgggctccggccgtctgctcgatcagttgcgcttggcggcgcgagagtcgagccagatggcgatggccgcgaacacgatggtgagcacgccgagcacgatgagcgtgggcagcataaccatgcggcagtgcatcatcgcgcccttgcagatgccgatcaggaaggtgggtacggcgagtagtagcagggcgttggctgcggcggcgatattgaggccgatgcgaatctgcggggcgacgaacaaagccacgacgccaaacacgaggatgacgacgccgatgccggtggccgcctgctgcgagtagtggcaggcacccggcatgtcatggccggtgcaggcgtgcgcaaaggtctggggcgcgatggtgatcagcgcgccgaacagaatattgggcacggatgcaaacagcttgttcttcataactactttttcctctcccctgttcccagggctcgtaggcacaacctccgcattatgcccagatagtgatgaagaacacaagtcttgttttttgtgaatttatttggtatataactcagcccctcgtcagaggggccaatctatctacaacttctcaataggtgctacgcggagcatgaggcgtttgacgccggcggagccgaagtccacggtgattaccgaattgcggcccttgtcttgcgcgtcggtgaccttgccgagaccgtactggtcgtggctgatcatgtcgcccacggcgaagtcggcgatattcaggccattgtccttggtgagcttcgagctgggcacggcagagccggtcgaaccggatttcggtgtggtgcggcgcgtggtgaccttgccgccacgggtgccgccatatgaaccggatgaagaaccggaacgggaacgcgacccgtaagacgaccccgaacgggagcgagacccgtaggaggacgagccggagcgggaatcatatgatgatgaacgggaaccgtacgaagaacctgaacgggaaccatacgacgaggagccggaacccgagccatacgacgacccataccgcgaccgcgacccataggacgaacccgaaccggacgaaccacgcgagccgaacgtcgacgacccgccaaacgtggcaccgccgaaatcgtcatcatcccagccgcccaaatcgtcggcgaatccatcggtctcccagttggcgcgcatacgctccacgccggcttcacggcgtttccaatcaatcagcgaatccggaatttcgtcgaggaattggctgggcatcatatcggcggcctggccccactgggagcggacggcggcgcgcgtgacatacagtctctgcttggcacgcgtgatgcccacataggcgagtcggcgttcctcctgcagttcagtggtgtcttccatcgaacgcgaatgcgggaaggtgccctgttccatgccggtcaggaacaccaccgggtattcgaggcccttggcggtgtgcaaggtcatgagcgtcaccttgccggagtcctccgcctcaccgggcagctggtcggagtcggccacgagcgcagtggtctccaggaatgcggacaacgtggcgtcaggcgtgttctgttcgaattcggctgcggtggactgcagctgggagaggttctccagacgggaggcgtcctgcggatccacggatttctcaagttcggcccttaagcccgacttctccaatacttcggccacgatctcgctgggcttggagtcgtgcgcgtgcgtgaactgcgagagcgcgcccatcagatcgcggaatgctcgtagcgaggtggcggtgcgggtcggcacctcgatctcatccaagtgcatgagtgcgtagaagaagctggtgccatgctcgcgcgcgtaggcgagcagcacgccttcggcgcggtcgccaagcccgcgcttgggcacgttgagaatacgacgtagattcacatcgtcgtccggattgacgagcgcctgcaaataggccagcgcatccttgatttcgcgacgttcgtagaacttggtgccgccgacgagctgatacggctgattcgtgttgatcagcgcctcttcgagcgagcgggattgggcgttggcgcggtacatgatcgccatgtcggagtaggagatgccctcttcggcgtgcaggcgcgcgatttcggtggccacccactgggcctcctgctgggcgttgtccgccgcgtagccgacgatcggctcgcccttgccgagcgcggtccacagtttcttgggcttgcggccctcgttgttgctgatcaccgcgttggccgcgtccagaatggtctgcgtcgaacgatagttctgttcgagcatgatggtcttggcgttcgggaagtcctgctcgaagtcctggatgttgcggatgtcggcgccacggaacgcgtagatggactggtcggaatcgcccaccacggtgatccaggcggggccggacttgccggcgttcggcgcgcccgggatggccttctcccccgtgtccacgccggccagctcgcgcacaagcacgtactgggcgtggttggtgtcctgatactcgtcgacgagaatgtaacggaagcggtgatggtagtactcggcgacggccgggtcggtgcgcagcaactcgaccgtgcggccgatcagatcgtcgaagtcgacggcgttggccagggccaagcgatgctcgtattcggcgtagatcaccgcatagatggcttcaaggtcgcccaccgtgccgaactggtagccgcgctggccaggcgtgaagtcgggcgcgtgaacggcgaggttttccttccaaccggtcagattgttcttgaggtcggagatatggccgaggatcgagcgtggagtgtagcgcttgatgtcgaggttgaattcggtggcgatgattttgacgagtcgctcggagtcggcggaatcataaatggagaagccggacttgagcccgatggacttgccgtcgcgcctcagaatgcgcacgcaggcggaatggaaggtggagacccacatgcgctgggccaccgggccgatcagcgagccgagtcgttcgcgcatttcggcggcggccttgttggtgaaggtgatggccagaatctggctcggccatgcgccgaactggctcaagatccaggcgatgcggcgggtcagcacacgggttttgccggagccggcaccggcgccgatcagtagcgcctgaccgcggtattgcacggcttccgcctgctgcgggttcagatcgcctacgagttcctgcgcgctgcgtgcgatgacttccggctcgtcgtacactgttgcctccctttgaatcgcgacattcatgtttaccacatgcacgggtcagcgcaggacaacgtacacttacaagtatccatatcattcactgacatacagcaatgggaggtctaatgcaggaacttgaggagcgaatccagagcgagggaacggtgaaggcgggtgatgtgctcaaggtggacgcgtttctgaaccaccagtgcgacgtgcgtctgttcgaccgcatgggttcggcatgggccgctcatttcgccggcaagcacatcaccaagattctgaccatcgaggcgtccggcatcggcattgcgtgtgtggcggcccagcatttcggcaatgtgccggtggtgttcgccaagaaggcgcagtccatcaaccttgacggcgaccagtacaccaccacggtctattccttcaccaagcagaaggagttcccggtgatcgtggccaagaagtatctgaacgccggcgaccatgtgctgcttattgacgattttctggccaacggcaaggcgttgcgcggtctgattgacctgtgcgaggcggccggtgtcacggtcgagggcattggcatcgccgtggagaagggcttccagggcggcggtgacgcgctgcgtgccgaaggctacgatgtggattcgctggccatcgtcgagtccatgaatcccgagaccggcgaaatcacatttaggcactgagcacattgactgctcccgccagcgggagcaacagagagaagaaaagaatcatgtcagagaagaaaaccaagaattccgtatcctttgaggcgctgtcttcgctgaacgcgccagtatccttctggaagggcattccgttcggcctgcagcatgtgatggccatgttcgtggcgaacctcgccccgatcttcatcgtcgcctcggccgcgaaaatgaccccggcccaatcggccaccatcatccaggccggccttctggtggcgggcctgggcacctgcctgcaactgtacggcgcgtggctcatcggctcgcgtctgccgatggtcaccggcatctccttcacctacgtggcggccgccgtggcgatctgcgcagacaagggctatggcgcagtggccggcgcggtaatggtcggtggcctgctggaactcgtgctgggtttgacggccaagtattggcgtcggttcgtgccgcccatcgtctccgccatcgtggtcacgtcgatcggcttctcgctgcttaacgtgggtgccacgagcttcggcggcggcagcggagccaaggacttcggaagctggcagaacctgacgctcgggcttatatctttggtcgcctgcctggcgttccagctgttgatgaagggcacggccaagcagctgtccgtgctgttcggcctggtggtcggctatgtggcggccatctgcatgggcaaggtcgatttctccggtttccagaacctcgctattgtgtccgtgccgcagttcatgccgttcaagcctgagttcgactggggttcgatcatctccatcggcctgctctacgtcgtctcctcggtcgaggtgctgggtgacaccgccgcgctgaccaaggtgggcctgaaccgtacgcccaccgaacgcgagaccgcgggcgccatcgccggcgacggcctgatctccaccgtatccggcctgttcggatgcctgccgctgacctcgttcgcacagaacatcggattggtggccatgaccaaggtcgtcaaccgcaaggtgattctctccggcggactgattctggtgctggcgagcttcgtgccggccatcgccgaggtgttcaactcgctgccgcaggcggtgctcggcggctgcacgatcatgatgttcggcaacatcattctttcgggcttccagatgatcgccgaagcgggcttcacgcagcgcaacatcacgattgcggcgctttcgctgaccatcggcatcggcttcacccaggtgagcgacatcttcgcgcagttcccggcactgttccaacaaatcttcgcctcgaactgcatcgccgtgtcgttcgtggtggccgtaatcctgaacgccgtgctgcccagcgaggagcacttcctctccgcgcccaaggaggcaccggccgcggacgccgagtgataacaacgcgacatatcagctgcgcataatcacatgctgatgccctatcgtcttgcaggatgatagggcatcattgattttgggagagactacaagttgaaccatgagttcgagccggtggcgtgtcgatcaatcgacatcttcccattcgaggatgtctccgggttggcagtcgagtgccttgcagatggcgtccaatgtggtgaagcggacggctttggcacgtccgttcttcagaatggacacgttggcgggcgtgatgccaatttgttcggcgagctcgccgacgccaatcttgcgtttggccatcatgacgtcgagattgatgcgaatcgtcatctcaaatcacctgctcgagttcgcgcccgatccggacaaggagaacagtttccatacggccacgaacgccgcttcgatgcagagcaggaacagcacgcccataatgagatatgaccagtgcatcgacgtctggctcgggcagaggccggccagcgcgccgctcaatcccggtacggcgaatagttggccccataggcaggccagccagaccagaatcacgatggctttcaacgcgagcaacacccatcggttcatgtagtttttcatagcccggtcctttcaggtgccgacgtttttggcgacaccgcgaacatcgatatgactatatcgaaaaacgatataccttgcaaggcgtattgcgtcaaccggcattggtcgctcatatgcatataggcttcggcagactgtcagcagaccgtcagctcaacggaacgaacgccatatgagccacccattcgcgcacgagcgtgatgacggcttcgggttggtcgatgtgcgcgttgtgaccggcattatccagagtcacgaaggtggcgttgggatagtgcggcaacagggcttgctggtcttcgtatccgacgatctggtcttgcttgccggtgacgatgagcaccggacccgcatatgtgccgagcatttcctcgggattatcggccagccaataacgctgatccagtcgttcgcatgccgcacggtcgcacaacgccacgccgggcaggatgaaccgttggtagcgccgccacgcgtcgaatgactggttgacgcccatggtaatgaaatcgaacacctgttcctgtggcaaggagtgcgtcagcttgggattgggctgtgcaaccacatgttcggccacatgccggccggcatgctgcgggtccacgaccggcgcgatcaatgccataccggccactcggcgaggttcgcgcgccaatacttcgcggacaagcgcaccgcccatcgagttgccgaccatggcgaatggagccgctttaccgacaaggccgtcaatggccgtttgcagccaatccgccatttccggcagcccgcaggcatgctcgggcaatgccggcgtacggccgaaaccgggcagatccagatatatacggcgaattgaatcattgccgtcaaacgccttgtcgagcatcatcagcgaacgatggtccacacccatgccatgcacgaacacgacgggcaatccatcatcattgccctcaatcgcgcagtacggctgcaattgtgccatgtgttcctctccttcaacccggtacaaatcgcctttcacacaatagcggcagcagctcccctggtgtcggagcaatcccgaccgccattctcggtttcgaggggctgatttcgtggtttggggacatccacttccgtttcaaggggctggtcattggccaaaacccaagtacgaatggcttcatgccaacgtcatttcgccgttttggagctgtcgctactcggccatcagcccctcgaaacggaagtggatgtctcggaacgagcaaatcagccccttgaaacgcaaatagacgattgcgaatcgacttatcagccgcgtcgaacttgcaatagagatgtcggtgtatcattccccggtctgattgcgcggatgtcaggaagcgtgaagaattgtcacaaagtcgcgtgatggcgcagccgccgttcaggtggatatgccacgctgtcatgatgacggccgagccggaacacggcaaatctcgcatgctgcataggccagccggtcacggtcagccatgacaccgaaatattggaggcgcaatgggacaacaggtgcggtgcggcagacgccgctcccatggcgcgggcgcgctgattgcagccgtcatacttgttgttgcggcgctgatcgcggcatggacgctgctgccacggctattcacgcctcacgagaccgcgcgcacggccgaggaagcatattgcgcggcggtgtcgtccgacggagcccgccgcaccttgacgcctgatcaggcgcagaacgcggcgctgattgcgaacatcgccgtcacgcgcggactgccggatcacgcggcgacggtggccatcgccacggccatgcaggagtcgaggctgacgaatctggactacggcgacttggattcgctcggcctgttccaacagcggcccagccaaggctggggcacggcggagcaggtgtccgacatgacctatgcgacaaacatcttctacgaccatctgctgcaggtgccggattgggagacgattccggtggaggacgccgcgcaggaggtgcagcgctcaggctacccggaactatatgccacatgggatgcgatggcacgcgcttgggcctcggggctgaccggcgaacggtcggcgggcgtcacgtgcgcgttggagccagcaacctcctcggacgcggacgggttggttgccgccataagcgctacactgccgaatgtcaaggtctcggttatgcccctaaatggcaaaaccggcacgaacaacggcgctgcgaccaatacggccagcacaacgttgacgatcacgctgccggacggcctgtccgccgacaaccgcactcgactttgctggcagacggcaggctggctggtcacgcatgcacgtcaatacggcattgacgcactgcacgcggacggcatgaattggaaccgcaaagccggtacatggaccgacaccgaaaccgccgagcagaccgtcaccgtcacgcttgcgtgatgtgacctataacgccgtcgcgaccacaaatccgactgactggagcctacgccgtcgatgccgcctgaggcacgatacggatatgatttttactcgttcgaatgagcccaatccacgacggcttcgatgttattgccatccgggtccagcacgaatgcggagtaatagccgggatggtacgggcgcggaccgggagcgccgttgtctcggccgccggcggcgagcgcggctgcatggaacgcttgcacggcttgctggctgtcagccaggaacgcgatgtgtgtgaccggcgtgaccggcgaagcctccgcctccggcccgtcaatcggcgacacgtagaaatcggagtgcagggttccgtcatccacgccgaatccgagcgtgggctcatgatgcgccttgacgatatagccgagcggtgcgagtgcctgtttgtagaatgtgatgctacggtcgatgtctttcacgtgcaacgtcagatggtccagcatggtcttggtcaccctcccctggttcttgtattcgattgctgcttgcagtgtaagcccgaacgtttcccacagggccgcgcatggctatgatgagagcaatcgcacgtcgagttcgagacaatattcaaaacgaatccaaggcaatagggggaatgatgatgaccaaggcactgattgtggtggatatgcagccgacgttctgtgaaggcggcgaactgggagtcgaaggcggcaacgcggtcgccgagcggatcgccgattatgtgaacgcgcatcgcagcgagtacgcgtatatcgcaaccacgcaggactggcatatcgagccgggcgcgcactggtcggcggaaccggatttcgtggacacgtggccgaagcatggtgcggccggcacgccgaacgccgaattgcatccggcgatcaaggcgctgattatccatcatcatttcaagaagggccagtattcggcggcatattccggttttgagggcatcgaggacaataccgaccgtatccagacccgtgaggaggttgcggccgagcaatccgccggcaagacgctggccaatgcgctgaaggccgccggcgtgagtcgcgtggatgtggtgggcatcgccgaatcgcattgcgtcaaggacaccgcgctcgatgccaggaagttcggtttcgaggtcaccgtgttcgaggacctgaccgtaccggtcagcgaggagctcggtgtcgcggcccgcaaacagatgacggcggccggcatcacattggccgagtcccgctgatcaggccggatatacccagagcgaacgcacgaacacttccgtatattcaaggccgacactgccgcatagtcgcctagtcgatatgtgaagaaggcttttatggttacgatgctgctgacttcgatattccgcaacgcctcgtccgccgtgcatgaagtcgaaccgcatccgcaaggcaagcgggtcgcgttcatcccgacggcgagcgccgtggaaccgtgggggccggttcactcggcgttgagcaaacacgcgctgcaacgcctcggtttcgaggtggagcaactggatgtggaagatgtgccgagcgggtccgccgaacgcgtcacgcgtagcatcgccgaggccgactgcatctatgtgggcggcggcaacacgttctttctcctgcaggagttgcgccgcaccggtgccgaccgggccatcatcgagcaggtgcgcgccggcacgccgtacatcggcgagtccgcgggctcggtcatcacggcacctgacatcggctatatcaagctcatggaccgcacggacaaagcccccgatctcaccgattacgcaggattgggcttggctgatttccgcgtggtcccccaccatcatgcaacggccatgggccacgccgcacaacgcattctcgaccggtatggtgccgatctcagtctcaagcccctcaccaaccggcaggccctgcttgtcaaggatggcaaaacccggctgctgcgatgatgcgggtcgtcggcccgtcgcccattcggcatcaccgtggtgtgtccggcctgacatgcctatcgagcggcatcaatcacacagcaatgtggctgggaacctcgccgaacgtcaacacctgcatacatcagcacggcaaaatctgccgaaatcgcccggcgcacgagatgccagccggccccatccgtcacctcagtgccgtaccgggccaggcatggccttgagcaacgggatgaatccagcgcacagtaccagggccacgacggcgagtatctgccagtgggcggagccgagccagccgccccacgtgccgacggcaccgccgatcgcatacgcgaacctggcacggccgctgaatttggccaggtcaccaccgctcagcagcagttgtcgcgatacgatcacgccatgcgccagcaggccatagccgaggttgttgatgagccatccgacgcacaccgcggcaaactcgggaaccagtacggcggcaagggaaatcgccgtggcgattgccccgatggcggacacggcgcacatgccgagttttgcggagagccgcatgtagacaaacgatccgacgatgctgcccacgccgccgaatgcgtagaccacggtcagcatatcgctgccgtaccgggagccgatgcccagcaacgcatagcttgcccacagcgacggaatcagcgcaagcagcagcgatgcgatcagcagtctgacccgggtcaagcgggtgaccggagtgcgctgcggcgcgtgtgacgtgtcggccgccgtggattcgtcggcggagccgtcgccgtcatcgccgcccgcaccatcgttgccgaatcccggcatgaactcgcgggtgcggaatcgcgtcagcgcgcaggcaaatgacagtgccgacgaggtgagcagcatggccatgatggaggcgttggccaaggccgatccggcaacctggcccaacaacgtaccggccacgctggcaatcacggcgacgtagccgctgtacttgacgagcatgtcatcgtcgtcgccggccgcatccacctcgaacacttcggaggccacgtcgatgacctgcccggtcatcagcagcaggcatgacagggtcagcagcagccacttccaatacgtccaaccgttgggcaccagcgcgaccgccaggcacagtacgccttccacgccctccgtggtcgcaagcgaacggaacgagccgaaccgctgcacgatccatgcggatatcggagaagc

SEQ ID NO: 2198 - DNA, 12992 bp, Unknown
  R51_24m  MAG No. k141_23582
tccgcgatggataaccgaccgctcaaatggccggagttcctgcagcgcgtcggccagaccgtgtatctgtccgccacgcccggcgactacgagttgggcttgtccgacggggtggtcgaacagatcatccgtccgaccggcctgctggacccgaagatcgacgtgcgcccggtcaaggggcagatcgacgatctgctcgccgagatcaaggcccgtgtggccaggaacgagcgtgcgctggtgaccaccctgaccaagaagatggccgaggatttgaccgactatctgctggaacgcggcatcaaggtcgaatacctgcattccgatgtggatacgttgcgccgcgtcgaactgctgcgcatgttgcgcgaaggcaagatcgatgtgattgtcggcatcaacctgctgcgtgagggcctcgatttgccggaagtatcgctggtggcgatcctcgacgccgacaaggaaggattcctgcgctcctatcgttcgctcatccagaccatcggccgtgcggcccgaaacgtgtccggcacggtgatcatgtacgccgacgaaaccaccgaagccatgcggcaagccatcgacgagaccgaccgccgccgcgccaagcagatcgcctacaaccgggaacacggcatcgatcccaagcccctgatcaagaagatcagcgacgtcaacgacatgctcgccaaggaggatgtggacacccagaccttgcttgagggcggctaccgcaacgcgggcaaggccggcaacacacacctgggcgtgccggtactcgatcccaacgaggcagacaaacgccacgaggagatcctgaaggccggcctgcccgcgcaggacctcgccgacctgattcgccagctgagcgaacagatgcacaccgccgccgaacaactccagttcgagcttgcggcccgtctgcgcgacgagatccgtgatctcaagaaggagctccggcagatgaccgaggcggggcaatgacccgtcacatacatgggttagtgtagggaatcatggcagaaaccccactcgcatttgaaatcatcaccttcgtggtgctcgcgctgttcttcatcgtcgacctgttcgtcatcgggcgccgaccgcatgtgccctccaccaaggaatgcgtgcagcatatcgccttcttcgtggtcatggcgctgatcttcggcggatgcatctggttcttcgccggctccaagcccgccatcgagttctattccggctggctcaccgaatactcgttgtccatcgacaatctgttcgtgttcgtcattatcatgtcgaacttcgcggtgcccaagcagattcagaagtacgtgctttcggtgggcatcaccattgctttgatcttccgtggcattttcattctgatcggcgcggccctgatcacccgcttcacatgggtgttcttcctgttcggcgccttcctgatctacaccgccgtcaaactggtgctcggcggcgatgaggacgaggaatatcacgaaaacggcatcatccgtaatctgcgcaagatcatcaagatcaccgacgactacgacggcgagaagctgcgcaccaccaagaacggcgtgcgttactggaccccgatgctcatcgtgttcctgaccatcggcaccaccgacgtcatgttcgctttcgactcgattcccgcaatcttcggcctgaccaaggatccgttcctggtgttcacctccaacgtgttcgccctgctcggcctgcagcagctgtacttcctgctgggtgctctgctcgacaagctcgtctacctgcctgccggcctgtccgtggtgctgggcttcatcggcgtcaagctcatcatggaggccctgcacggcaataccttgccgttcatcaacggcggcgaaggcatccattgggtgccggaagtgcccacatggctgtcgctggctgtgattgtggtcgcaattggcggcgcatccgtggcttccgtgatcaagatgaagagcatggaaagcgccgagaaggcctgaaaccgttagagaatacaacccttaaacctagtcaacacaacaatgtgagcgctcacaacacaccgtgaagaaaacttgtcatgagtcggctcgcgctagtagactgggtttcggcaaatggggcaatcgtgcctcgaaccaaattgaacaagaataggcaggcattcatgcgtaaagccaagatcgtagacaccatcggtccttccaccgaggattacgacaacctcctgaagctcgttgaagccggtatggacgttgctcgtctgaaccgctcccacggcacccccgaggatcacctcaaggtctacaacaacgtgcgcaaggccagcgaagccactggtcgcaacgttgccgcgcttgttgatttgcagggcccgaagattcgctgcggttggttcaagaagaacgccgatggcgaagacaaggttcagctgcagctcggccaggaattcgtcatcaccactgatgacgtcgagggcgacgagcacatcacctccaccaccttcaagggcctgccgggcgattgccacccgggcgacccgatcctgatcgatgacggcaaggtccgtcttgaggtcaccaaggtcgagggcaacaacgtgtacaccaaggtcgtcgtggccggtcctgtgtcctcccacaagggcatcaacctgccgggcgtcgccgtctccctgccggccctgaccgagaaggatgaggctgacctgcgttgggccatccgcaccggtgccgacatcatcgccatgtccttcgtgcgtttcgccaccgacatcgaccgcgcccacgagatcatggacgaggaaggccgtcgcatcccgatcgttgccaagatcgagaagccgcaggctctggagaacctcgaagagatcgtcaagaccttcgacggtgtcatggccgcccgtggcgacatggccgttgagtgcccgctggaagaggtcccgctggccaccaagcgcatcatcgagctggcccgccagtatgccaagccggtcatcgtggccaccgaagtcctcggctccatggtgaactccccggtcccgacccgtgcagaggcctccgactgcgccaacgccgtcctcgacggctccgacgccaccatgacctccaacgagaccgccgtcggcaagtacccggatgtgaccgtggccaccatgtcgcgcatctccggctacgccaccgaccacggcttcgaccgcatcccggagctcaagaacctcgacatgtcctccaccggcgccgtctcctccgccgccgtggacttggccgacaagctcaacgccaaggccatcgttgcttacacccagaccggcgccaccgtgcaccgcgtctcccgtgagcgtccggccgccccgatctacggcctgaccagcaacgagcacacctaccactggctggctctgtcctggggcaccgaagccttcctgctcaaggaggactaccacgacaagtcccgtaaggatctcatgatctacacggacaagatcctcaaggacgccggcaaggttgctgacggcgacaagatcgtcatcctgagctctgctcagggcgatcaccagccgggccgcaccgactccatctacgtgcacaccgttggcgcttgcgactgatttcaggccgctggtagctgctgacagctagcacatagcacgcgaaagcccccccatccagaaagtggatggggggctttcgttatccgttatgttgcgattgtgcggtgattgcaatggcacgtagtcaccgcgatgatcgagcgtggtgactagtcgttgagatgatcgagcgtgccgctcttcagacgcagaatggcgaccatggtcttggcatccacaatcgtgccattgaccaccatctcataggcatcgtccaccgacaccatacgcacgtcggaacgcggagtctccgggccgatttcctgacgggaagccggggtaagtccggtggcgaagaagattgcggtgtgctgggtggaatagctcggcgtgttcataaaacgggtgaactgcgtaagcttggaggcatcgaaaccagcctcttcggccagcttgcgcttagccacatcggtcgggcgttcggacgggttgttggcgtggcctgccggaatctccaacgtccaacgatggttggcgatgcgatactgctcgaccagcggaatcatgccgtcatcggtgacggccagcacagccacagtgtcgccattgttctcctgaacaaagtagcgttcaaacgaaccgatctgattcgactcataggagacgtgatcgacattgaaataatgcgtctccacaatctgtctacgggaaatctccttgaccggagaggggcgccagggatcgaactgacggtaagtttcgttgctcataagccctcctaacaaaagcgatacatcgaaactacagcccattgtaagcggtgaaaccacgcagaagaacgggcaacacacgggtacgccgtccacgatatcgacgtgtttcgcctgttttaccggggggaaatggaggactggcgcgtgtcttgtgtcgcaggagtcgaatcggtatgctactctcttcagagtgcttaggcacgccctcgtatcccaattggtagaggaagcagcctcaaaatctgcgcagtgtgggttcgagtcccaccgagggcactttagctaggagttcgctgaaattattacgaaccccattgttgggtaattcaagaaagaggttggcatggctgcaaggaagaagtccgaagaaccgagtatcaacgtcgatgaggtgctgaccgacgaagaactcaaggccgtagccgatgaaagcgaacctgctgagcgcaaggccgtggccgaggatggtccgcgtaccgtcgtcgtggccgaggatgaagccgtgaaccgcatggatctggtcgccatgctggaagacaacggttatgaggtcgttggtcaggccgccaacggcgaggaagccgtggaactgacccgcaagtatcgccctgatgtggtgtgcatggatgtcaagatgccgcgtatggacggcatcgccgctgccggcattatctgcgatgagaacatcgcccctgtcgtcatgctcaccgcattctcccagaccgatctggtgaagaaggccaccggtgccggcgccatggcatacgtcaccaagccgtacgaggaatccaagttgctgccgaccctcgaggtggccatgggccgtttcgccgagatcaacgatctgctggacaacgtggagcgcagcgaacgcaagctcaaggaaaccaccgaccagctcaaggaaaccgaagagaagctcaagaaggccgaagacacgcttgaggagcgcaagctcgtcgaccgcgccaagggtctgctgatggacaaggctgacttctccgagcagggtgccttccgttggattcagaagacctccatggaccagcgcatccccaagaagcgcctggctcaggccatcatcgccaagtacggcgatccgaagccttctgattcgggcgaacgctgattatcggcatcaccgtgctgagtcgtaaagcaacacaaacacactatgggagaggccagcgtgaccgtacccaccaatgaaacattgctggtggtggacggccactcgctggccttccgtgcatttttcgccctgccggtcgacaacttcagtacttccagcggccaggccaccaacgccgtctggggttttgccaccatgctcgcgcaggtgatcgatgcggagaaccccgaccatctgggcgtcgccttcgatgtgaagggcggcacattccgcaatgagatgcttccgcaatacaaaggcacccgtgaggcggctcccgaagagctgctcacccagctgccattgattcaacgcatgctcacggccctcggcgtcacctacatcgagaagccgggattcgaaggcgacgatgtgatcgccaccctcgccaccatgggagacaaggccggctaccacacactggtattgtccggagaccgagacgccttccagctggtggatgacaacgtcaccgtgttgtacccgggccatcacttcaaagacctgaagcatatgacgccgcagtccatcgtcgacaaatacaaagtcactcccgcacaatatccggatctggcggcgctccgcggcgaaaccgccgacaatattcccggtgtgcccggtgtaggcgatggctttgcggccaagtggatcaaccaattcggttccctcgacggcatttgcgagcacgccgatgaaatcggcggcaaaaaaggcgaatcgctgagggccaatatcgaccaggtcaagctcaatcgcaaagtcaacgcactggtacgagacgtcgatctaggcgtcgatattgaggatctgacattcggcaccgtggacgtggcacaaatcgacgccctgttcaaggagcttgaattcggaccgcgtaccaggagtcgtgtactgaaaaccttcaataccggtgccaaggtttccaacacatacggagccggcgagtctacgaataatgaacaggacgagcaggataacagtctcgatctgaacctgccggaacccacgagcatcacctcttcggagcagttcgacgaatgggtcaaggcccatcgcgccgaggtcaaagttcccggtgaaatcgccgatttcacggtttccgactatggcgatggatcgcagcggcatgccgtctgcggcgacgcggtcggccgcgcttggaccgtggccgcgtggggcgacgaaaggccggggcgtgccacggcacaaaccattgccgtggccacggcaacatcagcggccatagtgccccttccaatcaccgataccctgcgagcacagcttgcgcggttcctgaaaagcgaacactcccgcaccatcgtgcatgggtataaagaattgctgcatcttctgggcgcggtagatcttgacatggacctgccgatgttcgacaccaagcttgccgggtatctgacccaaccggatttccacgccgatagcctcaagcaggcggccgagcacttcctcgacatccacttcaccgaaaccgaacagccttcgcaaggcacgttggacttcgatgacgatcaggtcgaagaagatccgaacgaacatcgtctgcgtgatctggccattatccgcagcctcgccgtcacgctcgggccgattatcgacgagcgcgaacaatgctggctgatgcgcgcgattgaacttcctgtttcccgcgtattgcacggcatggagcacacaggagccaaagtcgatagcgttcgactcgtttccatgcgtgaccagtttgccgccgaggctcgccaggcacaggaaatggcttgggagtatgccggcaccgaaatcaacctgcaaagccccaagcagctgcagaaggtgctgttcgaagatatgggtttgaaacccaccaaacgcaccaagtccggctcatacaccacgaatgcggccgcattgcaggatctgtatgtcaaatcagtggacaatgagcgggccagcggtttcctcggggcgttgctgcgccatcgagagatcaacaagctcaagcagatcgtccaaacgctgatcgatgccaccaacacatcagatgagcgcatccacaccactttcgagcaaaccgttgccgccaccggtcgattgagctccgtggacccgaacctgcagaacatccccaaccggaacgccgccggtcgtgagattcgcggcgtgttcgtgccgggggaggggtacgaggccctgatgagttgcgattactcacaggtcgagctgcgcatcatggccgatctgtccggtgatgaggcgctgatcgaagcgttccgctccggagccgacttccacaaatacgtggcctcgatggtctacaagctgccggtcgaccagatcaccggcgaccagcgcagccacgtaaaagccatgagctacggattggcctatggtctgagcacgtatggtctcgcccagcagctcaagatcgcgccacgtgaagcggaagcgttgaaaaaccggtatttcgataccttcggcaaggtgcacgattaccttgaatcgctggtggccaatgcccgagagaaggggtatacggaaaccattttcggacggcgtcgctacttcccggccctgcattcgaccaatcgtgttgcgcgtgaggccgccgaacgtgcggcactcaacgcaccgattcagggatctgccgccgacatcatgaagatcgcgatgattcgcgccgagcagaccttggcagaggcccacgtcaagagccgtatcattctgcagattcacgatgaactggtagtggaaatcgcgccgggagaaggcgaccaggtcaccgaactggtacgcaacgccatggaacacgccgtcgaccttgccgtgccgctggacgtatcgtgcggcatcggttccgactggcagctcgctgcacactgacaatttctagctcccctcgggtgaggaggctgagccgttgagcaaacagtccagtggattgtttgtaggcgaaggcgagccgatagtcgagcaatgaagagcacgagcatggcttgtccgcaattgcagaatgagtcccttgccgcaatagcccactacaatgggacatatgccgaatctcaagcaagtcatcgacgttctcgagaccctgtacccattgcgctacgccgaggaatgggatgagccgggtctcatcgtcggcgatctgagccacgacgtgcaccgcatcgtgttcgccgccgacccgacctccgccatcattgacaaggccatcgccaccggcgcggacctgctcatcacccatcacccgttgttcttccgttccgtacacgagacgagcggactcggtttccggggcgacatcgtccgcaggctctaccagcaaggctgcgggctgtgggtagggcacaccaatgccgacgctgcgtatcgcggcgtggggcaggcggcggccgactacttcggactcatcgaccagaaaccactcgtgccgattgacgatgcaaacgcctctcatccggtcggcttggggcgtgtgggtcgtttgccgaagcctgttgccctgaaggatttcgctcagcgtgtattcgacgaagtgtccgatcatggcatgaccaccgcgctcggcatccaggtatgcggcgattcggacacttttgttcagtatgtggccattctgcctggctccggggactccctgttcaacgaggtgcgtgccaccggtgcggacgtgtatgtaaccagcgatttgcgtcaccatccggtgaccgacgccatcgaacaagcccggtatgaagcccgtatgagggcccaaggcatcatgctcggccatggaatggcgggggagagccatgtgcgtccctgcttcatcaacacccctcatgctgccatcgaatccatgtggttcaactacgcgatcgatgacgtgccagccgccatcgaacaagcgaccggagcaaggcctgaagtcgagtggttccacgacacgaccgatccatggacgctgtccattaccgcgcatcgggattaaggcgctatagtgacgtggcgaaaacgttttttccgaggagatgacatgtttgggggaagcaagcaggaacaactggagcatcggctcgaccataagctgaacgcctcctcggacggcatcgacatggacgtgcccgccaaagtgatcagtagcgaaaccgtttataccgggcgcatcttccacgtggacgacatgcgcatcgctctgaccgacaagcagggcaaggaacacgagatcggccgccaggtgctgcgtcacgccccctgtgtggtcatgctcgtgcacgacatgtccaccgaccgttacctcatcgaacgcgaataccgtgccggatcggacatgttcgcctacgggcttcccgccggtctcatggacgagggcgaggacatcatggacgcggccctgagggaactggccgaggaaaccggcgtggtgccggaccgtgacaccatgggtgttgacttcgtgggcgatttctactcgtccgaaggcatgaccgacgaactggcccacatcatggtgttgcatttgggcccgttcagacgggagcagcgccatttcgacgcggacgagcacgtggaatccgcgtggattccgtggagcgaccttgccgccacgcgcatcacctcatccaattcgatgatcgccatccagcatgaggcgttacgcagactcatcgccaggaactccgacaaagacaagccgtcgctgttctcctgacgttcaactccccggcacatcagtgacacaagaaagtgggatactgaaaactatgcagatcagacctggatcaatgtatccgctgggcgccagctatgacggcgccggtgtgaacttcgcgctgtactcacaggttgcgcagaaagtcgagctatgcctgttcgacgagcacgatgcggaaacgcgcatcgaaatgaccgaacagaactcatacgtatggcataactacatccccggcctccagcccggccaacgctacggctaccgcgtctacggtccctatgacccgatgcacggcctcagatgcaaccccaacaaactgctgctcgacccgtatgccaaggccatcgaaggcaacatcgacggcgacgaaagcctgttctcctactggttcaaaagcccggacgacacctcggcgatgaacgaccttgactcggccgcccacaccatgaagtcggccgtcatcaatccgtatttcgactggggcaacgaccagcacccctacatctcgtaccacgattcggtgatctacgaggcgcatgtgcgcggcatgaccaacctcaacatggacgtgccgccggacatccgcggcacctacgccggcctggcctatccgagcgtcatcgaatacctgaagaagctcggcgtcaccgccatcgaactcatgccgatccaccagttcgtcaacgactccttcctgcaggagaagggcctgtcgaactactggggctacaacaccatcggcttcttcgcgccgcacaacgcctactcctcctccggagagcgcggcgagcaggtcaacgaattcaagtccatggtcaaggcctaccatcacgccggcatggaggtcatcctcgacgtggtgtacaaccacaccgccgaaggcaaccatatgggccccaccctgagcttcaagggcatcgacaacgcctcctactaccgactggtggaaggcgaccagcagcactacttcgacaccaccggtaccggcaactcgctgcttatgcgctcgccgcacgcgctgcagttgattaccgattcgctgcgctactgggttaccgaaatgcacgtcgacggcttccgcttcgatctggccgccacgctggcacgccagttccaggaggtcgacaagctgtccgcgttcttcgacatcgtggagcaggacccgatcatctcgcgcgtgaagctgattgccgaaccgtgggatctgggctccggcggctatcaggtgggcggcttcccgtccagctggtccgaatggaatggccgctaccgcgacaccgtgcgcgacttctggcgctcgcagccctccacgctgcccgaattcgcctcgcgcctgatgggcagttccgatctgtatcaggtcaacggccgtcgaccggtggcgtccgtgaacttcatcaccgcgcatgacggtttcacaatgaacgacctggtcagctacaacgaaaagcacaacgaagccaatggcgagggcaatcgcgacggcgagagcaacaatcgctcttggaattgcggcgttgaaggcccgaccaatattccggacgtcaacgacttgcgtcagcgtcagatgcgcaacatgttcgccacgttgctgttcagccagggtatcccgatgatttgcggtggcgacgaagtggcccgcacccagcagggcaacaacaacgcctactgtcaggacaacgagatctcctggaccaactggcatcttgacaagggacgcaaggaactgctcgccttcgtttccaaactcattcatctgcgtttggatcatccggtgttgcaccgccgtcgcttcttcacaggccgtgagcccggcgacgattcgaacatgattccgcaggtcgaatggttcgaccacaccggttcgatcatggatatggacgactggcagaacacgcatgcgttctccatgatgatctatctgaacggttcggatattccggaggtagactggtacggcaaccggatggtcgacaatgacttcatcctgatcttcaacgcgcattacgagccgattatgttcaccctgccggatgagcgatacggccgcaaatggcagctggtcgtggatacgcacaacccgaatgggccggaactgagctatgaggcgggcttcatgatcaccgcccagtcccgcagcttccttatgctcatgagcgacaaaaagcccaagaagcccatgggcctataaccagaccgaatttaagctccctctgacgagggagctcccagtatagccgggtgagggagagaccgcagcaaagccgcgaacccctactcgcgccccttacgctcctccacgagccgagcatccccgaacgcaagtagatgctcgccggcaagcgggcgcggctggtcgagcagctcgcggaaatccaggattccatcgactttatcgacgccaaacagcgcttctacgacgacgtcctgtctggcgcaaccccatacgtaagcgtgctcatcccatccgcggcgctcgcaaaggagtcagaggaaccgggagcattgaagggtgcggagaggaaataggttcgaccgagccgtttcttcctccgggatgcaagtgcgaacaacggtttgttgtacccgcgcttggcgaacgggacatgcccttagactggaatcagcaagcgcacagcgagacgcgcgaatcgttttccgatgtcgggaggtagtcatgtcgatcggtcaggttatcaaagtcgtgcgcgaggagcgaggtcttacgcagtcgcagttcgcgcacgagctgttcgtcacccaaca

SEQ ID NO: 2199 - DNA, 7599 bp, Unknown
  R51_24m  MAG No. k141_23785
aagcccaagctggtggatgagatcctcgccgacaagcaggcgaaatagcaaagcatcgcttccaccagcaagggcatgctttgttattacacgtttcatggggcggtaactcacccatagggcggtaaatatctcatggggcggtaaaaccctcatggggcggtaggcgaaaacggctctattctgcggaaaggcaaaatccgctaaccgccccatgggccaaataccgccccatgagtgttttaccgccccatgggaatcacggttctgccttctttcaacggggtaagagcgtaagtggggcatatataggagcgttacaaactctgttatcgttcacaatgtgaccgcaacgcggcgtgccacaagatcgaacctatagttaagccccatgtagtgagctatctcacaacgattggctcgctacgtggaattcaagacttggactgcaaacgtcgttcatcccacacaatgggagggcgaacggaacacgcagtccaatcaagagttcgctcgccgcaacatcattgagcagttgcacgcgggcaggtttgcaagaagagggctcaaatatgactgctgctgaacagcagatttccggcaatcccgcggctatggaaagcgcacaagcacgtaccaccgtgacggatcaagccaaggttcaggatattatctcgcgcgtggatcgcgcacatgaaaccccgatgttccatcgcatcgtggcgctggtcgccgctggcatgctgatggacagcatcgacgtatatattggcagcgccgttgcctccagcgcgttggccacacactggtccaccgttgcgcaaaattccacctttatgtccgcaggcttcctgggtctgctggtcggttcgctgctggccggcttcgtcggtgacctgaagggccgccgcgtggcttaccaaatcaacctgctgctgtttggcggcttcaccttcctcggcgcattcgccccgaacatggccgtgctgtccctgtgccgtctgggtgccggcctgggcctcggcgctgaaatcgtcaccggcttcgccatggtcaacgagttcgcaccgatgaaccgccgtggccactggtgcgcgattgtctcgctcgtggccaactgcggtgtgccgatcgctatgctgctgtgtgcatggatcatcccccgctggtcctggcgtccgctgttcgtggccatcggtctgggggccgccatcatctggtggctgcgccgcgacatccccgaatccccgcgttggctcgccgtgcacggccgttacgatgaggccgacgccatcgtcaagcagcttgaggccaacggctccgaactgatcgacgcagccgccaaggccgacaccagcgacacccgcaacgccggcggccgttcgctcggcatctgcctgcttgtagctgtggttgctgtggccgccacgaacgtgtgctcctacgccttcacttcttgggttccgacgattctggtcaagcgtggtattaacctgtccagctcgctgctcacctccacggcgatgatgctcggtgccccggtcggctgcctgattggctctctgcttatcgaccgcatcggccgcaagcgcacgattgtgccggccttcctgttcactggcgtgttcggtttaatgtatgccttccagacctctaccgtgagcgcaattatcgttggcttcctgctcatgatgtgcctgtacgtgcttatggcttccgtggtggctgtgtacgctccggaactgttcgccaccaaggttcgcttccgttgcgtcggcttcgcgaacgccgtggccaagctgctcaatgtgttgatgcctatggtggtgggttggatgcttacctcgcttggtgccacgtccatctttgtggccatcagcgcaattgctattgcatcgatgctgattgtcggcttctttggcgcggagactgcgcagaagtcggttgggtgatcggtttcctcacagtggaataactgctgataatgtccattcggcgtcttgcgtggtgatatgcagggcgccgttttgttgttctagtaattgtcggtaacggttgagaccggtaccggtggataggtccgcactgccatccgcatccgaatccgatgacgtgcgggccgtgtcgatgcaggcgatgcggacggtgtccagtccgatgccaatcgtcattacatagcccgcttccgggtcggcatgtttggcgatgttgccgtacagttcctccagcagcccggcgatcaggccactccgaccggctgcgccatgagcaccggaaataatcgtctgaccttcaaagccaagctctgataatcggcggtcaccattgctcgcaacatcacgaatttgctcggctagcgggcaatcagcgtctgtgatgccacatgcaatgccagaagcggcatcaacggtcgaatcatgcggagtcactgcactgtgcgccgcttctcccctgccttcaataacatcaatgacctgatgcgtgcgatccaatgcgcccatagccacgctacgcagttcgcgtaattcttcttcagaaggggtcttgccatcggcaatatccttgtcgaatcgcaaaatcaggtatgccaaatcattggatacgtaatcgtgaatgtcctgagctgtgcgttcctgctgacggcggtgagccaactccgctcgaaccaagctgcgttcgtgattccatcgcgccgccatgccaccaagcatgaagccaataaacaacacggccactggcatcacaccatagagggcaatcgcaccaagaatcacttgcctagtgcgatgctcggcagaagaaccgctcgattcataggcgcttccggtgaagtcgcttcccgactgccctgcgctgtcagacccactggatgaagagccaccatcagcagcgccaccatcagcaacactaccgtttagggcactactactcgccgcgccatccgcagaaccgctcatcgtgtctgagccgccatcaagccaaggaatggccacgccaccacgcgacaacatccacaccacaacggcaatgccggcaaccgccagcgccaatcgcttatcggcgtatccggcaatacccaccgccaataacacggcgagcattgcacccgacggcatccagatcggactcatgcacaacactatccaagccaccgctaccgccacgcatccggtgaccggacgaaacgccatccaccccacaatggcaacgaatatgaactccgcaaggcagtccgccgccgagacactgtcagcagccaagcccgccatggtttccatcgtgcatatcaaggcaacaaccagtatggcaatcaacagccatgcattgcgaacaccgctatccagctcggccaatcggtgtcgtaacgctttcatagcagttcctttcctaccatccatgccgttgcacataccgcccatgccaactcttaaatctcatgccgtttcacgcagattgatatggcatgagcgcgactgcgagcgccgagtttggcgagtgcgcggcgttcaaaagtcgccacagtggccacgctgatgcccaatcgctcggcgatttccttggtggtcgacccatccgcatacatacgcagggtgtcgcgttctttgccggaaagcgcgccacggtgcacgtatgacgtatcttcgagcaccgcgtaggcggttgcggcatccatgaaggacagcgaattaccgctcccctcatctcccagtaccagctcattggtcgacaatccttgggctgcattgcgaatagcgagcgcaatgccgttcaaatcggttttaccaaccaaggcctgcgccccgcagcgagccgcctcgtcgtgaaatgacgcgagcgcgtatgaggtgacacccaccagcccaacctcgggtgttttggtacgaatcgcacgacagacttcggtaccgggcacgtcgcccatagacatatccgtaaccagcacgtcaggccgcttggtggggctcaggcatcggctgatggccacggcacccaaatcgcaggtccatatcacggcaaaatcgctggacatgcgctcgattagcgcgccgaacactttcagcgcatacgggtcattgtccacaatgccgatgcgtatgttgcggttgcgcgcttctcccattacattcaccccttcagtgtgcccgacgccgaactgctccgtcctgacatgtcatggtcactatgacaactatcattccacatttcctgcgcgatttacgatggaatcatcatcaatccttgacaaggcggtaaaggaggactgcaatgaaccgtgcacaagcactcagcaagctcaacaggagcgatatgcgcaatgccgccgccgagcgcgggacgcaacgaatattcgcgtggaaccgcgcgcattggattggcatggttgtactgatagcggtgttgttgctgctgcagtggagctcatcaatgtatctcatgcccgacgaggtccttgacagggctgccaaaaacctgttcgtatggttccccggtatggttctgcactggccattggtgttgggaatcaccaacctgatactcggttcgatacgatccggcagtctgtctttcccattggcgagcgcaatcatcggaccgctggcattcggctgtaccaatcttcgcttacggccggggttcccataccgttcctgggctcagtggtggaagctaatgcacgctgaaagcggccatcagctattggttcattcgttgatcggctcggccatgctgttgatctgttatacggccgttgcgttcatctgctatgcaatcggacgctacggtctgcgcgaattgtttgtggatccgaatccgcagacggcgagcggacgactgctcacatggattcgtcaggatgcgattcgcttcggctgctggctggcgacggcaatcatgtacggcttgctattggcgctgaccttacggggcggcatggctgcgatggccgccgcgttgctaatcaattttgtgattccgcccgccttgctggtcatcaacggcatctacgcgctacgcccggcctcactgacgtatccgtggaaaagcctgctgttcccgttggcgtgcacactggtacctgcgccgatgctcatggcgctcatcacggtgtatgaagacacgtgcccgataggaagtacctgcacgctgatcggcgaccgatacctctcctggggctcgatggatcaggtcttgcatttcgtcatcgtgttcgccgtggcgagcttcctcggattcggcgtggtgtgggccgtgcggtggattgtggctcgtcgcacaaaataagagagaccaaaatatactggaatcaggggcttcgtgcaatgatgcacgagccgatccaagcaaaggggctgaccatgagcgagaaactgatggaacagtaccggttgcgcaaacaacgcaaacgccgtaacgcttgtatcgccgccatcgtgacagtagtgcttgtccttgccgtcgccggcggcgtatggtggacggccggcgatggcagcgtactggttcgcaatatgttcaagccgaaggccacgcctgccacgcagccggtagtcgacagcaccgcagccttcgcctaccgcaccgcaccggaattcctggcgatggaaaccggcgaccgagacaccggcaatgtgaactactcccctgcttcgatgtggatggcgttggccatcgccgcgcagggcgccaatggcacgacccgctcgcaactgaatgagctgctgggctccggttcgctggccgacagcgactaccaatcgctgctgagttcgatcaacgggcaatattcgggggcgaaatccgagatgagcgccgcgaactcgctgtggatcgataacgactactcccttgccagcgattaccaatccaccgtcaagaaaatgttcgaggccgaagtcaccacgctaccgttcgacgatcaggccgccgccaagatgtccgattggattgccaaacatacgaatggttcgctcaagccgaagatcacgctgcgtgaccgtgaagtcctgtccatcatcaacaccgtctatgcggatggccgctggaaggatccgttcgaagagcagtccaccggcgacggcaccttccacggcgaagccggagatgctcaggtgccgatgatgcaccggaccttcagccaaatgacttacagccatgatgagtacaacacttggcagcgggtggagattccattcgacaacagcggcaatctggccatcgtgctgccggccaaagggcatttcgacgagctggccggcaatgccgagaaactcggatgggcgttcggcacgtgttcgtcggcatcccctggcgaggacgcaatgggttgcaccgcggacagtctgcccggatggggcgtctccgtcaactcggccacggtgaacgtctcgctgccacgattcaccgtcgacagcatgttcgactcggaagccaccatcaaggcattcgaaaaactgggggtgaccgatgcgttcagtgcaggcgacgccgacttcaccaagatggtcgacaccgattcgcacggcgagaatctgtatatcggttcgattctgcaaggcacgcgcatcgaggtgaacgaggccggcgccaaggccatgtccttcaccaaagccggcgcagacttcactagcgcgccggtggacaacatcgagttcacggtggatcgcccattcctgtattcgtacgtcaccccggacggcataccattattcatcggtgcggtgcgcaacctcggcggagtcggtggagaacactgatactttcccgacagtccgtcaattagggtgtatcgtttgacgcatggctacgatgaaggaaatcgcgaacaaggcgggggtttccgtctctacggtgtcgctggtgctcaacggacgcgacgaggggcgcgtaaagtccgaaattgcggacaatgtgcgcgccatcgccaccaagctcggctaccggtcgaatccgctggccagttcgctgcgtacaggcaagacgcacatcctcggtttcatcagtgaggaggtggccaccaccccgtacgccggcggtatgattctgggcgcgcagaccgccgcaagccagttcggctatatgctcatcaccgtgagcaccgacggtgagaacagcgagagcgaggaaatcgccgcactcaagcgatacggcaccgacggtttcctgtacgccaagatgtcgaaccgcatcacccatgcgccttcttcgctggccaagacgccactggtgttggtggatgccaccgactcgcttggcaaaatcccgagcgtggaaccggacgagttccaaatcggctacgacgccaccaccagattggttaaggccggatgcgcacgtatcgcctatgtgggttgctcggaaccgatgattgcgcaggacggtcgtttggaaggctatcaggcggcgctcagggatgccggcctcgactatgacgatcatctggtcgtcaatgtgctcaacaacgggccggcactgaccgcagtcagcgatttgttcgacgccgagcatccggacggattcttctgcttcaacgatgcccgcgcctggtatgtgtacgaatgcgccgcacgccgaggactcacggtcggcaaggacatctcc

SEQ ID NO: 2200 - DNA, 6002 bp, Unknown
  R51_24m  MAG No. k141_23796
cgaacaacgccagcgcgcccgcaatcagtttccctgtgggaaccatatcgactagcttgttggccaacagcgagccgaccaaagtactcacgcccattgccgtgccgagcagtccgatcatgaccgcgttggcgccacgggcggccaacatgatctgcgcgccggtgatactggctacgcaggcgatgttcaccattgcaccgagtatgatcgcggataggaagacgcgcttggtcagggctcaaacggcgaccacggcttagcgcgacgagtcaacgcgcattagctgtctgcgaacgacaccaacaccttgtacataacaatgcccctttgcaaaaaccaaactccaattgttgtaccagttcgagcacgggaccaggcgcgtcactgggcacaacataatcggccatcaatggtttctcggcttcgaggggctgatttcgtccggtggggacatctacttggctttcgaggggctgctcaaacgccaaaccgcgagtataaacggctttgcggcaacgccattacgccattgtggagccttgtctactcgggcatcagccccttgaaacggagatagatctccggcaagtgccaaatcagcccctcgaaatcgagttaggcgttgttttcgcgtttgcgctgccgttcgagtgcgtaataagccgcgtagcagcaggcgacgaacgggatcatgcaatacagggtcgaacgctgcgtatcatcgagcaccacgagcaccagcgcgccgatgcacatcacgatggccagccacggcagcaccgggaaaccgggcgcacgatagccgagctcatcggcgctgtgcccatcccgcgcccattcgcgccggaaacggatatggcacacgcatacggagaaccacaccaccagcgtcgccaaacctgacacggcgaccaacaccagatacacggtcgaggcggcgatcacggaagacagcaacgccagcagtgagcccgccatgctgaacagcacggcccacaccggcacaccacggaaattcgtcctagcaaaacgttcgggaatcagccgctccttggccagcgaccacaccatgcgcgaacacacgtacaggccggagttcgcggcggaaagcacggccgtcaacaccacgaagttcatgatgtcgccggcgaacggcataccgattgactggaacaccagcacgaacgggctcgtatccacgccggcctgatgccaggggatcaaggccgccatcaccagaatcgagccgatgaagaaaatcgccaggcgcagcaccgtggtgtgcacggccttgggaatcgcacgcgagggatccttggtttcgccggccgccacgcccaccacttcggtgccggagaacgcgaacaccacggtcagcagagtcgagaaaatcggcgcgataccgcttgggaaccagccgtcggccacgaagttgcccagcaacggcgcggaatcatgaccggcaatcggtatggcgccgaagatcgccagcaggccgatcacaatgaacgcgacgatggcgaacaccttgatcgacgcgaaccagaattccgcctcgccgtacagccgcacggacatgatattgagcgcgaacaccaccacaatgaacacggccgaccacacccaggacggcgaatgcgggaaccatcgctgcatcaacagccctgcggccgtgaattcggaggcgagcgccaccgcccagttcagccaatacaggatggcgatggtgaacgcggtgccggggccgatgaaccgcttcgcatacatgtggaagctgccggcgtacggcatggccacggacagctcgcccaacgacaccatcacgcaatagacgagcagagagccggccgcgtaagcgaggatcgcgcccaacggtcccgcctgatgaatcgcgtagccggagctgacgaacagaccggtgccgatcacgccgcccagggagatcatcgtcaggtgacgcgactccatcttccgttcaaggccggtatcgtccttgggtgtgccggctgccgccatgctcgggtctcctttggtcgggtgaacagttgtgtctcgtgtcggttgtgcgggcggcgctcgatgccgcctaccatatgatagcggtaacacgaacagcgagtggaacacgaggagtttggaatgatggaactgtatatcggatcgcatctgtcgacggccggcggatggaatgcgctgctggaacgttcccatgaggagggcggtaccgcgttcgcgttcttcccgcgttccccgtacggcaagcgttcgaaggcgctcgacccggccggcgcggcggcgttcggtgcgcgtctgaaggctgagggctatgggccgttggtcgtccatgcgccgtacgtctacaatctggccggcaaggatgaggccaagcgcacattcgcgatcgaggcgttggccgaggacatcgagctgctgaccgccatccgcgaggccggccaggaggtgtatatcaatattcatcccggcgcgcatgtgggccaaggctccgagaccggctgccggctgatcagcgagggactgaatcaggtgttcgagcgtacgaccggcgtcatggtgcttctggagaccatggccggcaaaggcacggaatgtggccgcaatttcgatgagctcgccacgatcatggatggcgtggagaataaggcgaacgtcggcgtcacgttcgacacctgccatgtgttggatgccggctacgatttggtgcacgactacgacggcgtgatgcgccagttggatgaggcgatcggcttggccaaggtcaaggcgattcatgtgaacggttcgcagttcggcctcggctcgcacaaggaccgtcacgccaatatcggcgagggccagctcggcatcccgttcttcacgcgactggtcaacgacccaaccatggccaagctcccgatgattctcgaaaccaaggagcagacgcccgccacgcatcgcgacgagatcgagttgttgcgcggattggtgcaaaagtagtcgtagtcgaccaatgtcgagcagaagagacctgtttttgactgatggctatacgaggttagctatcagcggggcgttgattgacccgtcttcatatacagctgcatagccggttccagctgcaagagctcaaaacagacgcatgggttcggcggaatccaatggctgaataagacgtttgccgtcgctgttcagtggcgcgacttcgtgaaattgcagatgccgggaaagcatggtacccgcttcccgcatggaatctaacagtgcggctccgtcaacggagcggtccagccatgaggcaaccatattccgaggaaccagcaggggcatgcgatcatgcaccttgacgaactcgtccgcggcagggcaggtgatgatggttgcggtcagctgccatggcgatgcgggagacggcctccaccatgagtacaggccggccaaagacaatagttcatcatgtggtgcgtgaaaatagaacggcctgcgacctttccattcgtagtagccggaagcggggatgatggctcgcatggattttgtggattcggcgaacgccggcttgacatgcgcagactccacacgcgcattatatgtggggtagctcagcactttgctggcgctccatcgcggcaccagcgaccaataggcaccggtcagatgacggcggccatccttgccctgtgccaccacgccaatgttctgcatgggtgcgatgttgtaggaaggctgtggcagagtgtcaacgcgcacgtcatcctcgtctaccgcgaactgtgaggccacggcatcccaatccaaatcaagcgcgaatctcctgcacatgcgcccagtctatgccatcaatggaatcaatcccaggccgtatgaccaatattcatggcgattttcctttttgttggccgctctggttccgtagcgatacgaaccaacgaggaatagcccagaatgtaggacgggttcggcaatcgggacggggcgtgacctagagtggcgcatgaccgaacaccaacaaagggaggaccatgtcggttttggacgaactggtggcgggagcgctggaggatcagcgcgcccgtgagctcaccgtatcgcttgaggacgtgaagaaggccgcgctggcggccccggctccgattgacgcgacacgatggcttaagcgcgccgacggcatccccgtgatcgccgaaatcaagcgcgcgtctccgtccaagggccacctctccgacatcccggacccggccgcgctggcccgcgagtacgagaggggcggcgcaagcgccatctccgtgctcaccgaaggccgcagattcctcggcggccttgacgatttcgacaaggtccgcgccgccgtgcacattccggtgctgcgcaaggacttcatcgtcaccgactaccagatcttcgaggcccgcgcccacggcgccgacctggtgctgttcatcgtcgccgcattggacgacgcccagctcaagcacctgctcgacctggcgcacgagctcggcatgaccgtgctggtggagacgcacacccgcgaggagatcgaacgcgcacgccaggccggagccaaggtgatcggcatcaacgcgcgcaacctgaagaacctcaaggtggacgtgaacaaatacaacgaactcgcggccgatctgcccgataacgtcatcaaggtggcggaatccggcgtattcggcgcggtcgaggtcgaagactacgcccgtgcgggagcggatgcggtactggtcggtgaaggcgtggccaccgccgatgatcatgaacttgcagtggaacgactagtaaaggcaggagcacaagtgaaagcatccgaaacgaccccgctcagcgaacatcagggaccgtattggggccagttcggtggccgctatgtgcccgaggccctcatcaccgccctcgacgagctggagcgtgtgtacacgcaagccaaggccgaccccgaattccacaaggagttcatgacgctccagcagcgttacgtgggccgtccgagtccgctgaccgaagccccgcgcttcgccgcactggtcaagcagaagaccggtctcgacgcccgtatcttcctcaagcgcgaggacttgaaccacaccggcgcgcacaagatcaacaacgcgctcggccaggccctgctcgtcaagcggatgggcaagacccgcgtgatcgccgagaccggcgccggtcagcacggcgtggccaccgccaccgtgtgcgccatgctcggcctcaagtgccgcatctacatgggtcagatcgacgcccgccgtcaggccctgaacgtggcccgcatgcgtatgctcggcgccgaagtggtcgaggtgaccctcggcgacaagatcctgaaggacgccatcaacgaagccctgcgcgactgggtcaccaacgtcaaggacacgcactacctgctcggcaccgtcgcgggcccacacccgttcccggccatggtgcgcgacttccagaagatcatcggcgaggaagccaagcagcagctccaggactggtacggcatcgaccatccggacgcgatctgcgcctgcgtgggcggcggatccaacgccatcggcgtgatgaacgccttcctggacgacgagcgcgtgaacctctacggctacgaagccggcggcaacggccctgaatccggcaagcacgccatccgcttcgcccccggcatcggccagctcggcatgttccagggcgccaagagctacctgctggaaaccgacgaaggccagacgctcgacacctactcgatctccgcaggcctcgactacgcttccgtgggccccgagcacgcatggctcaaggacatcggccgcgtgaactacagctgggccaccgacgaggaggccatgaacgctttccgcgacctgagccagaccgagggcatcatccccgccatcgaaagctcgcacgccgtggccggcgcgtacaaggccgccgccgatctgaaagccaagggctatgacaaggccgtgatgatcgtgaacatctccggccga

SEQ ID NO: 2201 - DNA, 12726 bp, Unknown
  R51_24m  MAG No. k141_24337
gctcatggcttcggctcgggtggccggattgcgcagcatgccgcgcaccgcagaggtcaccgtgcgggcggaagacttcttgatgccgcgcatagacatgcacaggtgctcgcattcggtcaccacaatcacaccacgtgcgcccgcatactcgaccagcgcgtcggcgatctgctgggtcaaacgctcctgcacctgcggccggcgagcatacacctcgaccagtcgggcgagcttgctcagccccatcaccccgtccttggcgggaatatagcccacatgggccacgccgtggaacggcagcaggtgatgctcgcacaccgaatacagttcgatgtccttgaccagcaccagttcgtcggtatccacgtcgaagtgcttctccagcacatcggccggggaagcctgcagaccggcgaacagctcgcggcacgcgcgggcgatacggtcaggtgtttccaccagcccctcgcgctcgggatcctcgccaatcgacttcaggaacagacgtacggcctcgcgcacgccttcctcgtcgtatgtgtgtttctcccgatggcaagactctatatattcgttcatctcatctctcccttgtcattgtccacaacgacgtcggcccggcctgcgtacgtgagaaaccacatgaacaggtcgggccgaatcgtcatcgtgtctactcttccggcttcatgccgaccgagcgcttaaggctttcgggaatctccaccggcggcttgtccgagtcggggcgacggtcgttggacagccacaccggacgaaccggagccttcttgatcggcgcgaagatcgccgcaagttccttctcgttcagggtctccttgaccaacagctggcggaccagctcgtcaaggatctcgcggttgtcgttgatgatggtccacgcctcggtgtgcgcggtctccaccagcttgagcacctcgtcatcaatcacttcggcggtgcgatcggagtacttgcgcggctgcagaccgtccatcacagtggtctggtcatcgtcggaaccccacttgatggcaccgagcttgtcggagaagccgtattcgatcaccatcgtacgggcgatgttcgtagccttctcgatatcgttcgaggcaccggtggtcgggtcgtggaagacgatttcctcggcggtgcgaccgcccatcgcgtaggccatctggtcgagcagctggttgcgcgactgcgagtagcggtcggaggtcggcatgacggcggtgtagccgagggcgcggcctcgcggcagaatcgtcaccttggtcaccgggtcggtgttgttcagggcggcggctaccagcgcatggccaccctcgtggtatgcggtgttgcgcagctcttccagagccatgcccttggacttgcgcttcggtccggcctgaacgcggtcgatggcctcgtcgatggcgcggttgtcgatcaactgggcaccggcacgggcgcacagcaacgcggcttcgttgagcacgttggccagatcggcaccggtgaagcccggcgtgcgcacggcgaccatgtgcaggtcgacgtccggtacgaacggcttgcccttggcatgcaccctcagaattgcctcacggccttccagatcaggggcggccacgcccacctgacggtcgaatcgacccggacgcagcagagcggggtcaagcacatcagggcggttggtggcggcgatgatgatgaggttggtgtcgttgtcgaaaccatccatctcgacgagcagctggttcagcgtctgctcgcgctcgtcgtggccaccgcccatgccggagccacgcttgcggcccacagcatcgatttcatcgatgaagatgatggcgggggcgttcttcttggcctcatcgaacaggtcacgcacacgggaggcaccgagacccacgaacatttcgacgaagtcggagccggccatcgagtagaacggcacgccggcctcgcctgcgatggctcgggccagcaacgtcttaccggtgccgggaggaccgtacagcagcacgccacgcggaatacgagcgcccagcgccttgtacttggacggatccttgaggaagtccttgatctcctcgacttcggccacggcctcgtcttcgccggccacatcggcgaacttggtggtgggggtctggccgtcgagcagcttgccgctgtttttcttgccacccatgccgagcatgccgccggcaccgcccatgcgactcatcaggaaccagaacagggcgaagaagatgatgaacggcaggatcgaggtgatgaggtagctcatcatgctggtctgctcgatattcgaggtccagcccttttcgagatcaccgttctccacggccttggccacctgtgcgccctgcgcgaaggtgtagtagaactgcacgttcttgccgtagttggtcaccttgccggtgtcggcgtttttcttggtgtagtcgttcttcagcttaaggcggacgacctgcttgttgtccgtgatctcggcgtaggtggccttgccctgattgatcagcgcgaaaccatctttggtgtcaatggtcttcgtgccaccgccggcgaacatctggaacatcagcacgaccatgaccacgagtacggcaccccacagccagggggactgccatatcggccggttctcgttgttgttgcctttgccattgttcccgttattgccacggttgaacgggttggtgaacgggttgccgttgttacggttgttgttcgggttcggattattgccgttacccggcccttgcgggaagctcatgcttgcactccttggtagacggacggcttgaggaccgcgatcgaatcgaggttgcggtagcgttcgtcaaagtcgaggccgaagccgacgacgaactcgtccggaatctcatagccggcgtacttcacatcaacgtccacttctcggcgggaaggcttgctcagcaaagcgaagacctccacggaagcggcaccacgacgtttcagttctgcgaccagccacgcgagcgtgcgtcctgaatcaacaatatcctccacaatcaaaatgtgccgtccgcgaacatcggcggacaaatcctgcctgactgtgacctcaccgctcgacactgtgcccgagccatagctcgaaaggctcatgaagtcgatctgcacaggaatgctcatggcctgggtgaacgcgaccagcgtattcacggcccctttcagcaccgcaacgagcagcggattcttatcgcggtaatcctcgctcgcgagagcggccatctcgtggatcttggcatcgatctgttctttgctgaccagctcgtggtcaatatcttcctcaacgtcagcgattcgcatgcgctccatcttggcacacgcgaatgacgtgtttcttgcgattggctgaataacctctgggaagtgagacgccgccttggccatgccaatcgacgaccagccggtcgatggcggcaatctgggcggcactggcgttcacaccggcctggctcagcgcgtgagcgatgacccgcaaccgaatcgcctctggctcacgtgcaatacgtctgacgccgatcatcaggccgatgccatggcccgaatcgttggtatcgtctgcagcacaggctcgtggcgtatcggtcgataccgttgtcgacgatgccggccggtcaactgccgtaaccgcctcccccatcacctcgtcggatcgctgatccagatactccttgtccattctggccagctgtgcgctttcggcgaaatggcgggtgacattgaatccagcgaatcgttcgatggccggcagcaggtcgtggcgtacccgcgagcgcaacggatagtcgtccggcaactcgccgtctaccgcatcgccattggtggggtcatcccaatattccacacccaagtcttcacagaggccggtggtttcgtctcgagtaagggtcagcagcggccgcgcaaaagtcacgccactgcgtgtgaagacctgcggcatgccggccaacgcatccacgccacggctgcgcagcagtccgatcaatacggtttccgcctgatcgtccatagtgtgggccaacagcacggcaatggcacctgattcacgcgccgcggcgcacagctcgttgtaccgggcctgccgtgcggccgcttcgaggccctcaccgcgtgcctgcacggttgtgttgcgcacgatgaccgggcccagtcccaacgcacggcaacgatccgcggcctcgccggcgacctgttcggaaccctcctgcaagccgtgatccacaatcacgacaccgcaacgcacgcccatggacgtgcatacgatatggcttaccgcggccagcgccatcgaatcgcgcccgcctgaacaggccacgagcacgagtggtgcatcggaggcaacggcatggtccccatgctgcgcgaattcgggagcctgcacatcgcatagttccacggcgctcagcgttgttcggaccgcgcctacggccttgcgcaatcgtgcggaatatgccatgtactcaccacccttttctggttataggcactcgtgcgtttatggacgtttacggcctttgtagcccttgatggcccttgatgcctcttttacagccccgcgagcttggtgatgaacgagtcgatggcgctacgcgcggcggcataatcctcaggattgttgaccaccacggcaaacgacaacgctcccccattggtacgggacacattgccggccatcgacgtgaccgtgccgaggctgccggttttgacgcgcagcagaccggccacggcatcatccgtataccgatcctgcgccgtgcccaccaaccccgcgatggatagaccttccgcaccagcagcaccgctctcggtggtcagattacgttgttggacggccgccagcgtgcgtacggtgagccgggagccgggagacaggccggagcaatcggccatggtcagaccggatgtatcgagaccgagatcgttcagagtggatttgaccgcttccgtgccgccttcaggactgtttgtcgctgatttcgccaaagcggtgagtctgccgaactcctcggccagcgtattgtccgaatgtcgcaacgtgtatgccatgatttcggacagtgttgccgaactcaccgaggccaaaggcgtttcgccggatggagcggtgtttgccgtcacgtctccggtaacggccacaccgttcgattggagcagttcggcgaatttcgtggccacgtcgctggcggtgtgctgggacagttccgggtatccggccgaatcatcagggtcggccggcgcaggcgtatcggcggtgtattggcggcctccatcaatcgccattgatgagaccggcgtgaagtagacggtgtagtcgcttaagaccgcgccgccttccgacagacctgcgggaatgcgtgagtcgccgaatagggtgtcgtcgtactcgagattgacggaagtgatgcctcgctgggcgagcgcggccacggtggccttggccaaggtgttcagaccggcacgtccgttggtatggttggcgtcggaatcgcctgcagacagcagcatgtcgccattgcctttgagggtcaacgtattggtgccgtcatcggattgggtgaggaacacttgggtatccaaggtggatgccatattcagggtggatgaggcggcgagcgcggtcagcgttttcagtgtggatgcaggctcgcgtggagtgttcgactcgtgttcggcggcgacggtgccttgggcgtcttcaatgatcaccgacgtatcgtttcccacgccttgcgcggacagcaattcgttgaccagtgcagaagcggccgtggaatcaatggccttgttcgcgttcagggcaccggcgatggtgccgcctgatttggcggtggccggattggcgaaaacaggtgcggtgacaggcttcaacgtcaacaatccgggggccacgtcggtgatgtcggcggcgcagtaccccgcgaacagggcgatggtggtcagtgcggaaatgatgacggtcagtgttcggcgatgcgatcgttgggtccgccgttgcgcttcacgtcgctgacggcgtgataccgctgtagataccatcgtgctccttatgccaaggcaatcatttctgcaatgaggcgaacgagtcgagtgttgccacaatcgagagcattcgcgcatccatcagcttaccgcccagccatgtcccgagtgccagaatgccgatgccattggccagcgcgaccggaataatcgccagccacatgccgccttcggctcctgtcagcagcatgaccagcgccacgatgccagtgggcagcatgagcagcaggctgccaagcatgtagacgaacgggaagaagccttgggccatggcgcggccttgaggcgcggagaacggcttgtccattgaggcgaccgggtacatcagtacacaggaggtgacttcggccacgcccagtccgctcaaggcgatgcccatgcccgtggcgaggaagatcaggccggtagcgaggtcatcgggctgcgcccagcgtccggtcagtgcgccgaccagcacgatgccggcgagatagagcagcaccatgtagacgaccatgatgccgacgtagacgcgtacgcggccgattctgtcggtccggccacgcacgccggcgatgacttccatggtgaagccgcggccgtcatatgcgagcccgttgctttccacgacggacatgaaccagccgcaccagatcagcgactgccagacgaccgcgctgatgccgtgtgcctggaaggcgaagatgatcaggaacaggaccggcatggcgaaggtcatggcttgacgggggtctcgtttgagataggtgatcaggcgtgcggaaaccgcgccggatgccgaatcgggcatccatgcgaatgcgccgatgcctttggcggtctcggacggactgtttgcgccgatggtgagccgttcatgtctcagacaccaggtgcagacggcgaagcagacaatccatgtgacggcaaggatggcgatgcgggcgagcagcaccgcccaggctccggtaagcgcgtcgaacggtagttggaaggccgcgccgaacggcgtccatgcgacgatggtggtcgccgcgccccaggtttcggtgttgaggctgaaggccacgccggagttgaccagaatgttcggcaactgacagatgataacgaacgtcagcacgatgaagatatagaacgcgcctttgccgcgtttgccggtcaccagcgtggtggatagggcgatgagcagtttggagatgctcatcatggtgatgacggccagcactgcggcgaggagggaactgatgattacggctggtcccatatgccgataggccagtgtccagagcatcagtgaggccacgccggtaagggcggggatgccggacaggccggaaagcagcaagccgaattgcaggttgcggtcggcgatgccgtagagcgcgaatttgcgtgggttcatggtggagccttcgccaagcatcatgagctggatgaagccgatgaagatggtcatggtcgcgccgaccagcacgacgactatgttgacgatgcctccggaaccaaggatgttcagcggaaagccatccgcgttcacggtgaagggcggcagtatgccgatgaaccatgcgagcacgccggtgccgatgatggtgccggccgcgagtacggcggaaaagacataggcgacggtctgccacgccgattttcgcagggtggcgagcgtgagcgtccagcgcaggcggaccagggtgatggcgctgctgatcatcggcgggcctcatcggtgggtatggcgggcgtggcggttgtaagcggaatgggctggaccggctggaccgaagttggtgcttgggcttgggcttgcccgccgtcgagccatgcgagatgggcggcttcgtggcggccgccgaccagttgcaggaagcggtcttcgagttcttcgccggcggcgacctcgtccaccgtgccggccgcgcacaccagaccgttgttgattacggccacatgcgtgcacatcttttcgaccaatgccatcacgtgcgaagagataatcaccgtgccgccggtcttcgcgtattcgatgaggatgtctttgaggttggcgctggacaccgggtccacggattcaaacggctcgtccaggaccagaatgcgcgggctatgaatcatcgcggaggccaggcagatcttcttggtcatgccggccgaataatcggtgaccatcgtgttggcggccccggccaagtcgaaagcattgagcaggtcctgggcgcgacgcgtggtctcatcgcggctcatgccgcgcagcatgccggagtagacgagcaattgcaaaccggtcagtcggtctaagatctggtcgggctggggcatgacgccgatcatgcgcttggccgtgttcacgtcgctccacacgtcatggcccaaaatcatggcggtgccggcgtccggtaccaatagaccggtcaccatattgagcgtggtggttttgccggcgccgttggggcctacaagtccatagaacgagccgaccggaatatcgagcgcgagtccgttgacggcgatcttccggtcgaagtgcttgaacaggccacgaatggacaccgccgcattcggattcggcggccatgcttgtggctgcggttgcgacggctgtgcaggcacgggggcggcagctggcatcatcggcggctgaaatccgacattcctttgagtattgtctaagctcatacatccactctaccccaccagccaaccctcagcgaagcaaacccccgggttgctgttggattgccccgctgagcagctccaactagcggactcggtcaacccttatgcgcgatgggcttccactgggctttggagaagagggcctggaaggagatcggcacgtagctgagaatgtaaatcgggaagctgagcacataggcgagcagctccttgttcgtggcaccgatctggtcgcgctcgacaatgatggtcaatgcagccaatgccatcaggcccaacaccgatatgatgatgccactggaccaactggccagcgattgcagctggctcggccaactcacgaagccacacgcggcgaacagcaagcccattaccgcgcgaatcacgcccaacacggtaaacggacacagcatcaaggtgaagtcgatgcaggagaaatcacgttcgcgaaccgcgcgtttcagcaatgccgagccataataacggaatacctgcaggaatcccttgctccaacgcaaacgctgacgccaactttgcgagaaggtaaccggctgctcgtcgtagagaatcgcagtaccgcaatagccgatgcggtcgccatgcagaatcgaatccatagtgaattcaagatcttcagtgagcagatggaacttccatcccttgttccgcttcatcacctcgcgggagaacatgaatcccgtaccgcccacatggcaagaggaaccgagaatcatacgcgagttagacaggaatcgcgattcacggatgaaccacagcgcagaaccagaagacacccagttatccgccagattcaccgaattacggtagctggtcagaatcttgaatccggagcagaacgccttgttcatttcctcgaagtagtgcttgtccagcttgttatcggcatcgaacacgaagtaggcctcataatcatcggccacaccgatgtcgagcatatgccccaacagatacgtcagcgcatatcccttgccaaccagctcaagattgtggcgttccaccacatggcagcccaaagaccgcaccacgtcggcggtgttgtcggtgcagttgtcggccaccagccagatgtcgatgaggttggacgggtaggtctgatcgcgaatcgacccaataaggttgccgatcactttttcttcgttgcgcgcggagatcagcacggcataccggttggtcatcggggcgtcggggaagcgcacgggcttggcgaacagggacatcacgatgcacagtccctgatatatcatgccggcaccgccgacgatcatcagaagaatatcgagtacggaaagcagagtcatcagcgccaccctgccctaggattgctggaggcagattgatcagactgcttggtttgcttgcgttgctcgggctgctcaggctgttcggcggaccgctcaggctgctcgggctgctcagactgctgcgtatccgcggcaccacgctgcggaatcgccgccgtatccggctcatcaaagcttgcatccgcaccgactgtattatcggcgttatcggtatcatcggcatccgactccggctcagtgccgcgtaatcccttgcgagcgctggaggatagcacgttcttcggaatcgccacggtggcggaatcgtccaaatcggattctttcgtctcgtgcgacggaatcgcataaatctgttcctgcagcaaacgcagttcctcattcatcggcacgcggttggtggatcccctggccgcacgcggcatgtgctcgccgattggctgcaatacgtgctcgccgaacgcctcggacgcctcgacgatcttggacttcttctccggagtcggatcgttcatcagcggtgagtcaatcagctcatagcgcttggtgtacgcacggaagatggcctgcagcgatgcggtgaccggcagcgccaggaacgcgccgaatgcgccgaacagcgagccgaacgccagcaccgagaggaaggcgacggccgcgttgatatccatcgtgcgctgcgaaatcctcggcgagagaatcaggttctcgatctgctggtagacgatgatgaacaccagcaccgccacggcgtacgtccacccgcggttgccccaagcgaacagcaccggcagcgcaccgccgatataggtgccgaccgtggggatgaactgggataccacgccgcagaacagggccaacggcagccagtagggcacatgcaggatctccaagaagatggcggtgcaggtggcgttgatcagcgccagaatcgaacgggagaacaggaaggacgaaatctggccttgggccacggtccacaccagcaggaatcgacgctgcgtgttgggggccagccactggcagaaggagcggcgcagctttgggccggcggcggagatgtaatacgtggtcattaccacggtcatgaggttcagcaggaaggagaacaggccacccaccgtactcatggcggtgccggcgaaatcggtgacccacgaggtctggatattgttgaagatttccatgccaagattgctgatttccggcatcttgaacgtggcgtgctggtccacgaactcacgaatctgcccatacattgccggcaaaccgcggaccatggcaatcatctgctgtacaaacatattgccgaacagcgtgagcagcacacccacgaccacggccacgcccaccagactgacggcggaagccacgccacgcttccagccatgagccaccagcgccaccaccagcggttcgacggccagcgccaggaacagcgagatgatgatgtcgaacaccagataggagatgtcgccccacgagcgccagcagaacatgaatacgatgacggcgagggccacatacagcagcgcgcggccgaaccattccggtggcctgcgggaatctcccttggcggggaacaaagtaccaaagtcgatacgattctcgtcgtccgggtctgccccggcttctgcggcaccgcttctcgacgtgtcggtgctgtttatgtttcgcacgcgttcgctcatggctccccattgtagcgaggggtttgaagctcggatacgccggcggcgtacacccgcttttctattgttgatgttatgctcaacgtttcgatcatcatcccagcgtggaacgaagccgaacgcatccgcgactgtctgctgaacgccactcgccagaccatcatgccgcatgaggtgctggtggtggacaatcgttctacggacaacacctgcgcgattgtcgaacagttcatcgccgaacatcccgaggccccggtcaaactgttgcaccagaacgatgaacaggggctgattcccacccgcaactttggcctgaacgccgcgaccggcgatgtgctgggccgttttgacgccgactgtatgatccggcctgactgggtggaggtggtctccggcatcttcaccgaagacccggccgcgatgggtgccactggtccggtgatgtattacgacatgccctcacgtcatttcgggttgaaaggcgacaattccttacgcaagcgaatctaccgtgccgatggcggccagccgctgctgttcggctcgaatatggccttgcgcgcttcggcctggcatcagatcgcgaatgaggtctgccgagataaggccgatgtgatgcacgaggatatcgatatttccctgcatctgatgggcaagaatctgaaaaccgtgtactcgccgcgcatgatcgccgcgatgagcgcgcgacggatggacacgtcgctgagttcattcctgaactacatgcgacgttttaagaatacgtttgatgcgcatccgcaacatacgcgcacgcataagccggaggtgttgttcaccgccatgtatccggcgatgcatatgttctacccggtgtggcagaaagtgctgaattccgcggatatcaatcctgctgaagccgcgtggatcaacgagcagatgaaactggcggaggcgcaaggcaagcagctgtacgacgagacccccaccgacgaagtctacgacgaaaagcacga

SEQ ID NO: 2202 - DNA, 3204 bp, Unknown
  R51_24m  MAG No. k141_25363
ccgcagcgcggactacgcatgccaggccgcgaagctgctgtccgaggtcatgcacgacttcaatccggaccagctgcgcgaacgcatggacagcatgcacgcgattgagaagtcggcggacgaggtgcgccacgacatgatggacgaactggtgaccgcgttcatcacgccgttcgaccgtgaggacatcgacgagcttggccacgtgctcgacgatgtgaccgacagcatcgaaggcgtactcaaccgcatgtactacgacaatgtgaccgacatgcgcgacgatgcggtccagatgtcggatatggtggtgcgcgccacggaaagcatctgtgagctggtcaacgaactgccgcgattccggcattccaagacgttgcgcgaactggtgttcgccatcaacacgatcgaaacggacgccgaccacctgttcatcgagtcgatgcgcacgctgcacaccacctgcaccgatccgctgcaggtgttcgcctggcatgacgtgtaccgtcacctcgaacagtgctccgacgactgcgagtgcgtggccaacaccatcgacagtatcgtcatgaaaaacagctgaggttggtttttcacaacctccctctgatgagccgagccgtgaagaaaacgccggaggtgtttttaggcaagggtgagtgacaacgagcgaataagaggtcagctgcaagctgtcctgaatcgcgttcgaggtggcatcgcgaagcgatgacggagagagatctacttgaccaaaggcccctcaccgatgggcgttgagccagaggatggcgagttgggtgcggttggtcaggccgagcttgtccagtatcgcgctgatgcgattgcggaccgtgccttcgctcaggaacagtctggcggcgatgtcgcggttatcgaggccctcggcgaccagcgcggtgatctcacgttcgcgctcgccaagcaggccctcgatggaatcggcggtatctccggaatcgtcggaatcggcaggattcggagtccgttcggtgagcttgccgagcacttccgcgccgagcaccacctgacctgccatcaccgcctgcagcgcaggcccgaccgccgccacatcctgtttgatgagatagcccttggcgccaagccccatcgcctgcgcgatatacgactggtccgcaaacgtggtcaggaacagtatgcgcgcggccgggtccgtggccagaacctcgcgcgcggcatccaaaccgctggtgcagggcatctgaatatcgatcagcagcacgtccggtcggctcgccggcgtctcgaaataacggcgcacggcggcgtcgccgtcatttgccgtccatagcacctcggccgtgccggtggccgtcagaatcgtctccaacgactggcagacgatcggatcatcatccacgattgcgattctcatcaatccctcgattccatggtccaacgcttcttcggcacggatacgaacacacgccagccgccctcatacggcccgcaaaccgcagtgccgccaagggcgcgcacgcgcgattcgatatccgccaaacccatgccgcgcatcagctcatcggccgaaccgcgcatatcggcaacactgtcggcggcgagtcgcgagccgacgcgcgtggcgcacatcgcacacaggcgggcagcggccgtccgggacccatcggactcggacacggccggccccggatcctgaatgaccaactgccagaacgcggggaagtcgcgcaacgtcacgctcgcctcgcgtgccgcactatgatgcaccacgttcgacaatgcctctcgaatcacggtcgcgaaacagcgcgagaccggcgcgggcgccttggcgatgtcgttggccagcgtcacggcgaaaccgggggagatgccgtcgaacgacgtgacggcatcatcgatctgcgcggcgaaatcagtgccgtcatcctcaagatcatgcaccgaacggcgcaccatcgtcatcgcatcatccaacgtcgcacccaacgtggcgaacccttgcgcggcgaccgtatcgttcgtcgcctcggccaccgtcctgccggcctgcgcctgcatgatcgcgcgggtcagcagatggcccacattgtcgtggatctcccgggcgatacgcgtgcgctcgccgagggtcgccatgcgaatcgactgggcgcgttcctcatcgatgtcggcgatgcgcgaacgagtggcccgcgaggattcgcgcgccctgtcctgcgcgtgcagcaacgcgcgccgcgcctcgtccgaggaggcgcgggcccggcccagaacgaatccaagcagggcgaccatcgtcatcaccagcgtctggagacggtcggtgccacgggcgaaccagagcgcgattggcggcaacacccatatccagcgcgcggcgaccgaaagccacggggccgaacgtattgcatcggcaagggaacggcgagaggccgcggtccgcgagacactgggggagcggccgcttgccgcagtccgtgccccagttcgggctccggtcgaggcgagggccggcagctgtgcagtatcgtaggcgatgagcggcatgaacgcgcaccatgaaggcactgccacggcgatgacgagatacgccgtacacaagacccaagaccattgcgcgggacgcagccattccaccaatccggcgacggaaacggccaacagcaggccggcgatgaacacgccatcgagccgcaccccgacaagccaggccaaagccaggcccaacacgagcagcaagcccttctcggccaacacgcgcatggcacctccccggctcgacgctcttccaccaccagtctagcggtgtgcggaacacgacgaacttgacgggcatgcggaattattcgcatgacggtccaagacaacgggtctacacttcccgaatagatgaggcacaagcgtcggatgttgtcgacacaaccgtaaagggatgataccgatgattgcgcaaagccacagggcgtccaactattcgatggacgagatcagcctgatgccggtcgataaggtgtacaaggccatgcagaccgacgccgaagggctgtaatgacaaatgtcacgcctgtacggccaagtcgtgacgtttgcttgtggcggcgtccggccccttcttgggatgatggaatcaccaaggaagggagtggctatggcaaccgacaacagagcttccgaacacgactcgacaaccaacccggc

SEQ ID NO: 2203 - DNA, 5663 bp, Unknown
  R51_24m  MAG No. k141_26521
aatctcacgatacgggtgaacatgggcgttcctcgccgcttaggccccgcacgttggtacgatggggcgttatgagtgagaacatcatgcgaatcattgacctgcgtggtcagaacctgtcccgtgccgaactgctcgccgcgatgccgcgtgctgcaatgggcacttccgaagccaccgatctggtgcgtccgattctggacgatgtcaaggaacgcggtgccgcggccctgcgcgacttcgaggagaagttcgatcacgtgcgcccgaaaaacctgcgcgtgccggtcgaggcgatcaaggacgccctgaccacgctcgactccgaagtgcgcgccgccatcgaggaatcggtgcgccgcgcccgcgccgtggccgccaaccaggtgccgaaggacttctacaccgacctcgccgaaggcgcccgcgtggccgaacgctggattccgattcagcgcgtcggcctgtatgtgcccggcggcaaggccgtctacccgagctccgtcatcatgaacgcggtgccggcccaggccgccggcgtcgaatcgttggccatcgccaccccgcccgcccgcgacaatgaggaaggcctgccgaacaagaccatcctcgccacctgcgccatcctcggtgttgacgaggtatacgcggtcggcggcgcccaggccatcgccatgttcgcatacggcgccaagggcagcgagccgcaggacggcgacatcctgtgcgatccggttgacaagatcaccggcccgggcaacatcttcgtggccaccgccaagtcactggtctccgcattcgtgggcatcgacgcggtcgccggccccactgaaatcggcatcatcgccgatgaaaccgccaacccgagcctgttggccgccgacctcatcggccaggccgagcatgatgagctcgccggttccgtgctgttcaccgactccaccgagattgccgacaaggtgcaggagaacctcaagtaccgcgtgccgcgtaccgagcacgccgagcgcgtccacacgtcgctgtccggcacccagtctgccatcgtgctgaccgacggtcttgaccagtccatcgacgcggccaacgcctacgccgccgaacaccttgagattcagaccaaggatgccgatgctgtcgtcaagcgcatcaagaacgccggtgccatcttccgcggcccgtactccccggtgccgctgggcgactacatgtccggttccaaccacgtgctgcccaccggcggcaccgcccgcttcgccgcaggcctcggcgtgcacacgttcatgaagccggtcgaagtcatcgaatacgacgaggaaggcctcaaggctctcgccgcccgcatcaacgccttcgcggtgtccgaggacctgcccgcccacggcgagtgcgtgctctcccgcttcgtcaaggatccgtatgacaaggccaccctgcgcgagcaggagaagggagccggtctgcgatgagctcgattcccgaaaacctgccgctgcgcaacgacctgatcggtgaggagccgtacggcgctccccagctggacgtgccggtgtgcctgaacgtcaacgagaacccgtatgcgccggacccggccgtatgcgacaccatcgccaagcgtgtgcgtgaaatcgcccccacactcaaccgatacccggaccgtgagcacattgaattgcgtcaggcattctccgattacctggcccgtgaatccggtacccgtctggacgtggacgagctgtggggcgcgaacggctccaacgagatcatgctccagctgttccaggctttcggcggcccgggccgcaccgcactcggtgccgacccgacgtactccatgtacccggagtacgctcgcgacaccttcaccggttggaagctcgcccaccgcaacgccgacttcacgttgaacgtcgacaaggtgcttgaggccatcgccgaggtcaagccctcgatggtgctgctcaccagtccgaacaacccgaccggcaccccgttgccgatggaggatatcgagcgtattctcgccgcctgcgaaaccgccgaagtggccggcgcgggtgagggcgtgcacccgattctcgtcatcgatgaagcgtacgtggaattccgcaagcccggcaccccgagcgccgtgagcctgatcaaggaccacccgaacctggccgtaagccgcaccatgagcaaggcctttgccttcgccggcgcgcgagtcggctacctagccgcatccaagggcatcatcgactgcgtgcgcatcgtacgtatgccgtaccacctgtccgccgtgacccaggccgccgcactggccgccttcgaacacaccgatgaacagctgagccgtgtcgagcatctgcgcgaaacccgcgaggccaccgccgcatggctcaaggaacagacctacaaggaccagccgcttgaagtggccgaatccggctcgaacttcctgctgttcggcgggcacttcgacaagcgcgaagccatcttcgacgagctcctgaagcgcggcgtactcatccgcgtggtcggaccggacggttggctgcgcgtgtgcatgggtaccgacgaggagatggaaaccttccgtaacgcccttgttgaagcgcttcgtatagtggaagcagcataagggacgtttctttccgattgcggcgagacccgaagcgattcgagtcccgccgcaatccaatatgacgaatcacacaggagacatgatggcaagaaccgcgcacatcgtccgcgaaaccagcgaatcacacatcgacctcgaactgaacctcgacggcaccggcaaaaccgatatcgatacatccgtgccgttctacaaccatatgatgaccgcgctcggcaagcattcgctgatcgacctgaccatccacgcccacggcgacaccgacatcgacgtgcaccacaccgtggaagatacggccatcgtgttcggcgaagctctgaagcgggccctcggcgacaagaaaggcatccgccgcttcgccgacgccaccgtgccgctcgacgaggcgctggccaaggccgtggtcgacatttccggccgcccgtactgcgtgtgcagcggcgagcccgaaggctacgaattctgcatgatcggcggccacttcaccggctctctggtccgccacgtcatggaatccatcgccttccacgccggcatctgcctgcacatgcaggtgctcgccggccgtgatccgcatcacatcgccgaagccgaattcaaggcgctggcccgtgcgctgcgcttcgccgtggaaatcgacccgcgtgtagacggcgtgcccagcaccaagggagccctgtgatggccgacgacaagttcgatccggacgaatcgcacttctccgacgaggagcttgaggccgcgctcgccggattcgagaaagaattcgcggacgattcggcatccggcgatgccagtgataccagtgatgccgataaaacggcggacgctgcttcagcgaagtccgattccgacgcgaatgatgatacggctgataaggcttccgctgattccggccagcctatgaccgacgacgtcaccggatcggtcgctgatgcggtgaatgaggccatggccgacgtggtcgacccctcgctcggcttcgacaacgaactcgctggactgttgggtaacaaggcgaaggtggcgctgatcgtcacccgtcttgcctccgctgaactgttggccgcgttctgccagctgtcggacatctccgccgcatgcgtcggtgccaatcagggggccgtcgcggtgctgaagaatctggacggcgacggcccggaagccgcagccaaggacctgaccaccgtggtatccggcatggccgtgattcttgcagtcaatcgtgccgacaagctcgaagtggccatgtacgtgcagggagaggccggacagagtttcgcgccgcccgtgctgttcacctccacaccgcgcttcgtcgaggacctgatgctcggcatcgtaaccctgaaccaactcaagacccaagggttcgaagtggtggattccgctggactcgaccatgaccaggcgatgcagattctcgccaaccataccaagcgtgggcgtggcggacgcggctcccgcatcgaatagacgccaaccaaccagtaggggataggagagaatatgaccacagcggttgttttcgattacggtttcggcaatgtacgttccatggtgcgtgcgctcgccaatcttggcgtcgacaccaccctcacctccgactaccggcagtcgttggaggccgacggtctggtcgtgccgggcgtgggcgcgttcgccgcatgcatggaaggactgaagaaggtcgacggcgaccgtgtgatctatgatcgcatccgcgccggctgcccggtgcttggcgtgtgcgtgggcgagcagatcatgttcgaacacggtctggagcacggggcccatgccgcgggcatcgggctgatcggcggaacggtgaacctgctggacgccgacgtggtgcctcacatgggatgggacacgatcgaggccgcccccgattcggtgctgctcaacggcgtggagaatgaacggttttacttcgtgcactcctacgccgcgatggaagtgaagccggcggatacgtcccgcttcgacattgatctgagcggtgcgcccgaacgcgtgagctggtgctcgtacggccggtcgcgtttcgtggccgcctacgaacacggcccgctgtccgccacgcaattccacccggaaaagtccggggacgctggctcccagctcctcaagaactggatcgccacgctgtaaaaagcatgaagctcccctctgacgagagagctcaaattatgtataagtaactgaagaaaggctcttcttatgtcgttgactctgctgcccgccgtcgatgtacgcgatggcaaggccgtgcgcctgcgccaaggcgaatccggttccgaaaccgattacggttcgccgtttgaggccgcccgtacctgggttgaggccggtgccgaatggattcacctggtcgatcttgatgccgctttcggtacgggcaacaatcgcgatcagctgcgtgagatcgttcatgagcttggcgaccgcgtgaacatcgaactgtccggcggcgtgcgcgatgacgcttcgttggacgcggcccttgaggccggtgccgcccgagtgaacatcggcaccgccgctttggagaacccggattggaccgcttcggtcatcaagaagtacggcgaccgtgtggctgttggtctggatgtgcgcggtcacacactggcggcgcgcggctggacgcgcgaaggcggcgacctgtttgagaccatgaagttccttgactccgtgggctgctcgcgttacgtggtcaccgacgtggccaaggacggcatgatgtccggcccgaacatccaactgctgcgtgaagtcgccgaacgcaccgacgccaaggtcacggcctccggtggtatctccaagctggacgatttgcgcgccatcaaggaactggccgagatcggcgtcgattccgccatcctcggcaagtcgttatacgcacgtgcgttcacgctccaggaagcgctcgcagtcgcgaagtaggcaaaggactcgccttagcgagactgttaagctacctttgctcagctatcgcttcactcaggcctcgcctacggacagccca

SEQ ID NO: 2204 - DNA, 12256 bp, Unknown
  R51_24m  MAG No. k141_26707
aatattctggccgggatagtcacgcttggtgagaatactcgcttcggtgaggttcggcatcaacacgtcggcaccatcggccagagcgcccattgcctcgcacagctccggtgtgtacgtggggtacatttcgccggcgtctcccatcaccgggtcaaccagacgcagcgcattcggatattcacggtagagacgctgaatgatcgccacctgatcgggggagccgaggaagcctgaatacacgccatccagttccacgtcttccttctgccaggcatccaagtaaccggagagaatatccgtggtgtcgtggaacgtgaacactgcatagcgcgtgtgcgccgagaacagggcggtcggcaccgggcacacatcgcagcctgcggccgagagaatcggaatcgcggcggtcagcgagcacttgccgtagccgcacatgtcgtgcacggcggccacgcgcggaatatagctcggatcacggtcatacagtgttacatcggtcatgtctgttcgaaccccttcaccatgttggcggaataattcattggcgatgtttgactgtagtcgttcgtcatgtaaaccatgtaaccgggcggcggaaaaaggaacagacgtcatcgccgagcgggcaaaccgtcttggtgacgggtggaacaagcaatcatcacggacacttgagccatgcgcgaaaggcatggtagcgatatcaccgtgaccgcagtcgaccgtgaaagcgcatgcgtgcggcccggcgtgtcgcgataatttcaacgactttttcgtgacttctgacagtctcccacgtcaatgatcccaaggctttataagcccttataggcaagcccgataacgttcggcttgcgccgcgcggcccaagcgtcgtaacttcataaccaacacctcgccaaccgcccgaacacggcaggcgggtggcaaggaaaaatcctcgcgacctagcacaaccaaggagaaagacccatggccgagaacaacaagaagtaccgttttgagaccctgcagctgcatgtgggccaggagcaggccgacccggccaccgactcccgtgcagtcccgatctacgccaccaccagctacgtcttccacaacttcgaccacgccgaggctcgcttcggtctcgctgacccgggcaacatctacggccgtttgaccaacaccacccagggtgtcttcgaggaccgcatcgccgcccttgaaggtggtaccgctggtctggccgtcgcttccggtgccgctgccgttgaatacgctgtgcgtaatatcacccagtccggtgaccacatcgtcgccgccaagaacatctacggtggaaccttcaacctgctgcgccacaccctgccgcgtgacggcatcaccaccaccttcgtttccgccgagaacccgcaggagttcgaggacgccatccaggagaacaccaagctcgtctacttcgagaccttcggcaacccgaacgctgatctgccggacttcgaggccatctccgaaatcgcccacaagcatcacctgccggtgatcgtggacaacaccttcgccactccgtacctgttccgcccgctggagcacggcgccgacgtggtggtcgagtccgccaccaagttcatcggcggccacggcaccaccctcggcggtgtgatcgtcgaaggcggcaagttcaactgggccgaggtgccgggcaagttcccgaccctgaccgagccggacccctcctaccacggcctgaacttctacgaggctctcggcggcaccgccttcgtgacccgtatccgcgccatcctgctgcgcgacaccggcgccaccctgtccccgttcgccgccttcctgctgctgcagggcaccgaaaccctgtccctgcgcgtcgagcgccacgtccagaacgcgctgaaggtcgtcgagtacctgcagaccgtgccggaagtcgagtccgtctcccacccgtccatcccgggccgtccggatcacgacctgtacgagaagtacttcccgaacggagcaggctccatcttcaccttcgatatcaagggcggaaaggatgcggctcgcgtcttcatcgacaatctgcacctgttctctctgcttgccaatgtggccgacgcaaagtccctcgtcatccacccggcttccaccacgcactcccaggagaccttggaagagctcgaggaccagggcattcaccagggcaccatccgcctgtccatcggcaccgagaacatcgaggatatcctcgatgacctgaagggcggcttcgaagcccttcgcgcttccggcttggccaagtgaggtcgacaggagggttgacggcccgatgagaaggggcgcgatgctaatggggtgcatcgcgaatcatcgagccgcatggggtgccttccgcctgatcgcttgacccaaggagtagaaagctcgcactgacgtcatgcagtgcgggctttcttgcgtctgtatgcctcacactgtttgcgcagaggcatgaatagtgtgagacctgagacgacataatcctcaaggatgagggccggcgcgtggcccctagcccaattcagtctggcgcacgatggggcgcgccgttatttcttcataagttggaatcgtcatccgggcataaggtccggccaaatatggagaggcattatgaacgtgcagaacccgtccgcatcgcgcggcatcgctattcaggccgtcgacttggtcaagaactacggcaccggcagcaatatggttcacgccctgcgtggcgtgaacgtgagtttcgaacgcggcaaattcaccgccatcatgggcccgtccggctccggcaaatccacgcttatgcacacgctcgccggcctcgactccgccacatccgggcatattcttttcggcggggcagacctgacccgcatggacgacaagcagctcaccttgctacgtcgccacaagatcggcttcatcttccaaagcttcaacctgttgcccatgttcaccgccgaacagaacatcctcatgccactgactctcgccggagacaagcccgaccacgcctggttcgacctgctcgtagaaaccttgggactcaagcaacggctcaaccatcgtccgaacgagctgtccggtggccagcagcagcgcgtggccatcgcccgcgcgctgattaccaagccgaagctggtgttcgctgacgagccgaccggcaaccttgactccgtctccagcgccgaagtgctcggcttcctgaagcgttcggtcaacgagcttggccaaaccatcgtcatggtcacgcacgatgcggtggccgcctcctacgccgaccgtgccatcgtattcgccgacggacagatcgtggccgatgaatcgaatcctactgccgaaacgatgaacgagctgcttatggccgaacgcgaacgcgccacgcgcactgccgtcaccagcacacgcgccgacacgctcgcccgtcttgccggcgtagaggatgtgcccaacctgcccatcaccgacgctccattgcccccagccgggagaaccggcaccatacgccatgcccgcgccgccgcacagcacactcgctgagccggaaagcgagagacaggatacccccatgttttccatcactctgaaacttatgaagaaaagcgccaggatgctgattccggcaggcatcgccatcctgatcggcactgcgttcatcgccgctaccttcctgttcggcaacgcgatgaacgatgcgcttgccgcccagaataccgcccagctcggcggcgcgaactacgtgatcagcccggatagcggcaaggacctgaccgataaggaccaggactacatctacacgcgcacggttaacgacttccagcttgaccgcatccgcgccaccaaaggcgtcaaggacgcacgtgccggctacgcgggttccgtgaccgtaacccgtggcaacaagcatgccagcagctacgtcatcaccaccgccacaaagcgcacgctgctgccggtcaccatcacgcaaggagaccagccggcggacagcaacgagatcgccctgaccaagtccgtagccgaccagctcggcgtcaaggtaggggaccgtgtgaccgtcaactcgcaggcggcgcagtatgcgggcaagaccggcgattcggtcggtaataccggtgacgctggtgatgagtcggcccagaacgccgatggcacgagctcgcacgacggtgattccgatgccgcgtccggcgcgtccgccccatccgacggcaccgacacggccgccgactccggcatgaccgtgcgcgtggtcggcctcaccgacgacccgaacggtgcctacgcctactacggtggcgcttccgtgctttccgacaacgtcatcaccgcaatggccggcagcaacgatttcggcaacctgcctgtctacctcgtctatctcgacatcgacgatgccagcgacacggccgcggcatccaccgtaaaacaggtcagcacactgctccctaagcatttcagcgtgcaatcccgtgccgcgctcgtcgaggaatccgtcaaaagcatgagctcgggcgaaaccagcatcaccaccatcttcctgctgagcttcggcatgctcgccatgctggtcgcggcactcgtcatcgccaacaccttccaagtgctcgtggcacagcgccgccgcacactcgccctgctgcgcaccatcggcgcgaacaaaagccagctgtatgtctccgtgctgtttgaagccggtgtgctgggactgatcgcctccgcactgggagtgggcctgggcatcggactcatggccgcactatgccagtcgggcctgatgaaagccaccggcatgaccatgcgactggtactatccggtccggtgttcacggtgcctatggcattcggcatcattatgacggtgattgcctcgctaggctccgcgcgttccgctaccgccgtcaccccgctggaagcgttgcgacccatcgaactgaccgacacgcgacgggccggtgtggtccgcgccgtgatttccatgctgctgattgtgggcggcgtggcactgtgcgcattctctgtatggcagatgtccgagaaaatcgccggacgtgattcaatggccgacaagcagtattcgctggtgctgctcgccgccatcatcggatgtgcattgatcttccttggactggtgctttccgccacgttctggctaccggtgctcatgcgcggcgtgggcgcgctggttgcactggccggtccgtccgccaaagtggcacatgcgaacattcagaagaacccgcgccgcgtggccgccaccggtgccgcactgcttatcggcgtgaccctggtctccaccatcgccaccggtgccgccagcgccaagcaaaccatgaacgaggcgctgaccacgcgctacagcgtcgacatgattgccgctggcgccgatatgactggcaaacaggccggcgaggcagccaaagtcaagggcgttcagagcagtatctacgcgccgacccgcatgatgaccatgaaggatgccgacggcaagagcctgagtgtgctggtcgtgggcgtggatggcgtcgacgcgctgcgcaaggtggtgcgctccgatttgtccggtgtgaccattgatggcgattccgtactgatgcccaagtattccgccgctacaggcaaggatattccgctggacaagagcgttacgttcacggctggagcggccgaagcacaagccgatgccgccaatggtccgtccggtaatgatgcgaacggcagcgccgaaaacggcaatggacaatccggcggcacacagacgctgacgctcaaaccgcggaaggtggactatcgccgcattgcctccaactacgccgcggtcgccttcgtggacgccagccacttcaccaacggtggaatcaaggccgacgggcatatcatgcttatgcgtattgacgccgagggcgcgggtgttgcgctgaacgacgtattcaccaacgtgcagaatgtgttctccgccagtgctggcgttaccgtgaccggtccggtggccgaacgtacgcaatgggagaccatgatcaacggcatgatggcattgttggtcggtttgattgcggtggctgtgctcatcgccttggtcggcgtagcgaacacgctgagtctgtcggtgatcgaacgcacacgcgaatccgccaccttgcgtgccatcggcatgacgcgcggccaactgcggcgctcgctggcggtggaggcgttgctgctttcgctcgtctccggcgtggtgggagtggtattgggtaccctgttcggctggctcggatcctacatggtgtttagtttgtacggcgacaccgtgttcccgttcgaatgggccaccaacggtgtggtgctcggcgtcgccgcgctcgccgctctgctggccagcgtggcacccgcccgccgggccgtcaaaacgccaccagttgaagccttggccgaagcgtagagcaataagctccctcatcagagggagcttttttgttacaccagcccgttatcgtacgcgaagactacagcctgtacgcggtcacgggcgttgattttggcgaggatatgcgccacgtgggttttgacggtgggaagggagataaagagcttgtccgcgatctcctgattgctcagaccatgggcgatctccaccagcacctcgcgttcacggtcggtaagcagatccagttcgggatcggtgtatgctgggcgtgacgtattggaaccgtcggaagcggccccggcaggggaggggatgccggtcatcgagccggcaccgttgccggccgcaccgccagagacgccgacggcggaaccgtacacggcaccggagcgcgcgacatcgccggtcagcgaaccatgctgcgcgtaaccgtcctgcatcatcttttcgatgagtcgcttggtggcggaaggcgcgataatcgcattgccttggaatacagtacgaatcgaattgagcaacgtttccggttcggtgtccttgagcaggaagcccgaggcgccggcattgatggccgccatcacatactcgtccaaatcgaacgtcgtcagaatgattacgcgcgtcggccggtcgtcagccgattcggccgagacggtcgcgtcggcggccgggctggccgaatcggccgcgttgtccggcgcggcggagagtgaggtaatacggctcgtggcctcaatgccatccatgccgggcatgcgcacatccatcagcaccacgtcgggatgcagggattccgccaacgccacggcttgggcgccgtcggacgcctgcccgaccacctccatatccggttgcgaaccaatgaccatggcaaaaccggcacgtaccagctcctggtcgtccgcaataatcacgcgaatgcttctgctctcgttcatgctctccactgtatccgtttcctatcggagcgccgctccataaacaccctgattgttccctgagttcttattgggcaagtctctcaccggggtaacgttcccgcgtgttgcatctgactatccaacgaagccgccggtcgcaactgcatatccggctgcacaccctcatgggcctcgtcgctgaacccggtttcacgcaacactctcaacagctgacgcatatgagccaatgcggcgcgcccccgagcaccaatcgcggcaaaagccgcttcaatctgcatactatcaggcgcaggttcggcgttgagcatcaccagtccctcgtcagcctgcgcaatcaccgattccagcgtggtcagtacttcggtttgcatcgccgcactaatacggttgcgctctaagttggccgccagcaccttttgccgctcctgctcggctcgcagcgcctcctcgcgtcgcaacagcaccagagcgtttgcgccacgcgaacggctccatcgagccatcgcaatgcaggcaaaaccgaccaacatgattcccgcgcccggcagcaagccggacaaaaccagcctccattttgagagcatggaactaccatcgggcaaaaacagatggaacagctgactgtatccattccacccagccatcaccttgatgcccgcaagccacgaatcggctgccagcgccacgctcacccagcgccaagcggactctcgtccatacaataccgccgaatacacggataccatcgcaaacatattgatggtcaaaatcgatggcaagaacaacagttgcacagcagacagcaccgccatcgccagcgcgctgccctctgggaagcggcgacggaacgccaaaggcgagagcataataatcgtcagcgttatagtcggcacgcggttcggcgaatacggggcattgccgatcatttgcaaatcgccatacgtggcggaatcaaatagcgcaatcagcacgatagtggcgataacgtccatcagaagatagtgacgctcggtccactgcgcaaatcgacccacccagttcgactcatgcgtatctccttggtcgagtactttggggcgcgcccgatccatcaatcctcgtatacgcgagataacggttagcaccggatcctccgtatcggtgccagactgtggggcggcaggggagagcggaatcgtagccgccacaataaagccaccattcggccctgggccggcctgcacgctgccacccaacgactcaatgcgttcgtgcataccaaccaatccgtatccgggcttatgaccgtctgctgcagacgtcgcgccacggccgttatcggatacggtaatcgacagcacatcgtttgaccagatttcatcgatggtggctttagcaccctcgcccgcatgtttgcgcgtattggtcagcgcttcctgcacaagacggaacacggcggtttccgcgtcggcggacagccggtcaggttgcgctttgccggtcatatgccgggacaccaccagatgaccgtcaaacagcgaatcgatgtcggcatatccggtactgccactcgcaccgaacacattgaacagacgctgcatatcatgctgcgcgcgttccgcttcatggcgaatcgtacccatcgtgtgcttggcgatggccagatcatgcgcacccgcataccggccgccatccgactgcacaataatcgtggagagcgtatgtgccaccacatcatgcatatcacgggcgatgcgtgcgcgttcggccagcgccgcgatgcgcgtctcctcggcctctttcgccacaatggaagcgttgcgctcgcgcatggccgccagcgtggcgttgcgcgctcgctgccacaaggccatgatgatgacgctcagcacgctcgattcgatgaacgccgcctccatgccgaagtcagcgagcatcttggccccgcagttgacggcgccgcttgcccccacgacgccggtgaccgccgggcatgtgggcatcgtgatggcatcggacagccagccgtcgcggatgacgcgcgaaccggaggaaggtccgtcgaacagcggacccacgttgaaagacaccgaccagaccatcgccgcgaccagtcccatgacgaacgccgtgacgatgaaccgccaggaatgtcggggattgccgtacagaatcaccgaatacaccatgatcagggcgtagaaatcgaaatacatgatcgccgggccgaacacaagatgcgtgatggtcagcgccacgaacagccaggccgccggctccgggcaatacctgcgcagcatcagcggcacgaagaccggcagcgaccacagcgtcatcgacgcctgagttgcgggaaacaatatgccgcccgtcgaatcagggctggtgacgccgatgaacggcacgcagccggcgatcagcgctgcggcgagcaacgtgtcccatagcagtgtgcgggtcgactcccgtgcgcaccatgccctcacgcgcgccataatctccataacgcgcaaggctagcgtgtccggcgacgaaccggtatcactcttcaggaggatttatggactagagtcttgaaccatgacaatgctgagcaaatactacgtgcccggactggccatagaggaccattccatcgatgttccgctcgactggaccggccatgagccaggccaagcgttcgacggcgaaaccatcaaactgttctatcgcgtggtcaccgcgcccgaacacgtgcatgacgacctgcccctgctgattttcctgcaaggcggtcccggcggtgccggcccgcgcctcaacagcccgacctccgacggatggatcgaggaggccatcaggcacttccgggtgatcctgcccgaccagcgcggcaccggccgctcctcgcgcgtggacacgcacgccatggcccgcatcgccgccgcgcacgacgatgatgccgcggccggcgcacgagcccaagccgactacctgaagaagttccttgccgattccatcgtgcgtgacttcgaacatctgcgcctgaccgaattcggtggccgcaagtgggtgacgatgggccaaagctacggcggcttcctgaccctgaccacactgtccctgttcccggccggcgtaatcgccagcttcaccaccggcggcatcccgcacgtgccggccgacgccgctgaagtgtacgagcataccttcccgcgcatggtgcgcaagacgactcagttctacgagcgctacccacaggacaaggagcgcgtggccgccatcgccgacaagctgccgactactgcggaagtcgccgaattcgttggcaaactcaccgattccgtactgaatccgatggctggtaccgatgtggagcatcgacttggcgtgatcgccggcatggccgcccacggcttcccgctgatgccgaacggcgacccgctcaccgtcgaacgcttccagtgcttgggatccgactttggcatgaagccgagcttcgagcgtgtccattggattcttgacgacgccttccttgatggcgatggttccgcttctgccgactcgccgttgtctgacgaatttttgaccaaagtgatgaacgccacgtcgtcgcgcccactgtactggccgctgcaggaattcatctacgccaacggcgagcttgacgagcccattcgttgggccgcccagcgcgtgcgcgatggcaagcccgaattcggtgctgatgaacgcccgctcaacttcactggcgaggccatgttcccgtggatgttcgaacaggaggccgcattgcgcccgttcaagccggccatggacctgctcatggaagacacgcacttcggcgtgatctatgacgaaggtcagctggcccgcaatgaggtgccgctgcaggccgccgtctacttcgacgacatgtacgtcgattccggcctgcagctcgacaccttgagccgcgtgggcaacagccactactggaccaccaacgaattcgagcatgacggtctgcacggctcgctcgtcttcaagcatctctatgacgaagccctcaaccggggcgacctcgaagaactgttctgactcaaggaagcaagctccctctgatgagggagctctgtatacatgcacgaaaggaaaacgtatgactcagaacctcaccatcggttttatcggatatggcaacatggcccaggccatcgcccaaggcttcgttgacgcgggcgtggtcgccggcggccagatggtcgcctgcgccgcccactacgacaagcttgagaagaccaccgccgaacttggcgtgcgtccgttgcacaatgcgctggaagtggtgacggccgccgacgtggtcatcatcgccatcaagccctaccagattgccgccgtcgtcaagccgctggccgacgaacttgccaggccgggcaagatcgtcgtctccatcgccgccggctggaatctcaagaagtaccaggacctgttcaccaccgaagacggcgaatccgtcgactcttcggacatccatatccagtgcaccattccgaacactccgatggccgtgggcaagggcgtgcttgtcaccgaatccgtcaacacactgaccgacgacgaaaccgaaaccttcgaaagcctgttcgggccgatcagcctcatcgagcgcgtggacaccgcgcatatgaacatcgccatggtggtggccggctgcgcgcccgccttcactgacatgtacatcgaggccttgggcgacgccggcgtgcagtacggtctgcagcgagccacggcctaccggcttgccgccaagatggtcgaaggtgtcggcgcgctctacatggccaccgaaacccatcccggtgccatgaaggacgccgtgtgctcgcccggcggcaccaccatcaagggcgtcgcccagctcgaaaaggacggtttccgcggc

SEQ ID NO: 2205 - DNA, 5102 bp, Unknown
  R51_24m  MAG No. k141_26847
gctgccagcagcaatcaatatcaagatttataaggagaacatcatgtcacgtaagaggccgcaaccgccggtcaagccgttcaagaagaagccgaacccgctgaaggccgccaaggtcaccgagatcgattacaaggacgtcgcgctgctgcgcaagttcatttccgatcgcggcaagattcgttcccgtcgtatcaccggcgtgaccgtgcaggaacagcgcgagctctccaaggcgatcaagaacgcccgcgagatggccctgctgccgtacgccacctcgggtcgctgagttagggaggctttgaacaatggctgaaaccaaggttattctcaccaagaccgtgtccaacctgggccactccggtgacgttgtcgacgtgaaggccggctacgcccgcaactacctgttcccgcagggcctcgctttcgcgtggaccaagggtgctgaggctcagatcaccgctatgaagcgcgctcgtctggccaaggccgtcgccacccgcgaggacgccgtcgccgccaaggccgccatcgagggcaccaccgtcgagatcgccgccaaggtgtccgagtccggcaagctgttcggtggtatctccaacgaggccatcgccatcgctctgtccgacaaggccgcggtgaacccgaaggccatcgaggtcgagaccatcaagaccaccggcgatttccccgccaaggtggccctccacccggagatcaccgcttccttcttcgtgaaggtcgtggccgagtgagtcattccggcctagtgctggaatcacacagaccaagagtctgagcttaagcatcatcccccgtgcggttcgcgccgcatgggggatttttgtattagcaaaaacgccggaaatagacgcgacacgccgagagttgcattcgcttcaaatctgagtatatttatcacctgttgcaaggaacacttcaacatctaaccaagcccctgtagctcagttggttagagcagctgactcttaatcagcgtgtccagggttcgaatccctgcgggggcacagacaaccggaatcgaaagattccggttttttgttttttccagcatcagtccgtagctggtgcggaaaggccgtcttcgcgcgtgacggccggacgtgtaaggagcggcgtcatgtctcagatattcgcgttcaccgtatccgaccccgaaggcatgcacgcccgcccagctggccggttggttgccaaagcgcgggaatatgagtcgaacatcaccgttgcctacggcggcaaatccgtggatgccaagcgtatcttcggtgttatgggacttgatgttcaacaaggtgacgaggttacggttcgggtgcagggcaacgatgaagctgtcgctgccgcagagttcgagcgattcctcaaggagcacctgtaatgagaacgatacagggcgtcggcgtatccgctggcattgctatcggcacggtccgcgtgctcgccgccgccgatcatgctgtagaacgccgcgtaatcgacgatccgcaggctgagatggatcgattccgcgcggcccgtgacatggccgtcgctcagctcaagcaactgcgtgacaacgtcgccgctgagttcggcgaaaacaaggccgagctgttcgacgcccatcggcttatgctccaggacccggactatgcgggatgcgtcgaaggtttgattgcgcaagacaaggtgaacgccgaatttgcggtgaagagcgtcgccgaacagttcgccgccatgttcgctgcgatggatagctcgaccatgcaggctcgagccgctgatgtcgaggatgtttctcgccgcgtgatgaacgtgctgcaaggcaaacgcgatagcacggcgcaggatggcagtatacaaggcgatgctgtgcagaacggtactgtgcagaacggtactgtgcagaacgggattgcgcagaacggcgaaagccacatcatcttcgcccaagatcttgctcccagcgagaccgcgcagctcgaccgcgctaaggttttgggcctcgtgaccgccaagggctcagcgaactcgcacaccgcgattctggcgcgcacgatgggcctgcccgccatcaccggtatcggcgacgccttcgacccgactgatgacggtcacgttgccgtaatcgacggcgccagcggtgcggtgttcgtcgacccggacgaggccacgctgaccgagtgccagcgcaggaaggccgaagctgaggaacacctgagcctactacggaagctcaaaggcaagcccaccgaaaccaagtccggtcagcgggtccacctgtacgccaacatcagccggccctctgacgtagccgccgtgctggccaacgatgctgagggcatcggcttgttccgcagtgagttcctgtatctggaacgcgaggactggccgaccgaggaatttcagttcgatgcatacagacaagtcgcacaggagatgggcgaccgtctggtcatcatccgcacactcgacatcggcgcggacaaacaggtcgactacttcaatctggaccacgaggataaccccgcgcttggttaccgggcaatccgcatctgcctgacccgcccggagattttcaaagtccagttacgcgcattgttgcgcgcctcagcatacggcaatatcgccattatgctgcccatgatcacctcggtgcaggaggtgcgcgacgccaagcggattcttgaagaagccaaaagcgagctgcgcggcgagcacaccgacttcaacgagagtatccagatcggcgtcatgatcgagacgcctgcgtcggtcatcatggccgacgagctggccgccgaagtcgatttcttctccatcggcaccaacgacctgacccagtacacgctggcctgtgaccgtcagaccccgagtctcgaacgctttgccgacccgcattcaccagctgtgctgcgcatgatccagatgactatcgaggctgcccatcgtcatggcatctggtgcggcatctgcggcgagcttggcgcagacctgagcctgaccgatacgttcctgtgcctaggaatcgacgaactgtccgtctcgcccaccagcgtcctacccctgcgcaacgtcattcgcaaccactgagagtcaaggtcgcttcggctgattccggtggcttttttgggcattgcattcggctggacattcgacatcgcatcctgccagcatttcgtcgtggggcaaagtgtacaatcgccacgtttgctttcgcgcccagcgtaaatcgcgtcgccggctccgcgaacggatttccaatcacacagaatgccgtgaacagtcagccatgcctgttgcgcggcgaagagaaaagaagaagcagtggaatactctctctttaccaagctggccgccgagttcttcggcaccgccattctgatgatcttcggcaacggctccgtggccaacgtcgagctcaagaacaccaagggtcaccacgccggctggttgaacatcgccatgggctacggcttcggcgtcatgttcccggtgcttatgttcggtagcgtctccggcgcgcacatcaacccggccatgaccatcgcccaggccgtcaacggcctgttcccgtggagcgacgtgctgccgtacatcgtcgcccagctgctcggcgccctgctcggccagttcatcgtctacctgacctactacccgcactacaaggagaccgaggacgccgacgccattctcggcaccttctgcaccaccgacgcggacaaccagaaggtcaactacttcctcaacgagatgttcggcaccctggtgctcgtcttcggcgccctgtgctgcctgtccctggcttggggcaagcaggattacgccgccgcctccatcgtcgtcggcttcattgtgtggggcctcgtgacctccatgggtggcccgaccggccctggcctgaacccggctcgcgacctcatgccgcgtctgctgcacgccattctgccgatcccgcacaagggctcctcccgctggggcgaggcctggatcccggtcgtggccccgatcatcggcgccatcatcggcgcttggctgttcgtgttcttcttcgccagctgattcgttgattgattcatatatgcaaatggcctccgctcgttttgggcggaggccattgtcgttgaatcaggtaaacgcagaggctactgctccaggaacacctgcggggccttcatgaagttcgtggcacagtgttcgccgcagaagtaataggacttgccctcatactcgcgcgtgatcgcgtcggcgttcaccgccacggtcatgccgcacaccgggtcggtggcggtttcgccgtccgcgggggcggtgtggtgcatgtgcattcccatatccatagtgttctccttgttggttggattattggattggtcagatgcgtgattggtgtgattcagcgtggtgcgatcgtcgatgatgacggttggctcgtgaggcgcgttggatgtggcggagccggtgatgttggcggcgttggctgattcggccgatccggctgattcgacatccgccgtgctgctgcccgagccagcggtgccatcgacaacgcccgcgttgatgttcgacccatgcagcctgttcgcgttcagcaccaggcacactgagctcaacgccatcgccagacccgcgatcatcgggctcaacagccagccggtgaacgggtagagcacgccggcggccaccggaatgccgatgacgttgtaaccgaacgcccagcccagattctcccgaatgttgcgcatcgtggcgttggacaggttgatggtcttgatgacgccgcgcaaatcgccgctcatcaaggtcacgtccgccgactgcatcgccacgtccgtgccggtgccgatggcgatgccgagatccgcctgggccagcgcgggggcgtcgttgatgccgtcgcccaccatcgcaatcagagtgcgggattgcgcggccgtgcgggaggcgccatccgcggacttggcggcggcctcgtcgcgttcgcgctgcagtttggcgatccagtaggccttgccgtccggcttgacctcgcagatcaccgtatcgatgccgacttcgcgggcgatgcgcccggctacctcggccttgtcgcccga

SEQ ID NO: 2206 - DNA, 7730 bp, Unknown
  R51_24m  MAG No. k141_27140
gttggagaatgttggagaatgacattcctagacgccggaaatcttacccgagatacgatgagaccccttgcaaacattggcgttcgcaaggggtctcaatgcctaatcagcgagtgattcagcacaccttccacatccagttgtgcgggtcttcgacttcgccgagctggatgccgagcagctcgtcgcgcagttcgcaggtgagcttgccggagccgccgtcggcgacggtgacgtcgaacttctcggacttgaagcgaccgatcggggtgatgatggcggcggtaccgcaagcgaacacctcggtgacttcaccggacttgatgtcctcgagcagctggtcgagggcgatcatggtctcgaccacgtcatggcccttgtcctgcagcagctgaatcagagagcgacgggtcacgcccggcagaatgttgccggtcagggacggggtctccacgtggccatccttgtgcacggccatcatgttcatgccaccgagctcttcaaggtaggtcttggtggcggcgtccacaaagcacacctgctcgcagccattctcaacacccttgtactcgccgagcagggaggcggcgtagttgccgccgcacttggcgaaaccagtgccgccagggccggtgcggaaccacttgtcttcaacccagatgctcaccggcttgacgccgcccgggaagtacgggccggacggagaggcgatcacgcagtagtcgacctcctgcggggcgcgcacgccgaggaacggctcggaagcgaacatgaacggacgcatgtacagcgtgtactcgcggcgggacggcacccagttggcgtcgcgcttgaccagcgcggccacggaaccgaggaagtcgtcaatcggcagctcaggcaggtacagacgcttggcggagttctggaaacgctcggcgttcgcatccgggcggaacagccaggtggagccgtcggcatgacggtaagccttgaggccctcgaagcactcctgtgcgtagtgcagcacggaagcacccgggtccatcttgagcggtgcgtacggttcgacgcggcggtcggaccagccttcgcccttggtccaagtcatgtgggtcatgttgtcggagaacacctggccgaaagccggcttgtcgatgagggactggcgcttctcatcggatgcggggttgtcgttcggcagtacggtgaacggttcggtgagcttgtcgagtgctgccggatcgtggtgcgtgttttcagtcatcactagctacttcttcttgactttggcggcccgaaagccaccatatggggtgtgtgctgtgcgcttgtggcgcgaactctgttgcatacttttgcacacccatgtgttactcgtgtggcagagttcacatggtgaaaaaacgaagaagcccacaccgttctcaacggctgcgggcttccacgtttcagttatgttctgaattgttcgctatcgaagcgaccgactcacttggcgtcggcagccggagcagcggcggcgtcagccggggcggcagcagcttccggagcggtggtggactcggtggcatcctccggcacctcgacggtgacgacggactcttccggatcctcgacgtccagctcgacgccctcaggcaggacgacatccttggcgaacaccttggtgccgtcggtcaggccttcgacgctgaccacgatcttctcgggcaggttggtgacgtcggcgcggaccttgagctcctgaatgtcgacgaacgccacggcagcacccttcggggtgccttccacgaacaccggcacctcgacgtcgatcttctcgccggccttgacctcgaggaagtcgatgtgctcgatgatgcgcttgaccgggttcttctgcacgtccttgacgacggccatcttggtgttgccgtcgaaggcgatggtgaacagggcgttggtgtgacgcagggccagggtggtctcgcgcatcggcaaggtcacgaaggcgggctcttcgccgccggcgtagatggtggccggaatcttgttggcaacgcgcagacgacgagcaacgcccttgccgaactcggaacgggcctcgccctcaagcttaatggtggtagccataatggatactccttgtatcttcgtttcgtactgtctcgctcagacgccacgacgcgccgaaagacaccctacaaggagtgaaatacgccgagtcgataacggaatctgtgtcatgtgtcagcatgcacacttccctcgccaaagcaacaattgtcaagtatacgccaaccccggactttgcgtaatgatgcttcgatgacactgcatataggccgtcccagctacgtcaacgtacggtttccgcgaaataatccctaactttgtgaagaacgtacgcttacccgttctcatcatacggttttcacgaaatcgttcgccatttcgtgaaaaccgtacgctcagcgacactcagtgtacggtctttcacgaagttggggatgatttcgaaaaataacgtacgatggtgagtaccgtatcgggaggttgatatgactcgttcggacgacgtcatcaatgaggatggccatgacgtcatcgccgcacacactcgcgttgtcaggggcatggctgcggcacttgccgcgatagccgccacaggagccggcgtcacagccgcggccgccaacgtcatgttcatgttcgcgctggacaccaaggccaaacgttcgatgttcaacatgccgcacgaggagacgccgaaaggcatcgaattcgacatgtccgagcagcttgaggccggccggtggttcgaggaggccatgcaatcggtcacgctgcgcagccatgatggatggaaactccacggctggctgttggacccggattgttccgacccacagccgcatctatacgcgatctgctgccatggctataccggagagcccgcggaaatggccaaatgggcgcatcgctatgcgcaactcggttttacggtcctgctacccgcgcagcgcgcccatgaattgagcgaagggcgttacgtgggtatgggattgctggaaagcgacgatctgttgggctgggtttcgctgatcaccgcagctgatccggatgcacgcattctgctgcatggcaattcgatgggcgccgccacggtgatgatggcggccggcgatgcgcgactcccccgcaacgtcgtcgccgcgatttccgattgcggatacagttccgtggtctcgcagtttacggataatgccgaggcgatgttccgtttgccgcactcgttggccgtgctgctggtcaaagtggccagtcatgtgtctagacgcaaagctggataccggtttgaggacgcctcctgtgtgaaggcattacggcacgcgactattccgatgatgttcattcatggcggagcggatacttttgtcaatccgaagtatctggacatcaattacaacgcctgcgccagcatcgaccgcgagaagctgctgattcccggcgccgaccacacgatgagcgccagcaccgatccggaccgctattggcgtcgcgttaacggctttgttaagcgggtgtttgggctgtagtagatatagaagcttggctcccctctgtgaggggagccaagaatggttacgcgagcagttccttgacggcggcgatgacggactgcagactcttcttcgcgtcaccgaacagcatctgggtgttgtcctcgaagtagagctcgttctggatgccggcgtagcccatgccgcggccacgcttcatgaccacgacgttctgggacttgtcgacgtcgagaatcggcatgccggagaccggggtgccggggcgacgagcggccgggttggtcacgtcgttggcgccgacgaccagagccacgttggcctgggggaactgcgggttgatctcatcgagatccacgagttcctcgtagggtacgttggcctcggccagcagcacgttcatgtgaccaggcatacggcctgcgaccgggtgaatggcgtaggagacttccacgccgtggcccttgagcagttcgccgaggtcagcgagctcgcgctgggcctgagcctgagccagaccgaagccgggaacgaagatgaccttctgcgcgtagacgagctgaacggccagatcgtccggcgtggtctccttcatggtgccttccagaccgtcgccagcagcggcggcgtcagcaccaccgccgaagccaccggccaagacggagagcagcggacggttcatggcctgagccatgaggatggacagggtcacacctgcggaaccgacgagtgcgccggccacgatcagggcaacgttgtcaatcgccagaccggacatggccacagccgtaccggtgcaggcgttgagcacagagatgacgacgggcatatcggcgccgccgattggaatcacgaagaccaagccgtagcacagggcgaacacggtggtcagaatcgaccacagcagacgctgttcgggctggacgcacagcatgaccagcgaggcgacagaccacacggcgaacagaatgttccatacgcccttgcccggcaggttcagcttcttgacccacttgatgccctgtagcttgccggcagcgatgagcgagccggtgaaggtcacagaaccgatgagaataccgagaccagcggtgatgagcaccacgatgtccggggtgccttccttggtcaggatgtcgttcagggccacgagtgcggcggcgccaccacccacggtattgaacacggagaccagctgcggcatatcggtcatcttcaccttcttggcggagacgacaccggctacggcaccgatcaggatgccgacgaccagcaccaccacggcgacaatgttcacgaagcccttggcgaagagcacgatgaacgccatgagcacggccacgaccatgccgaacgcggagatttggttaccctttcgggcggtcttcggcgagttcatgaaatgcagaccgaccacgaacaggacggcggagaacaggtagacgaaccatgcgacgatgtcgatggctccaacggttgcggaggtcattacttcgactcccccttcttctcgttcttgctggacttgaacatctcgagcatgcggtcagtgaccacataaccgccgacgacgttcatggtgccgagcactgcggccaggaagatgaacacgtaagccagcggggtgttggcctcggcggccacaatcaccacaccgacaatgacgatgccgtggatggagtttgcgccggacatcaacggcgtgtgcagggtggcgggcaccttgccgatgacctcgataccgataagcagcgcgaggacgaacagggtaatggaaacaacgagagtaggcataatattccttcttccttacttctcggactgctcggactcggcggcagcagccggagcccctgcgcgaccggcgaccaccagtgcgtcgtcgagctcttcggtaagatcctggccgagcttgccgtcacgcacgaagtgcacgagtatgtcagccacgttacgtgaaagcaggttggacgcggtggtggccacaccggaggccaggtacggggcgccaatcagcttgacgccaccctcggtgacctgttcgcctacggcggacccctcgacgttgccaccaagatcagaagcggcgcagtccacaatcacggcaccgcgcttgagaccgttgacaccggccgcagtgagcagcaccggaggcttgcggcccggaaccttggcggtggtgatgatgatgtcgaagccagcggccttctcatcgacagccgcctgctgctgggcctgctcttcgggggtcagcgcacgagcgtaaccaccctcgtcctggcccttggaaaagtcaagtcccagatcaaggaacttggcgcccagggattcgacctcaccttgagaagcgggacgcacgtcgtatgcagtgacgaccgcaccaaggcgcttcaatgtaccgatggcctgcagaccggcgatacctgcaccgagcaccagagccttggccgggcgaatcgtgccggcagcagtggtcatcatcggcaggaatgcgccataggcatcggcggcggtgatagcggccttgtatcccatgacggagttctgcgaggtcatctcatccatggactgggcgctggaaagcttgcggggcagcttctcgatggcgataccaaccagaccggcctgctcgagtgcggccacgtaatcggcgtcggtaaaggaaccgagcataccaatcacccactggcctgccttgagcttgctcacgatatcggtggacggacggtccacgaaaccgagcgcgtcggcttgagcgagcacttcgtcacggctggtcacctttgcgccggccttttcgtaatcctcatcggtgtattcggcggcaatgccggcaccggtctcaataatcgaggagactccactcctcttcagccgggtgacgatatccggcgtcaacgcgacgcgggattccgtttcagacgtttcattcaaaacgccgaacaccacggtggcttctgggttttgcgccatgagagccctttcttgttctactttgaatggacatggttatccgaggcgcaattgtagccgaagagtgaaggatatgggcgattcgactcgttaggcggaacaatcggggcaaaagacccgcatttttcgtcttcgcatccctgctgcgtcaactcgattggatgacatctaggcagtagtcgaacgatctccaaccactatcggcagtctgttacccaacaatcagagcgtcagtgtccatccaccacatagaacctcccaaaacctacggttgcgtaggcttttcctacggttgcgtaaggtgacgagttcgatgtgaacgattacaatctaaggtttgagagcgttcggcttatgctcgaacggcactgaaaggtttttacaggagcaagagttgtcggttatcaattcctttacgcagcacaccatcaatctgacccgcaaggcactcaggttgggatccgacttcgttcacccggttcacgacgacactccggacgagcccgattatctgtccaatgccgatgtgccgcaggaagccaacatcgaactgccgcacagcgacgattgggatgacggccatctgaccgtcaccgacatcgacccggaaaccggactgctcaccacgtccactgccggcaatccgcctctggacgacggcacgtccatctacgacctgtatgcggatcgcgccaagcgcatgggtgacgaaccgctgtatacctacaagtccgacaacgaatgggtgaccgtcaccgccaatgagttcctcgccgaagtgcgtgccgtggccaagggcctgctgcactacggcatcaagaagggcgacggcgtggcgttcatgtgccgcacctcctatgactgggatctgaccgatgcggccatcatggcctgcggcggcgtgctggccaccatctacgacaccgactcggccgaacagatccgcaatatcgtcaacaattctgacgcgcgtctgctcatcgtgcaggattccgccatgcgagagaaggcggaaggcgccgtggaggaatgcccctcactcgagcgcatcctatgcatcgagaccggcgcgcttgatgagatcaaggcctatggtgccggcatctcggacgaggaactggatgagcgcattgattcggtcaagaaaaccgatctgtgctccattgtgtacacctctggttccaccgccgcgccgaagggcgtggagatgaccca

SEQ ID NO: 2207 - DNA, 9856 bp, Unknown
  R51_24m  MAG No. k141_27628
actgagctacagagccagtgaacagtcgaaagcccggacaaaaccgggcttcataaccattccagcgaccccggccggacttgaaccggtgacctccgccgtgacagggcggcgctctaaccaactgagctacggggccatatgcttgtttgcaagcaacgagtagatatattacagagttctgggcgatatgcaagttcggcgtgtcgcagcgcccgcagagcctcccaggcaggcccgaacaccaccgaggatgaacctgaatcccagtatttccagcacttcccgcacctaccctatcagcgccgccaacggcatgatcgcgagactggtgaaggcggagtcgccgtaatccttgtagacacaatcgccgttgatgcagtacgacccgttccaggtttccggatgattcaccatgtatacccccaccgtgatcgcaagaatgatggcgatgataacgatcacgatgtcaatcgcactgatgacgatgcccgctatggcgagcgccttgccgcgctcctgcgtgcggttgatctgccgcagggcgatgatcgagagaatcagtccggccgggcagaacacgaacgacaggacgaacccgacaatcgacatcgtgttccatcgatcgttcggcgcatagtacgccggcacgccataggggttcgcgccatacggaggatacggaggatattgcgcagcgccatagggagccccgtactgtggctgctgggtgccataccccggtgctccatagctgccggtctggctgtgctgaggctggccataccctggctggcccgagtacccggcctgaccataatccggctgaccatactcaccctgaccatacggcggcacctgaccatccgcggcaccggcacccggagcccacgaaccatcgcccgcctgctcatacccggcctgcgtcggcacctgcccgtcattaccgtcagtcggcatggcacttggcgtattcgatgacatctcaggactccttcggtcgctatcgttcccgccgccgctcaccgcccggcgctacgcccagtatatcctgtcaacgctttcatctcaacgccaaggcatcacagcgccatccccgaaccggcgcaatacgatcggacagaccagggccggccgcaccgccccatccgcagacgaagcgacgcgaaccggccccgtattcggtcgagccaccattcagacggcggtacgtccggccataagccgaccgtcaacgcccagcagcccgaccggccacccagtcacccggccacccgttcagctgacctgcttccaggtggcgacgtcgatgtggtgctcggggttggcctgccacgcatcccacgcggacttgacgatgtcctccacgtcgtacttggcgtgccagcccagctcctcgttgatgcgcttcggagagccgatcaggtgtggcgggtcgcctgcgcgacgggccatcacggcctcggtgaacggcaggcccgtgaccttcttgacctcgtcgacgatctggcgcacggaggtgccctcgccggtacccacattgaaggcgtcgtacttgcgctcgtcgcggtcaaggtacttcagcgcggcgatgtgagcgtcggccaggtcggagacgtgaatgtagtcgcgcacgcaggtgccgtccggggtcgggtagtcgtcgccgaagatggccggtgccttgcccttcttcaggcggtcgaacagcatcgggatgaggttgaggatcgcggggtcctccagctccaccggaccgcatccggccacgttgaagtagcgcagcgcgcagaagcggatgccgaacggctgctcgcaggcgcgggccatccactcgccgaacagcttggtctggccgtaggggttgatcggcagcatcgggacaacgtcctcgggcaccacgtcgaccgacggcacgccgtaggtggcggcggaggacgagaagacgagcttcttggcgttcttggactgggtcatgccggtgagcacgttgagcatgccgttgatgttctgctggtagtaccacagcggcttctcgacggattcgccgacctgcttgcgcgcggcgaagtggatgacggaatcgacgtcttcggcgtcgaggatctcggcgaggcggtcgccggcgcccggcgcggcgatatccatgccatacaaccgcgcgccttcgatgcgggcgggctttccgtagctcagatcgtcgacgacgacaacgcgttcgccggcttgatggagcgcatggacgacgtgggcaccgatgtatccgcacccaccggtaacgagaactgtcatgtctgtcctttcgtgaccgtgagcataaccatcggcatccgcgacgactgaccataaccaatggttaacgatagttgaatgtttgattatgctcgcttttgttatttttccgaacagttttatcgtagcacatgaacataagagaacaaaatatgttcattgaaacattaccgacattccagaccatgcacagatgacaggcgagacggcccatcgaagcacggcggccacgaaggaggtcaacggccccgggataatatggcacataccacgaccgaccagaaacgaggaaaccgtgccagagcagatcgaacagccgactttcaccccgcgtccggtactgtcgttcgtgcggcgatccggccgtctggacgcgcggctgcaacgcgcgtgggacaactacgccgacacgtatctgctggacatcaacgccggcgaggggtcgctggacgtgcgcgacgacttcacgctcgaccgcgacaccatcgccgtgacctggggcaacgccaatccgctgatcgtcgaaatcggcaccggacaaggcgagaacatcgtcgccgccgcggccgcgcaccccgacgtcaacttcctcgcgctggaggtgtacgaccccggcgtcgcgcacacgctgctgctcgccggcaagcagcagctcggcaaccttcgcatcgcgcaggtgaacgcgcccgaactactcgccgcgaccgcccccggctccatcgccgaggtctggacgttcttccccgacccttggccgaagatgaagcaccacaagcgccgcatcgtgcagccgcagctcgcgcagtccatccacggtgcgctagccgacggcggggcgtggcgcatcgcgaccgacatcgaagactacgccctgcacgtgcacgaggtgatggacgggcgcacggacttccgcaacgccggcacgatcgccgtcagcctgcccaccgggcacgtcggcaagggcaacgccgagctcgccgacgacatgccgcacgccgatttcaccgaatcggagcgattcgacgaccgggtgctcaccaatttcgaaaagaagggactcgccgcaggccgggtcatccacgacctcacctatatcgcggtgtgacgccgattacggcgtgtcgcggatttgcattatcgccgcagctcacgtaatgtatatcgagttgtcagcccccatcgtctaacggttaggacaccagactttcaatctgacaacgagagttcgactctctctgggggtacccaccggctccggtttccacgaggtatcgtggcccggagccttttgtttccaacggtttcaggccgtcagcttggccttcagctgctcgaacaggaaatcgtgcggtggtcgctgccaccaaagatgcacctaagttcccctctcccagcatctgacgcatgagcgtgtcgtccagcagggacgtcacgggcacgccgaagtagtcggccagcgccgcgatgtcggggatgctccacgtgttcttgttcttcatcttcgcgctgacgccgcccctggtcatcttcaggggttccgtgagcgccgtctgggacaggccgtgcgcggtgagcagcatgctgatgttccatacgatcaccttctgcaggtattcgcccgagttcgtcatccgtttctttatcgtcgtggtcatggcaatcgccctttcactgcttcgcaaacacatgttgatatgtccaacatctctggacacgatattagcactccgacttgcgaaaggcaaaatacttaattactatgtcaactgtgagtagacaaaagcatctttccgtactgtctccggtggctcgttggatggcgcagcagggtctgtcctgccgcggtctggccgcggagatggggcaatcgaagtcatcggttgcgggaaaggtgaacggctccctccattggcagcaggccgatctcgtctggctgtatcggatgaagggactgccgtcggatttcgtgctgggcaacgatgccgccctcgtgaacaggctgctgtctcctccggcaaaagaaggttccgcgcactaggcgcggaaccgaacgacaaccgaaggcgtctccgacccgtacatccgccaagattcccggccgccgacgtcttgtatcccaagtgaaggagggtcatcgccatgaccgattctaccaataccgccggcattcgcccggcatctgtcttcgagcctaatcgccggcgcgacgccgcgcggcggacgacgcgggccggcggcaacgtcgatctgcgcatcgcgaaggctcatgtgctgtccatgctcgcccacccgtcccggggctcgcgccgctgaggcgcgcgtccgcggaccgtttccccgataccggccgaaccatgtggtggttggtcgttgccgccgtgtgcgtgtccggcggcgttctctcgtatgcgttgtgccgcgccgcccgtctgggcgacgacatcggcgcgaggctgcgcgaacgccgcgaagcggacccggcgcatgacggcgggaaggtcgagcgatgagcagcagagccgagaactgggcatgggagcgcgacgacgtcaagggcatcaccaagttcgtgctggtgtatctggcccgccgcgcctattacgacgatggcgcagccgcgtggccgagcgtggagaccatcgcgttcaactgcgggtgctgtgagcgcaccgtgatccgttcgttgcaggagctggagcgcaagggctacatcaggcccggcgaccaggagatgtcggcgcgcaacccgcgcacccgcaagccgatcgccaagggacaccgctcgcgcgtgtgggacgtcgtcatagacagcgaccatcccgccgagaacatcgaggagaagccccggaacctggacgcgctgacggaaggcgacggcaagccggatccgatgaaggacaatttgtcacccgacggattgtcacccgaaccgaaggacgtggagacgaggacaaattgtcccggaatcttggacagaaagtcacccaatagacaagtgataaacaattctcccctcatccccttcggggatgctcccctcaacgccgaacaaacctccacgaaaccggtcgccggcccgaagcccgaacccgttccgacgaccgactggggcaaggccctgcctccaaggggctgcaggaacccgctgtggatgcccgaacccggcaagctgcccgaaccggtcgcggaacgcgccacccaagaggtgcgcgtgctcgacggcatccaccggcgcatgctcgccgtggaccagaggttcgacgctccggcgaccatggccgaccgcaaggccgtccactcgctgctgatcgacaggccgtacggcgagatcgtcgcgacgatggactgggcgtaccgcaaccgctactggctgccccgactcaccagcggcgccaggttcgccgcgaactacgtgcaactgcggctggaaatgctcacccatcccgacccgacgggcaaacgtgcgccggacgctccgctgccggtcgtcaaggaccccaaccgggcgataccggtcagctcgtcgtccgcgagccgtgtgccgatctacggggcggcgctgctgcgcacctcgctgtgccaggaacacatcgaaggcgtcatctcgcaggaggcgtgcccggtatgcgcgtacgacaaacgcaaccacgccacccacgacgtcgccggacggcgcaaggcgaagaccggcgcgtcggcggaggcggtggtgcggccatgagcggggacgggcagcgtcttgaggcgtggaagaaggccggcgaatgccgcgacttcccgcaaccatggtccgactacctgtggtcgctggagttcgagcaccgtcccggcgacgcgaaggcgttccactcggtcgccaaggccgtgtgcgaacgatgcccggtacgcgccgaatgcctggcctacgcggccagcggcggactcgaatggggcgtgtacggcggcaaggtgtgcaccgaccggcgcaggatcgcgcgcatggccgaagccgacggcgtcccctgccgggaccgcggcctgccgtggccgcaacgctggcggctgctcacggactggatacgcgcccaccggaacgtgttcgacgaagccaccggcgaggccagcgccgaacgccagcaacgacgcctgcgcgcacggggcaggacggccgatcgccccgccccgcatgagccgtcagacaatcaaacattcaaacaagcaggaatccaagcaatcagacaagcggacaatcaagcgaccgactgaccgggttcgcatgatatccggcagtcgcaaaggagaagaacgaatgcgcatcgccatagccaacgccaagggcggggtcgcgaagaccacgtccagcatctacatcgcctcggtcatcgtttccaggggcggcagggccgtcgtgtacgacgcggacccgcagtccagcgcgagcctgtgggccgcagccgcggaacagaccgcggaccccctgacgttcgacgtgctgcccgccaaccaggccacgctccgccagctcgccgcgggagccgacccggacgaatgggcgatcattgacgcgccgccgcagggaccgaccctggacatggccatcaaggcggccgacttcgtgatcgtgccggcgtcggactcgcccatggacctccagcaggcatggagcaccctcgacatggccaggatgagcacgcccgccgcgctgctgctggtcaaggccgaacgcaacacgaaggcgttccgcgacaccatggacgccctcaacgccatggacactccccggttcgacacgatcgtgccgaaggcccagtcctacaagcgttcgctcggcaccaacccgcaccagctgggcgaataccgcgacctcgtcacagaactccagcagatcgccggaaagcaggagtgagaccatgcagggcaactaccagccactggcacgaccggtaccgttcgacgacgtgctgcgccaacagaacaagacctccaaggccacgggcgaaccgttggtcatgctctcactgcgcatacccgtgtcgctcaagacccggctcaagaccacggccgccgcgcacgacctgcccatgcagcagctcctgcgcgacgccatcgaacgcgagctcgaccgactcgacagcgacgacgagccgtaacccgtcagacaatcaaacaatcaggcaatccgacaatccagcaggcaaacaagccaacaaccaaacattcaggcagtcaaacatgcagacgcgatcccgaaagccgatgcgtctgcggaaaggagacactatggactattcgatggaggtctccgtgctcggcgaccggatcagcatcggcgaggaggcgcacgtcatcaccctcggcgtgaacacgggattccccgcgggctccacggcgggactggcgtacacgctctcgccattgcaggcccgcgtgctcggcgcgcagatgcgcgcggccgcggacgccgcggaggggcatccgggcatgccgtccgacgaggaggtgaacgcggcggcgaaggtgttctgcggcggcgtgtggaacgggttcgaccccgccagcatgatgccgaccgaacagttcgaccggttctggggcgacggcgagggccaccagctctatctggagatcgcgcgccacgcgcttatcgccgcccgcatgtccatcctcgccgggcaaaacgaaagctgacaagcaaacaagcccgcatgcagacaatcaaacaatcaaacttgattgcatgcaggcaatcggacatgcaagcaatcaagcaagcaatcaagcaagccaacaatcaggaaagcaaacaatccaacaatcaggaacggagcagaaccatgaacgacaaccacaacgaaaacgaggagcccttcgacggcacgagcgaggattccacgctcgaagaccagatgagcgcgcacatcgcggccatcgccgccagcggcgtcgccgccgaagccgaagccctggccaaccggcaggccgatatggcggccaaggaacgccgtgaaaccagactggcaatcctcgccgccattggcatcttcggcgccgtcatcgtttatatcattactcacattgctgaaaatcattagaatgattaaagtaaagagaaacgagtatggccctacaccttaaaaatctaatctacaaatcattgcttccgataattgaattcatttctttgttgagtaggtatatatcaaattaaattaccatttgagtataaatcaattcaaccatatcagaatagggttcttccactcttactcaagagggaaacggaagaaccctatgtagaaattaggttctgttaaattagaatcgacgtgaatgatcaattcgtttcccaaggttgttggcgttcctgggaacgccaacaaccagacgtgttgccgatgtcaaagttgatttgacagaaccaaggattaagcaatcatacgattgggtctttgctcaaagcgattggcggcaataccccagtgcataccttcatcatctaatccatcggaccagtaatctagatatctaaatggagctcccaactcactggccaagccaatagaatctattttcagtccttgatctgtcttaaatccgtatgccgatgtaatcatctgtttcagcaatagcggattctcgattccgacgggtacaggttcttgcttcttccatcctttgcctgatagttgtatgttgagggaggtgtacctctgccgatcgatgattcctaaattgtgagaacgtgagataagcgcagcaatggaaatgccccatcctgccttaattggaagaaaatcgcgcaacgacaaattggatttaagaaccaagcgagcatctaattgcgaaatcagaaaagctccagcaaatatatgggcttcacgctccactaattgcggtgaatcaggtttacgataacgatgcaagatcagatgaccaagttcatgggctttagtaaagcgtaaacgatcgcctcctaatgcaccattacctaaatatccaatacacatggcatgccactgtgacgaaggcgcagtcactccctcgctagtcaaatttgccccgccgcgcatattcaatgatctcatcggagaaacaatgattccggcccgctcgattgcgcgggttacgttcggaacggcaccatcaggctttaatccgaggcattcacgtgttcggatagccaatctctctattttctcttcggagagcgattgttcgtgtggagctatttcatcaatccatgcggctggattttttttcatcttcagcacatgacataatttttgaattacatccatgagtaatgagtactccgtagaaaccgaattcaattcacccatagatgatctggatgtttttcgatatgtaagttcggataatgggataaccgttccagattcctcgaaataagaaatggggtagtctagagcgccggataatttcaccgcatctgattcattaaaggaaataatgccattctgaagcttgctgagctttgcctgggatagtccagaacgagtggacaactccttctgagtgacgccctccaagcgtcgtgccagtgcaatcctttctggattgaaag

SEQ ID NO: 2208 - DNA, 2712 bp, Unknown
  R51_24m  MAG No. k141_27779
cggtcttcaagcgtggcacaccgcgagaacaggaatgagcgcccctccatgtacgcacgatcagcggtgcgtgagaccacggttttcaccgaggtgaccgcctcgatggagcgccacacatataccggagttgacacgaaaccatcggtctcagaatcctccatccgatgccccaacgcctccctgcctaggcgtgagagatcgtcgccgatgcgaaccgactcggaaacgacgcgcgctcgcgtcgaatccgggttcgctttacgcagggacaccttgtattcaaggtagctgggcttctgttttcccccgatgaggagcgtcgccgtcaaggttgcaagaccggtgctgacgctaatggcatcgccggcggtgtccggcagcatattcccggatagcagcgcgcgcagtatcccgatggcatcgataacggtggtcttgcctgatccattctgtccatagatacccgttacgctgccgccagcgggcagatcgtcaaaatccaagacgccgtgcgatatgttcctcatgttgtctagaacaagcctttgtaaacgaatcatcgcattaccgttctttaaaagtcataataatcaatttataattgaaatacatgattattgtacaacataagatatattttcgccaccaaatctcgcaatcggtattcattgattgcgctgtcagtgacctatcggcggcctgtcaatggcctatcagtgcccttgcttccggtacttttcctcagtcccggctttatccggcatccaccagctttcgtgcgcgcggtaccagtcgatggtcgcggccaaaccttcctcgaaatcggtgtactttggcacccagccgagctcggtctgaagtttggtggcgtcgatggcatagcgcttatcgccaccggggcggtcgttcacatggtcgaagtcattggcgtcacgacccatgagcttcagaatcatgcgcaacacatcaatgttgttgtattcgccattggctcccacgaggtaggtttccccgatgcggcctcgggtgagaatcgtccagatggcactgcagtgatcttccacactgatccagtcgcgcacagccagaccttgcccgtagagtttcgggcgaatgccggcaagaatgttcgtgatctggcggggaatgaacttctccacgtgctgataggggccgtagttattgctgcaattgctgatggtggttttgagtccgtgcgtgcggtgccaggcgcgcaccaagtggtcgctggcggccttggacgccgaatacgggctggacggtttgtaagggctgagctcggtgaatttgcgctgttcgtccagagccagatcgccatacacttcgtcggtgctgatgtggtggaatcgaatatcgtggcggcgggcggcctcgagcaacacgtacgtgccggtcacgttcgtgttgaggaatggggaggcgtcgagaatcgaattatcgttatgcgattcggcggcgaagtgcacaatggcgtcaatcgggggtactgcggctgcagagcgttggttcagcccagaaaacagggattccacaagctcggcatcgcaaatattgccatgcacaaaggtcaggttcgcggccggcacaccatcgagattctcgcgtttgccggcatacgtgagcgcatccagaacagtcatgtggacctgcggatggttgcgcgccacccagtgcacgaagttcgcgccgatgaaccctgcgccaccggtgaccagaatgtgttgcggcgcgaatgatgggttggttgcttcgttggatgctttgttgactgcttcgttggttgagtcgagggcctgttcggaattgctcatatctaccaatcgtaacctgaggtttgcctgagtgcgggggcttatattggtggttgcgttgttctgcactctgtctttgtggcggcgaacgggtccgggcaaagacgcagaaatgtaagaacatgccatcgttttgccttgagtctgtcgtctggtcttggattgtgtccagtctgctggtaagtctaggaagattgccgatttgcaattgggtgagtaagatattttctcggaaatcgaacataataattgatatattgactttatgaaagggaatgcgcgcatgccggaaactactcaatacccagacctagtcattgtcggcgcgggcctgttcggtctgacggtggcgcagcaggcggtggagcatgcgggtgcccgtgtgcatatcatcgacgtgcgtgatcacatcggcggcaacgcgtactcgtacttcgatgaggagaccggcgcggagatccacaagtatggcgcgcacctgttccacacgtccaataagcgtgtgtgggactacgtcaatcgtttcacgagcttcacgaactatgtgcaccgcgtgtatgccacgcatgacggcgaggtctatccgctgccgatcaacctgggcaccatcaaccagttcttccatgcgcattacacgccggccgaggcgcagaggcttatcgccgggcaggcgggcgagctggccggcaccgatccgcagaacctcaacgacaagggcatccagctcatcggccgtcccctgtacgaggcgttcatcaagaactacacgggcaagcagtggcagaccgaccctgccgagctgccggcggccatcatcaagcgcctgccggtgcgcttcaactacgacaaccgctacttcaaggacacgtgggagggc

SEQ ID NO: 2209 - DNA, 5433 bp, Unknown
  R51_24m  MAG No. k141_28875
tgaaatcagttgtgcgaattggggcggcgctggtgcttgcgaatcagatattcctgactgtcgaccagcgggcggccctcgtcgtccttggtgtgcagcacatacgtgccgtcgggctgcatgtgccagctcatggtggagtcggccatctgcaggtccacgtacttgatgagcccgtcgacctgctccggggcggtgacacgcaccagagcctccacacggcggtcaaggttacggtgcatgaggtcagccgaaccgatgtagacctccgggccggaagccggaccctcgccgatctgcgggccgtccgcattgcagaaggcgtagatgcgggagtgctccaggaagcggccgagaatcgaacgcacgcggatgttctcggacaggccgggaacgccgggcttcagagcgcagatgccgcgttcgacgatgtcgatcttcacgccggcctgagaggcacggtacaaggcgtcgatggtcttctcgtccacgatggagttgaccttgatcttgatccaggcctccttgccagcgcgggcggcgtcctcctcgcggcggatgcgctggattagaccggtgcgcacggtgcgcggggccaccagcagacggtggaagctggactttggcgcgtaaccggagagctggttgaacagacgagtcagatcctggccgaccaccgggtcgcaggtcagcagacccagatcggtgtacagtcgcgcggtcttcgggttgtagttaccggtgcctacgtggcagtagcggcgtagaccgtccgcttcctgacgcacgacctcgatgagcttgcagtgggtcttcaagcccacgatgccgtacaccacgtgcacgccggcgcgttcgagcttgcgggcccacgcgatgttggcgtcctcgtcgaaacgagccttgatttccaccaaagccagcacctgcttgccggcatgagcggcgtcgatcagggcgtcgatgatcggcgagttggagctggtgcggtacagggtctgcttgatggccagcaccttcgggtccgcggcggcctgcgcaaggaaggcctgcacggaagtggagaaggagtcataggggtgatgcagcaggatgtcgcgctcgcggatggcggcgaaaatgtcctgtgcgcgggaggactcgacctcggcgatctgacggttcgtggtcggcacgaacggacggttcttcaggtccgggcggtccacgctgccgagctcaaagagcacggtcaggtccagcgggctgggcagacggtatacctcgtcctggctcacgccgagctggtcggcgagcagctgggagaggaacgggctagtggtgtccgtgatctccagacggatcggcggtccgaagcggcggcgcagcagctccttctccatggcgttgagcaggttctcggcgtcatcctcttccacgtcgatgtcctcgttacgagtcacgcggaaggagcgggcttccttgatgatcatgcccgggaacagggattccagatgcgcggcgatgagcttttccatggcgatgaagccgtaacgctcgtccttggactcctcgtcggtcatgtcgtccaccggcaccaggcgcggcaggttgcccgggatcttgacacgggcgaagtgcgacttgccggaggccgggttctccacaatcacggccaggttgatggaaccgccggaaatgtaggggaacgggtgggccggatccacggcgagcggcgtcaggaccgggaacacctgctggcggtagtagcgcgagagacgctcctgctcggaggaggtgagcttgtcccacgtcagcaggacgatgcgctccttctccaattccggcagaatggtgtcgatcgcgtaatgtgcgtgctcgtcttgcagacggtgtgcggtctcgctgatcgcgcgcagctgctgacgcgggctcaggccggcggcagacggcacggcgatgcccgagtcgatacggcgcttcaggccggcgacgcggaccatgaagaactcgtcaaggttcgaggcgaagatcgcggcgaagttggcgcgctcgagcaggggcatgtcttcgttctccgcgcattcgagcacgcgctggttgaacttgagccagctgagctcgcggtcgaagaaacggtccttgggcagcggtgcctcgccttcctgatcgacgcggcggtcgttgttgtcgttttcggcaatatgctctgcgatttggctgcgcagaattgccttcgagggtgcgtcaaatatctgtgccatagcttatatcgtaagctctggcgtggccggaaaacggctgaacgcgccagaattcaacgggtgttcatgttagttcggtgttggttggttctgagtgtgctagcgtgctcgcgacacgccgtgagcggcggtgaaacgaacgaaaccgaacatcagacgggttcgatgtgaacggttcagctcgttttccgatagccagaaagtgcgattgaacagttgtgataaaaaacgcacaacgactccctgcaggttgcgagaaacgggagtgatgaatagattatgaggtacaagaacaactgaacagagcagagcccacaaatagtgtatggtcacgaggactgttacgttggacgggcattggaaagacttaccgttacgacgatgatgttgtgcagagattctgctccagtagttgaacttgtagaaaaggcccgctccggcgggccttttcgtttgtgtgtacagtggagggcatgacggaaacacagcgtacgccagaggggatgtcgtcgaaaccccgtatcaagccggccgatgccgaagacggccgcccggtctctatctctgcgcgtctcggacgactgcaattccactattccggcaagttccgcgtgctgcagattgccgacattcaggatgggccgaaagtctccaaagacaccatcgccctgattgaggccagccttgatgccacacggcctgatctggtgattttctccggcaaccagatcgccggctacgatccggcctttgccaagagcttccgcaaacgccgttggtgcgaagaggcgattcctgaatctgcgttgaaccatacgcgtgaattggtgcgcaaggccatcggtcaatttacctctcctttggcgtcacggggcataccgtgggcggtgacctacggcaaccacgatttccagtgcggtttgagcaatgccgaactcgacggaatctaccgcgagtttcccggttgcatcaatccgccgagtgatgcgctggccaagcagaccgtatatatgtgtcataaggacggctcgcctgcggcaaccaatggtgaagaaaccgatgcgccgatttccgcgtccaccattcccggcacttttgcattgccggtgatggatgtggattgcacgcgcaacgtactgggactggtactggtgaattccggtgactatgcgcatggaggcggtttcggcacgccttcgcccgagacattggccttcctcaaggctttgcccgaacatatcggagccaaatcaatggtgttccagcacatgccgctgccggagtattaccaggtactcaaaccggtggccgccaatgcggctttcgccatgcagggctaccgcaagcatgcggatacctattatgtgctggacgaggatcgcactcaagccggcgggtatctgggggaaggcatttcctgcccggatgagtcggacgagtttgaggcgctgcgcgaggggtatttcggcgtcgtagctggtcatgatcatcgcaacggtttcgtcggcgaacatgagggtctgttgcttatcgctacgccaacctgcggattcaatacgtacggaccggctccggccaaacgtgccacgcgattgatcgaatttgatatccgtcacccttacgagccgcgtacgcaattgctggagtttggcgaactggtgggcaagcccagttccaaacgcgcctacacctatgcggtgaaccaaaccgcgcctggcgagggcgagggtgatgatttgctgcgcaagccgtcgctatggagccaactgtccggtttattcaggtaacccggtttattcaggtaactgttcctgatagaggcggaaagcggcgcgaagtattcgtatacgcgcgcggccggaggcgcggccgtataccggttccatatcccggcacaaagatatgctgacatacgatacaaatgataacatttgttgaataaagggttacgttttcgcgtctagggacgtgtgcttcggcacgcattcaaacaagcgcatcccttgcggtcactatctcacgatggttcgcgcgaagcgatgaaccgtcagtatgtgcggagttctggtatggtcacacgtttaacgcggttggcgacggcggtcgcgctggtcatcggcatgatcgcaccggtcgccacggccgccgccgtcgacggggggggggctgtcgatgccgcacaacagacgccggcgtgcggtcgtccttggaaccaggacgaacagggcgccatcgttgattccagcaagccttccggccgattggtcggctgcatcagcaatgccgcagtgcaatatcgattgcagaattcgacgcaatggcagaacgttcccgcggatgaacacggcaatgtctcgttcgattacagcacgaaaatagcccaattccgttttgacgcgcaattcgtcatacccaaaggaagcatcactgcagacaaccacgtattccgataccatatcgcgggattcaatggcaccggtaccgccatgtcgggcacgctcaacgacgatctcggcacgtacacgatcgctcccgacggattggtgaccatcgtcttcagtgagcacgccatcagcaagaacgccgccgccccactggacaatggccgattgtacatcgaagccgatcgcagcaaggtgaccggcaataatccagggcagaccgtattggatttcggcaacggccataccaccaccatcaccatgtaccgcagaagcggcagcacctccaagcaggtcgtcggcacgccgacgctgcaaccggacggaacgctcagtaccagatggcaggcgcaatacgtcaacacgggaaccatcgaccagccgatcgtgaggatcgaggattggttggcctatgagaacgttgatcaaccgaacgccggttccatctcgttaagccgaggatggtacacggctgagaacatcaacgatctgtaccaaacgttgaccacaacgatggggcacggcacgttgacggtatataaggtcacgctgccgaactacaagggcggacccgccgtcacatggccggccggcggattggccacgggaacctattggaaatgggttttccagccggattcgtattcgattcccgcagggcagacgttgacgttgcaatacaattcgacgttcgccaatgatgtgctgtatcccgcttcgaaaaacatttcgcggttcgtccgttccaa

SEQ ID NO: 2210 - DNA, 7649 bp, Unknown
  R51_24m  MAG No. k141_29749
gaaccgcaagatcacgacttacggcagtgatgtcaacaatcatcgaatcaacccgtctcacgccttatcggcgccggcatggccgagcacgtgcttcagcgggttcggcacttcggcgtccggccggcgcaggtacaacggttcgaccggcgtatcgggattacggttggcaaccagttccgcatcagtggcaaagatagcgagaccttgctccccttggtccaatacggattcatcggtgatgtcggcaagctgctcgattgcacccagcgcatccgcatatttgcgggccccatgacccacaacatccacgaccacatccacattgctgtcttctggcataagtccgtcgcggtacgtatgaacggcatcattcacgcgctgcgcaatggatgcagggtaatcgatatccatgtcaatcagagccgtcgccacggtttcgccatcgggatcgccaacgagggggtccgagtacaacgcaaaatagagttgcttgcggcgtgcgtcgtttacggcaagagtgagcacatggcatttatgagtatcgccgagagtgccggctttgccacggcgaatgagattccattgcacctgagactcaagaacattatggccgataagcgtcgctcccgttgcgaaagccagtgccttggccgtaacgataccggcacgcagaccagtaaagggggctggaccggtacccacaatgactgttgcaatgtcagatgctgggaacccggcctcctcgaccgcgcgcgcgatattgacctgcagtttctccacatgggtgcgcgaatcggtctctacaatgggatcgcgccccacaatgccgaccgtcgagccgaatgaggtgtcaatcaccaacgtgcaacccatgaatcctcctagtcgtaaagcctctagagagtgtacatcgaggagtctataggcgcatggcttactgcagatcgaacgcggcccatcgcttgccgactgggacgaatgcgacggtacgagtgccgttgctggtgagttcgccgtctgatccagcggatgcggcatcggaggaatcgagaggtcgatcgatatggatttcaagtcgttctggcgccaaggcggtggccatttgttcgccccactccataagcaccaccgtgttctcgccggggtcttcaagttcttcgtccaatcccagcgattccagctcgtccaacaaacgcccgatggcgtcctgccccggcgcataggctgagccgcccagacggtaggcatccacatgcaccagatgagacggagtgccgtcggcgaaatgcccgtcgagttcgcgggcaatggtgaatgtaggagacacgatgggttcggtaatgcccagccccgccccgaagccctgggcgaatgtggttttaccggcaccaagagggcctgagagcagcaatacatcgccgccgtgtaccattccggccacacgacggccgagctcctgcatggcctcgctggtgggagccgcaatagtgtgttcgctcataaatacccctttatcgacttttaccgacctttatgactgatgtcttcaatgcagcgttccagtgcatataccgggtcgccaccgtttgttttgctttgctcatccgcccaggcgagcatacggatgcaatgcgcgagtcctgccgaagtccagccgccaagttggcgcatcgcattcttcagcacccaaggattggttttcgcttcggcctgggaaatcgtgccggcccgtaccgccgaggctttggcaatggtacggagcttcatggccaacgcgccgatcagcgcgatgggatcggtcccttgttccacagctgcacgcatcatgacgatggcttctgcggttttgccttccacggccttgtctgccacggcaaaaccggtgacctgcggattggcggtcaaatactggttgacacggtcgaggcccatcggattatcgtcaaagtcgaaacacagttgctcgcacatggcggcgagttcgccggttttgccgccgagtacggataccagctgctgtgcggccatcggttcgactctacgaccatgtttctcgaattctccgagcacgaaattgagctgtgcatccggtttcttcaaatccggcacgtcctctttgcgagcgccggctttcaccagttggtcgatgattttgcgccctttgacgccgccctcgtgctggcagatcaccacgctggagccgttcggatccttggcggcctgcttggtgtacgccaccagagcttcggcgagcttgtcgtcggcattctgcaggttgacgagtttgaccacggcaacgtcggaaagcaacgatgggctgacggcttcatcgaaggcatactggtcggccgatgtggcgtcgagttcgatgaggtcggcgtcgggccgcgccttcaacgcctgcgcgcacagtgccttggtgcgcgcgtcgttcaaatacgagtcgcctccgggcaccacggttaccggtgcattcgctgctgttttcgtcatgcccccatctcgccacacaggttggacaatgacctgccggcatcacgattttgccggtgccgtcaagatagtggtattcggctgggattgcgatggttgctgcaccgaataccgcattggctattcggcttgccgccgcgtaaagaggcgtctcgtctcctcacaccagagactgaggcggacgcgccaagcggaaccgaagcgcacgccagacattccggcctcataacgacggacatgctggaggcaacggctgacgaacaccagtagcatgccgataccgatttccgccgccacaatcagcacggcacccgtaacgccgtctttccatgggatgacggccatcgtgctgccgcccagccacaacgccacccgttccatcaccagcgtgccccatgacgatatccacgcgaatacgccggccagccatggcgtgcaccatgcgcacgccagtgccatcaatcccgccatcgtggccaatcccacgaacggtgacaccagcaggttcgccggcacggacagcaacggcaattccggttccatcaacacctgaatcggcagggtgaacaattgcgcggccacggtcatcgccatcatttcggcgatgctgtgcggcatcgctcgctcaaagacaccggccagccgccccgcaaacagcacgatacccagtacggcggccgaagacaaggcgaatccgtagctggccgacatatccgggttcaccgccaatacaccgattatcgtccagcatagggcgctcaacgcttgcgtacgccgtcccatcgcatacgccaacgcacctatcaatcccatgatgaacgcgcgggtgaccgaatcactggggaacatcgccaatgccagcagcgcatatactccagagaccagcaacgccgtcagccgccgatcaagcagcatccacatgcataaccgacgcaccagtcctgccaccagtacgaagtggccgccggatacggccatgaggtgcatgatgccggaccggcggaactgattttccaacgtttgcgcatacgtgctgttgaccggcatcggaccggcatcgccgccgatataatcctggccaagcacacccatcgtcaatcccggcaccaacacacgcccctgatcggacaattgtccggtcacggtgaaaaacgcctcctgcatatgtgcgatcgcggcgagatgccacggcggagcccgcacctgcgctaccggctgttttccttccaagagcagccatagcggtatgcgtccatatcgcgcttgctgcaatacgcccgtcaacagatagaccgcgcctcgacgcaactgcccacaatacgattcatcggcgtatacgcgcacggcgaccgtggaacgtacgtccgcgccatccacagtgatgccgctcagccgtatgtccgtctgacaatcgtatgtgcgttggtccgaagcgatcacgggcgtcgtcaccgtggccatgacttcgtggtatgaactggattggcgagcttgtgcggaggcaggatcatgccaggcaatggtgtccgacgcgattgccgtcatactgccgatgcacgccaccgcgacgcatacggtcaatgttcccgtccacctgatccgcaggcggaaagacaccacgatcgtcgccgccacagcggcacatgacgccactgttataggtaatattcgtgtgacaggccattccatgccgattatggtgacgtcaatgccagctccggcatcggcctttgcctgaccggtgccgagtccatcagacatcctccatgcgaataatgcgtgcgctcccaggctcgccgcccacatcactatggcgatcggcagcatcctccaatcgcggctcccctgctcgcgcagtatccgatccctgctcatccgaccgtcacctgccctcgcatggtctccaacgtcttggagccgatgcctttgacatccagcagctgatcgactgatgcatacccgccaatcgccgtgcgatgatcaatgatccgctgagcggtaaccggcccaatacctttgatggattgcaattcctcagcggtggccgtgttgaggttgatgagaccatgcgtggaagcgccggcatcgctgccgtccgtctgcatgtgcggagattgcgtggtatccgattcggggttcgctgtggcatcggaatgctccgactgctgcggatccgtgcgtttctcgtccgtggtgttctgcgatggcatcgtctgatctccagcggagccgcccgtggtctgcatggcggtcggttgagacagcatggccatattcatcgactgctggaccagcaatgccaagctgatgccaagggcgacgatcagcagcaatatcacggccaaggcatgcccaatggtgaacgacaatcgcggctgatcccgggtgagtctggctgattctccgacggcatcggcggaacgtacgccaatcagatccgataacgcacgtttgtcacgggtcgcctgccgcaggccgctctgcgccctttgggacgggtggccggccggacgaatccgtgcatggccgggaggcggcggaggcgtcgtgggccgttccactcgcggttggggcatggcttcgctctgcctgctgaatgcgcgcaaacggttggcggcatggtctgcgcgatggttatgagaaacgcccatgcatccacgctgatggattcatgggcgtttgtccagctgaaacggggtatgtggttctagcttatgaagttatccacaattgaggtggggcgatatcgcacattggctacccctcagtcagctacgctgacagctcccctgacaaggggagcttagatggaatcactccgcggggacgatggagacgatcttcggggccttgacgatcaccttgcgcggctccttgccgccgagacggtcggcgacggcggccagcgcctgccgttcgaggtcggccgggtcgatgtcgaccggcacttcgagcttggcgcgcaccttgcccttgatctgcaccacggcggtcacggtgtcgtggcccacgtaacgctcgtcggccaccggccacggctcggcggacagggactcggggtggcccagcttgctccacatctcctcgcagatgtgcggggcgatcggggcgagcatcaggaccaacggctccactgcggcacgcggcacggccttcagacctgtcagatggttgttgagcacgatgagcttggcaatggcggtgttcggacgcatgccttccatttccgcggtcacttcggcgatcgtgttgttgagcagtttcagtgtcttctcatcgggcgcgtcctcggtcacgtgggcctcgccggtggtctcgtccaccacgttgcgccacaggcgctgcaggaagcgcatgccgccgaccacgttgcgggtgttccacgggcgagactcgtccagcggtcccatgctcatctcatacaggcggaaggtgtcggcaccgtagttctcgtacatgtagtccggggtcacgatgttcttgagggacttgcccatcttgccgaattcgcggttggcgtgttcgccgttccaggtgaacgtcggctcgccggaggcgtcggccggcccttccacgacctcgtccgccggcacgtactggccgcggtcgtcggtataggcgtaggcctggatcatgccctggttgaacagcttgtggaacggctcggccgaatccacatagcccagatcgaagagcaccttgtgccagaaacgggagtagagcaggtggagcacagcgtgttcgacgccgccgatgtacaggtccacaccgccttcatcacccgagtacttgttgtggttcgggcccatccagtagtcgaactcgtccttctccaccatgtgcttggtgtcggtcgggtcgatgtaacgcatgtagtaccagcaggagccggcccagttcggcatggtgttggtgtcgcggtagtaggtcttcttgccgtcgcccaagtcgagctcgaccttgacccagtcctcattgcggctcaacggtgcctccgggttggactcggcgtccatcggatcgaaggtgcgcggctcgtagtcgggcacgtcgggcaggttgattggcaatgcggaatccggcagcaggtgcggggtgccgtcttcgccgtacacgatcgggaagggctcgccccagtagcgctggcgggagaacagccagtcgcgcagacggtagctcgcggcgcccttgcccacgccggcgttctccagccaggcgttgaccttggcgatggcatcgtccacgcgcaagccgtcgagcgacagcgcgtcgcccttagcgtacgtggattcgacgtgggagttgatcacgatgccgtcatgggagacgaacggcgccttgccctcgtagttggccaagtcatcgccggattccggcagcggttcaacggtgtagatgaccggcagaccgaacttcacggcaaagtcgtaatcgcgctggtcgccaccaggcacggccatgatggcgccggtgccgtagtccatcagcacgtagtcggcggtgaacagcgggagcttcgcgccggtgatcgggttggtggcgtacaggccggtgaacagacctgtcttctcaccgccctcgtccacgcggtccttggcggtcttggcttcggcggcgagcctgtaggccttcaccgcctcgaccgggttggcatagccgcccttccagtcttcgggtacatcggccggccattcggcgggcacgttctccagcaggtgatgttccggggaaacaacggcgaacgtggtgccgaacagcgtgtcgggacgggtggtgtagatttccatgtccttgtcaccgtcggcagtggccacggtgaagtgcacggaggcaccatgggattcaccgatccagttgcgctgcatgagcttgaccttctcaggccagttgatgccgtcaaggtcggcgatgaggcggtggccgtacttggtgatgcgcatggaccactggcgtagctcacgctggaagaccgggaagttgccacgctcggacttgccttcggcggtgacctcctcgttggccagcacggtgcccagacccgggcaccagttgaccggggacttggagatgtaggccaggcggaagtcgttcaagatatcctgctgctcggcgtcagtgaggtcggaccactgcttgccatcggactcgtggcc

SEQ ID NO: 2211 - DNA, 13989 bp, Unknown
  R51_24m  MAG No. k141_29916
caagaccgccgcgccctgccgttatatcgccgccgatatcgagaacgcgggcggccattacgtcgacgagcagctgcacgtggacgacgccaacggcttcaagctcatcacgtcccgcaagcccgctgatttggactacttcgtggacgcaatcaaggatgcgctgaagtaactaccgctccttagcggccaactgcccgcaggcaccgtcaatgtcctggccgcgggtgtcacgcagtgtggcggtgatgcccgcgcggtgcaggatctccaggaaccgctgttcgtctcccggcttggaggcggtccacttcgagccctcgatggggttgagcggaatcgggttgacgtgggcccagttgtcgccgtaatggttaagcctcttggccagcaactgcgcatgctcggcctggtcgttgatgccgcgcatcagcgcgtattcgatactgacgcggcgcttggaggccagccaataatcgtgcgcggcatccaacacctgcgtggtgttgaaacgcttgttcatcggcaccagctcgtcacgcagttcgtcgctgggggcatgcagggaaacggccagacgcacgggaatgccttcggcagtgagcttcttgatgccgggcaccacgcccaccgtggatacggtgatgttgcgcgcggaaatgccgaagccttcgggaggcatggcggaaatctgtcgtacggcggacagcacggagttgtagttgcccatcggctcgcccatgcccatgaacacgatgttgctcaggcggccctctcccccggccacttcgccgtcacgcatcattttggcggccacacgcacctgttcgattatttcaccggtggacatgttacgggtcaggccaagcttgccggtggcgcagaacgggcagcccatgccgcagccgacctgcgaggaaatgcacagcgtggtgcgggtcgggtatcgcataagcaccgattcgatgagggagccgtcgaacagcttccacaaggtcttgatggtggtgccttcgtccgccacttggcgggtcacctcggtgatgagctgcgggaagaacgcggcggcggcctcgctgcgcttggctgccggaaaatcagtgaattcggcggcattcacatcgaaatggccaaagtaatggttggcgagctgcttgactcggaacttcggcaatccgagttcggccgctttctcgatgcgctgctcgggcgtcatatccacaaagtgcagcggcggcttaccacggcgggcatggtccttggatagcacgtcacggaaggcacctgatgtgccgccgggagtaatgccggtttccggagtgtcaggatgctgtgtggtcatgatgggttcgcttcgctctcaatatcagaaaatagtcaaacatgcaatagaaatatcagaatccaccatacggcgtgccgcatacgaatcagatggcccatgtcttagcccatggcgaacgcatattgaacgatgatttcccccatatatgacatgtggcaccgtgcgatatacacacgatgccacattgttcatgcacgaggcatgcgaatcacagtccggtgacccacagcaaggcgcaggtgaacggtgcactcatcaaaatggaatccacacgatccatcacaccgccgtgtcccttgagcagatggcccatgtctttgatgccgatatcgcgcttgagcatggaagcacacaaatcaccgaacgtgcccacggcgccgatgagaatacccgccacgatcggcacccaccaacgagtggcccatttcgaggcatcatacgtgcatgcgaatacggcgaatgcgccagccatggcgaagagcatcgagccgatcaggccctcaacggacttcttcggcgagatacgcgggctgagcttgtgcttgccgagccaggcaccggcaaacaaaccacccgtatcggagagggcgggcaggaacaccagcatgatggcgtgtgcaatcggatgcccattgaaagtcagcgagatgatgatgcagctggccagcaacggaatgtacaacacggtaagcacggacacagccacatggctgagccgggaatgatgctgttccccgccctcatgattgaacgaggattcgaggcgcgcgctggcatccgtgttggacagtttgccggcaaccgccagagataggcggttgccgacgctgatttttgcgctggccgcgatggcgaccagaataatcgacacgatgatactcagcgacatcgtgatgagatggtacggggaataataggtggcgatgagggtgaaggacgcgcacagccacagcatgaacaccgggatgtgcaggcctacggtggcgaagtccaccctgagctcccacagcgccagaatcatgaacacgactaccagcagcacgaagaggtcgacgctgagcagcaggcacgcgacaataaggatgaccagtgccgcgcctgtggcgatggcctgcggcatgttgcggccggtcttcttgttgatccggtcgagcgtctcctcggcctcttcatggagttgttcgttgcgttccataattctccggacctggtctgaatcagacctccatgatctccttctgcttggtctccagcagagtatcgatctcgtcggtaacggacttggtgaccttgtcaagatccttcagcaggcgatcgccttcgtcctcacccatctcgccgtccttgacggccttgtcgatggtttccttggtcttacggcgaatgttgcgcacggcgaccttgccgtcctcggccttgcccttggcgagcttgacgtactccttacgacggtcctcggtgagttccggcatggtcaggcggatgacgttgccatcacggttcgggctgatgccgaggtcggagttgcgcagggccttttcgacggcaccggcctgggaagcgtcaaacggggtgacggacagggtgcgcggttcgggaacgccgatggaggcgacggccttaatcggggtgggggcaccatagtagtccacggtgatgccgttgagcagggccgggtttgcgcgaccggtgcggatgccggagaagttttccttggtgttttccacggtcctggccatctgttccttggcctggtcgataagagacatattcactccttgtgtgttggtgttcgtctgtgttgttcgtctatgaacgtttgattcgattgtaggcgtttgcggcttactcggccacgcgcgattcggcggtggagaccagcgtaccgatttcatcgccgacgagggcgcgggtcacgttgcccggctcttcgaggccgaagacgcggatgcgcttcttgttgtcgcgggccatggacagtgcggaggcgtccatgactgccagattgtccacgagggcgcgattgtagctcagggtttcaaaacgcttggcgttctcgtccctgcgcgggtcggcggtgtagacgccgtcgacgccgttcttacccataagcacttcgtcgcagtggatttcgagggaacgctggatggaaaccgtgtcggtggagaagtacggcatgccggcaccggcgccgaaaatcaccacgcgacccttttcaaggtgacggatggccttgagcggaatatacggctcggcgacctgtcccatggtgatggcggtctgcacgcgggtggcctgaccctcctgctccaggaagtcctgcagggcgaggcagttcatcaccgtgccgagcatacccatgtagtcgccgcgggaacgatcgataccggcctgctgcagttcggcaccgcggaagaagttgccgccgccgaccacgatggccacctgcacaccctgttgtacggccggaacgatttcctcggcaatgcgacgaatcacatgggtatcgatgccgaccttgccaccaccgaatgcttcgccggacaacttgagcagaactctgcgcggcttgtcgctatcagtcatatcatgcctttctcaaaaccgaaagtgcgaaattatccgtagacaagcgtatcggtttacgacgacaccccctagcaacgacacccttggaatagcgaaacgccatccgattattgaataaccggatggcgtttcgttgaaattacgctaagcgcgtggagtaagccttaggctcactcctcttcgcccttgccgacctcgacacgagcgaatgcggtggcgttgccaccgacttccttgaacaggtcgccgacggtcttggacgggtccttgacgaacggctgctcgagcagcacgacttccttgaagaaagcgttgagacggccttcgacgatcttcggaacgatcttctccggcttgccctcggccagggacttctcggtggccacgcgacgctcggactcgaccacatcggccggaacgtcctcgcgggtcagccacttagcgcccatggcggagatctgtagagcagcttcgtgagccacggcggcgccggccttgtcggtggcgatcatggcgacgatgctcggcggcatctcggcggacttcttgtgagcgtagacttcgacgtgctcgccggagatcttggcgaactggccgaccttgacgtgctcaccgaacagggcggcggcctcctcgacagccagcttgacggtggtgtcgccagccttggcctcgagcagctcgtcagcggagttggcgtcggcgtccacggcgtagccgagaacttcctcggtgaactcgacgaacttcggggtcttggccacgaagtcggtctcggagttcagctcgacggcgtagccggtctcgccattggcggtctcgacgaccttggaggcgatggtgccttcctgagccttgcggccttcacgcttgccggctgcggcgatacccttggctcggatgatttccttggcgcgggcgacgtcgccttcggcttcggtcagagccttcttgacgtcgagcatgccggcgccggtgtcttcacgaacctgcttgatcagtgcggcggtaattgctgccattgattattctccttgagaaattttgcttacccatgaacgatgggaagcgcttattcaggcacttcccatcgtagagcatcactcggccttgggggcctcggcggtttcgccctcggcggcagccggagcggcggcttcagcggaagcctcggcaggagcctcgttggtcaggagttccttctcccaagcggccatcggctgctcggcggcttcgccctcggccttgttggcgccggagcgctccagcagaccttcggcgacggcgtcagccatcaggctggtcagcagttcaatgccgcggatggcgtcatcgttggccgggatcgggtactcaacggtgtccgggtcggcgttggtgtcgacgatggcgacaaccgggatacccagcttgtgagcttcctcaacagccagggcctccttggtgatgtcgacgacgaacatcgcggacggggtgcggttcatgttgcggataccgcccagctgcctgttgagcttgtccttctcgcgctcgagcaggaggagctccttcttggtcaggccggagccgtgcacgtcggtgaagtccatttcctcaagttccttgaggcggttgacgcgcttggagacggtctggaagttggtcagcatgccgccgagccaacgctcggagacgtaaggcatgttcacgcgggtggcctggttggcgatagcttcctgagcctgcttcttggtgccgacgaagagcacggtgccgttgtgggccacggtggtcttgatgaagtcgtacgccttgtcgatcatgtcgagcgacttgaacaggttgatgatgtggatgccgttgcgctgggtgaggatgaactgcttcatcttcgggttccaacgacgggtctggtggccgaagtgcaggccagccttcagcatatcgctcatagtgatctgagccatggtattactacctttcattgtcggttcttgcctggccatgcgcacctgcgtgcagctgctcccccggtttcacgagttgtgcagccgaccgacacaggccgtcgcgagcatgacgcgaatttgttgtgtgccggttgacaatattgggtggttccggacgccagcgactgcgtccgttgccgggtggcacacaagtttcaaggatagcacggagccggtactaagaaaaacaggctcccctctctgaggggagcctgtcaccgtaggcgactgaggggagttacgggcggtaccggcagaaccaccctcagtctcactacgttcggcggctcccgccagcgggagccgggtatggactacttcgcctgacgattgcgcatgtagcgcagggcttcgcggcgttcttccttttccaggcgatccaaatacacgtggccgtcgagatggtcgcattcgtgctgaagcatacggcccatcagcccggagccctcgagcacgacctcgttgccgtccaggtcgatgccacgcacgcgagcgtagtcggcccgacgggtcttgtaccacaagccgggcacggacagacaaccttcatcgccatactgctcgccggacttctcctcgagtacggggttcagaacgtagccgaccttgccgtcgatgttgtaggagaaggccctcaggctcacgccgatctggttggcggacaggcccgctcggcccggatcgtccacggtttccagcaggtcgtcaaccaggcggcgcacggccggggtgatttccttgatctcatcgcagggggtgcgcaggactgggtcgggcacgaccctgatctcacggatggccacttctcgttactcctcgttcttctcgtcagccggccggtccggcttgctgccggtgtcagcggcattgtcggcattgtcggcggaatcgccggtctcgccctcttcgggttcggccttcgacttcttgatcttctccgacacgctagcaatcgaatcagacacgctggttttcatctgttccgaggcctgtttgacctgttcggacgcctgcttgaccgattcggaggatttcttgacggtctccagcgtgctgtcgatgatcttggctgtggcgggcagcggtttgttggagggcttgggcgcatacagatcctcttcgatgacggtggcgtagcgctgcaataccttgggacgcaccactttcatgctcggggtgagcgtgccgtgctcctgactgaattcctcatccagcaccgcgaatttgcgcacggactcagcgcgggagacattggcgttggcctggtcgatgtactgctggataaaagcacgcaccgcgtcgttgccgctggcctcggcgagtgtcatgtcggcattgaggccctgaccttccagccaggaatgcagcatttcggggtcgagctcgataagtgcggacacgaacggcttgccgtcgccgactactactgcatgagccacgatcgggcaggtgtcgatgacatcctccatcggggcggggctgatgttcttgccgccggcggtgatgatgatgtccttcttgcgtccggtgatgaaggtgaagccgcggtcgtcgatacgacccagatcgccggttttgatccagccgtcggcagtcatcgtctgtgcggtgagttcgggctgcttgtagtagccaaggaacacgttcgggccggtcagctcaatttcatcgtcttcgccaagacgcacgcccatgccaggcccaggcttgccgaccgaaccgacctcgttgtcgtcctcccaattgacgagcatcggagcggcggtttcggtcatgccataaccctggatgaaggtgatgtcatccatgccgttgaagaagtgggccaaatccacgttgagcggcgcaccaccgcaggccagccatttgaggttcggtccgagagcggaacgaatggatttgcccaccgtggccatgtagaacgaatggcgcatgcgctcgatgaacgaatggccgcggccggcctgctcatccttgctccacttgacgaagtgcttgaccgactgggcgaagatatgcccctggatgccggcaccagccttctgcgaggccgcgttatacaccttctcgaacacacgtggcacgcccagcaggtaggtgggcctgaagctgcggatatcggcgagcagtcgcttggcgtcgggaatgtatccgaccacgccgcagccaccgatgcacacgtactggatgtagcgggcgaagcagtgcgccagtggcaggaacagcagcagacggttgtcgtcgtacagcatgccacgcagaatctcgtagccgttaagcacgatgtgcgtgtaattgcggttggagagcatcgcgcccttgggcttgccggtggaaccggaggtgtagaccacggtaagcagatcatcggctttgatacgagcgatagccgcatccaacgtctcatcggatacgccatgcccgaagtcagcgacagcgtcaaggccatcggccttgaaattgaacacgtatttcatgcccggatgattgacacggatctgctcaagcgtctgtgcgcgctggaagtcgccggcaaaggcgatggcgggatcgacttcctcgacgatgcccgcggtctgacgggcggaatcggtctcatagacgggcacaaccacagcgccgattgccgcgcaagcgaaatcagccacaccccactcatagcaggtaggcgagtaaatcagcaccatggtgccggctttgacgccaagtcccaacaggcccttggccacctcgcgtacgcgggacagcatttcagtagttgtggcgccgcgccattggtgggtgttgtcatcctgccattccgcgatgatgtcatccggcgtgcgagctgctcgtttggccagcagcgagtagacggtgtcgtcatcggtggtgacatatctgggttcttctacatgttcacgcatggtcactactataggcgaaccagcctatgacacggcagaaccgtcttccgctgccagcgtaggaatcggtgtgagggcggggccgtctggtcagcccagatcggcatagatgcacatccatcgagaaccgatgaacttcagtttgaggttgactcgcagattttcctggccgatggtcatgaataccgccatttccagcgtgtccttgccggtgatcatgccgtcgatcaatgtggggacagtgggcagatagcagaatttcgctttgagctccggatgagtgaccatgtgggtgccgagcaggtattgcatggtttgcagccgttccaggcatggttttgtcatggctctgttgagatgtgcgacgctgagtctgccacgtatcgcgtccgccgatgtgcaggcgatgcggcatgcagccatggccatggaatgacattccttcgcattcagcccgcctatgaatgtgggttggatatgataccgcaccgggcgatccgacagctccacaacgatgaatccgtcataactcggcaacggcccgtactgatatgtgccgtggaaaaatcccgaatactccatgatgaccccttcaagcccccttgcaactcaccatcattggcgagcgtttgtactacaacatcacgaaaggcgcgccaagtcaaacgacttgagcgcgccttagggcaagctaagcctcctgcatggagggcaaacccccattttcagggggggtaatcgggattatcgtgcggaatacgggttgaccaccatgccgcaacgctggaagttcttcacgtcgacgtagccggtggaggccatagcgcgcttgagggcgccgatgaagttggtcttgccgtccgcctggtggctcggtccgaacagcacctgttcgagcgggccgaccgtgccgaccgtggtgcggtagccgcgcggcagcgtctggtggcgggcttcggaaccccagtgggtgcccttgccgggggcctcggtggcgcgggccagcggcgcgccgagcatgaccgcgtcggcgccgagggccagggccttgacgaagctgccggagtcgcccatgccgccgtcggcgatgacctgcacgtagcggccgccggattcgtccatgtagtcgcggcgggcctcggccacgtcggcgatggcggtggccatcggggcctgcacgccgatggtctggcgggtggcggagaccgcgccgccgccgaagccgacgagcacgccggccgcgccggtgcgcatcaggtgcagggcggcggtgtagttggatgcgccgccgacgatgacgggcacgtcaaggtcgtagatgaacttcttgaggttcagcggttcctgaccggaggagacgtgctcggcggagaccacagtgccgcggatcacgaacaggtccacgcccgcgtccaccacggtggagtagaactgctgggtgcgctgcggggagagcgcgccggccacggtgacaccggcggcgcgaatctcgcgcagacgctgcgcgatgagctccggcttgaccggctcggcatagatctgctggatacgctcggtggcctgatcggccggcagcccggcgatttcgtccaacagcggggtcgggtcctcgtaacgggtccacagaccttccaaatcgagcacgccgagcgcgcccatcttgcccatggcgatggcggtggccgggctggtcaccgaatccatgggggcgccgatcaccggcacatcgaactcataggcgtcgatctgccaagaggtggagacgtcctcggggtcgcgggtgcgacgggaggggacgatcgccacatcgtcgagtgcgtagccgagacggccctttttgcccaaaccgatttcaatttcctgagacatggttgtaagcctattgcccgggtgggacgccaacaaggtcgtttcccacggaccggacgattgcttcaagtcgttacaaacatgcgctatgactaaatcatcttcacaccatctatcaggaggaagcatggccaaaatcaaggtcgaaggcactgtcgtcgaactcgacggcgacgagatgacccgcgtgatctggaaggacatcaaggatcgcctgatcctgccgtacctcgacgtgaacctcgactactacgatctgggcatcgagcaccgcgacgagaccgatgaccaggtgaccatcgacgccgcccacgccatccagaagcaccatgtcggcgtcaagtgcgccaccatcacccccgatgaggcccgagtcaaggaattcggtctcaagaagatgtggaagtctcccaacggcaccatccgcaacatcctgggcggcacgatcttccgcgagcctattgtgatgagcaacgtgcctcgtctggtgcccggctggaccaagccgatcgtcgtggcccgtcacgcattcggcgaccagtacaaggccaccgatttcaaggttccgggcgccggccagctgaccgtcaccttcactccggacgatggctccgagccgattcagcacgtggtctacaactacggcgaagacggcggcgtggcccaggtgcagtacaacgtcaacgattcgatccgcggtttcgctcgcgcctgcttcaactacggcctgatgcgtcattacccggtgtacttgtccaccaagaacacgattttgaaggcctacgacggccagttcaaggacatctttgccgaggtattcgagaccgaatacaaggacaagtacgccgaggccggcctgacttacgagcaccgcctgatcgacgacatggtggccagctccctgaagtggcacggcggttacatctgggcctgcaagaactacgatggcgatgtgcagtccgactccgtggcccagggctttggttcgctgggcctcatgacctccgtgctcatgaccccggacggccagaccgtcgaggccgaagcggcgcacggcaccgtgacccgtcactaccgccgctggcagaagggcgagaagacctccaccaacccgatcgcctccatcttcgcgtggaccggcggcctcaagcaccgcgccgatctggacggcacgcccgaagtccgtcacttcgccgagacgctggaaaaggtcatcgtcgacaccgttgaaggtggtcagatgaccaaggatctggccatgctcatcggcccggacgaaccgtggctcgacaccgacggcttcatgaacgcgctggacgagaacctggccaaggctctggccgagtaaatcatcgaacacatcgtacggacctacataggtcatgtcatgtcgccaactgtcatgattgtcgtgcttcatctggaatgttcctcagcacgataatcatgacagttgttcgatgcacgcacgtaatacccctaattgttcccggatatgtggcgatttgtccactggtccgggactttttcgtatacggcctactagaatcgtgattcagtttgttttcacgcccgcttgaggaggtttcgccgcttatggtgttcgcacgccgctcaaccaccctgctcgccgccattgtcgcatcctgcgcgatggtgctgtcactgaccgcgtgcacctcagacaataagaccgttgtagatggtcaaaccacggtgacgtccaattctgccggcggcgtggccgtgttcacgccttcggacggcattacgctgaatcagcagacgccactgaacaaatgggcgaagctggtgcccgacctaaccaaggccctggtcgacgccggtttcaagaaaggcgatatcgatcatacgacgtccgactcgttggacaagcaaagccgcgccatccaagactttgtggtcgatcatctttcgaataacaccacggacgattccggcattgccatcgcgcccgacaacatgacattgctcgtggctccagtagtcgaggccgacgcttccactcgccaatacggcgattacgtcagccagaacctgagcaccaacgatgccacggatgagggagctacttctgacggtgattcttccgaagacagctcttccaaagatgactcgtccaacactgagagcgacggcactgcatcggacgagcaggcgcaggccgtggaccggctggtctcatcgctcaagctggccaaggaatccggcatgcatgtggtattgctcggcaacagcatcgaggggtataggccggacgccttcgtcaagttctcggacgcccagaccatcggcaagctacaggcggaaaagatggtgtccaaactcaagttggataaggccagtaaagacaaccccaaatacattgaggtgctgctgccatacaccgccgtggacgaaaaaggcaacgccaacgattccacgttcgcccaagaggcgttccgtggtatctggcaggtactgggctcctactatcagaagggcgttgtggaaagcccttcaggcaccttggacggcaaatccacggaaaacgattggcaagccgtggcctacgatgccgccaaggaaggctccactgcgaaagtgcttgacaagcgtctggcaaaaaccgacgggcagtccacactcacccgtattgacggcatcatcacgatgaacgactatatcgcctccgaggtcgtcaaggaattggacgatctgggatacaccggctctgccgccgatatcaatccgcagatcaccatctcgggcattgtcggcaatatcaccggcaagagggatctcagccgcgacgcagtgccggacccgatcaaatcccctgaaaacgacaacgcaaacgactcatccagttccgatgacgatgcggataaggacacctccgcttccgacaaggaccgtgactcgcaatggcctctggtgaccggatacggcgcgtacgtctcgaacatcccatccatcgtcaatggcaagcaatggatgaccggcatggaagacagacagaccatcgccacggatatcgctcaggcctgcgccaggctcaacaagaacgaagcgctgaattccatgccttcaatcaggaactccgaggtaggcggcgtgaagaagatcccgaccatcaacgaaccgttgctggctgtcagcgccagcaatctcaagtccgcgctgatcgcccccggatatatctccttggccgatgccggtctgtgattcatactcgtcacgccgctagccgcctgcgatgcctcttccgtacggccctgttccggccgac

SEQ ID NO: 2212 - DNA, 2591 bp, Unknown
  R51_24m  MAG No. k141_30000
aaggagaaaaactcacaaccctggccggcgctcgccgttgccgtagaagtgggccaacgcttcgtcgcggaactcatcaaagtatccgccgtcgatcgaggcgcggatgtcgtctagcagcttcacgaagaaatgctcgttatggatcgtggccaacgtaaacccgttgaactcgcgggcgcgcagcaggtggtcgacgtacgcgcgtgaataatgctggcatgtgtagcagtcgcatccctcctccagcggcccgaaatcgaacttatgctgggcgcgcttgatgttgtaccggccggcgcgcgtgtagatcgcgccgttgcgggcgcagcgcgcgggggccacgcagtcgaaggtgtcgccgccgttctccacgcacgcgaagatatcgtccacggaggcgatgcccagcacatggcgcgggcggttctccggcatcgcgtcgcagatccacgcgcaggtgtctccaatgatgcgcttctcgattgcgccgccgattcccacgccgtcgaagtccagcgaggcgatctgcgaggccgcgcgccggcgtagatcctcgtaattcgcgccctgcaccacgccatacagcgcctgatagggcttgctcagccgctcagccgtcagccgctggtgctcgtccacgcagcgacgggcccagcggaacgtgcgttccaccgaatcctcctggtaggagcgggtgttcatcagcgtggtgagttcatcgaacgcgaacatgatgtccgcgccgagcttgtgctggatgcccatcgaaatctcggcggagaaccggtgcgagtcgccgttcagtggtgacttgaatgtcacgccgtcctcgtccacccaggccatgcgttccttgcccttggcgatgatgtcgtccgacttcatgccggtcacgtccatcgccagcgtcttcttgaagccgacgcccagcgacatgacctggaaaccgccggaatcggtgaacgtgggcccgtcccagttcatgaaacgcgccaagccgccggccgcgtccagcacgtcctcgcccgggcgctcgaataggtggaaggcgttggccagcaggcactgtgcgcctagattcttcatctgctcgggcaacacagccttcatcgcggcttgcgtgcccaccggcacgaaggcaggcgtgcgaatatcgccgtggggcgtgtgaatgatgccggtgcggccgtatcgagcaccgtcgcgtccaagtccgctggccgtggatggcaggcgggtgatcgtttcgaagtggaaggcgctgcggtcgccgggctgtccgggctgtgcgcccaacggatgttcaagaaggctgatcgtcatatgttcactttaggcagaagggccagaaaagggccggaaattgtgaagaactcggtttcgaggggcggatttcgccgctcccgaacgtctacttccgcttcaaggggctcccggtcaagtaggccggctgcaaaaatggcggaatggcgttaaatgagggcccttgatactcggaattgaccgcgcgaacagccccttgaagtgcaagtagatgttcccgaaacaggaaatcagcccctcgaagccgagatgcccataagactctgcgatgattacgcatagactttcaatcaacgttcagaaaacctccagattgactgcctttactactgaggtagcacacgagaagtggcaatgggcaagtgcccgaatagccgccgaacagacgtgataggaatttaggaaaaggagcagcaatggctgacgaatttaacccgcagggcgtcgaccagaccccgcggaataacgaaaaccccaatagtactgccgataccggcaacgccgagccgaagaacccgtttgtgggtggcgactcggttgatgccggcaacgccagcgattccagcgagcagcaagccccggtttcctcggccgccctcgctgccgatcagcagcctacgcaagccgctaccgacactgccgccaccgagcccatcccggactacgcctccgccaagggcgagagcacggtggtctcctcctcgccggcttctccggcagcaccggccgcaggccagacctcggccacaactccgctgtatcgtccggccccggaatatggcgcttatggtccgaccccgactcaggcacagggccagcagggcggccaggccggcagcaatgcccagcccacgcagcaattcccgttcggtcagcctgcacagcaaaccccacagggccagcagggcaaccgcaatccctactacaccaataacccgcagccgcagggcaacggcaatccgttcaatccgcccacgcagccgcagcagaacaacggcaatccgtttgccagccagtccggtcagaatggccggaatggccagcagccccagcagggcggtctgttcggtttcggcactcccggtaccggtacgccgaacggtcaaggcccggcccagccgggacagcccggtcagcccggccccgccaagcagggcatgtccaagacggcgagcaacatcctcatcgccgtggtcgccgccgttctggctgcggccctctgcctgggcctcggttacggcgccctcaccagcggcctgatcacc

SEQ ID NO: 2213 - DNA, 4135 bp, Unknown
  R51_24m  MAG No. k141_30691
cccgatgttctccgaagttcgctgatttataggaagagacttggcagacaacaaacgcaccggcctgtccgctctagccgacgccggcaatgaaggcgaggatttctccgtcatcgacgccatcggtggcccgcgtggcgtcatcgaatccatgctgcctggcgtggtgttcgtcgtactgttcgtggccacgagcaatctgaatctcaccattgcggtttcggccgtgttggcggtattgcaggttattgtgcgactgattcagcgccagtcggtaatgggcgcggtctctggtctggtggcggtaggcatctgcctgatttgggcatggcagactcatgaggcccgcaattactacatcttcggattcattaccaatgctggctatgccgcgttgcttgccgtgtcgctgattgcgcgcgtgcccggactgggtttggtcgtcgaattcatccgtagcctgcccaccgagcatttcaaggcatggttccatgactggatggacgacaaggccctgaaacgcgcctatatgattgtcaccggcctgtgggtcggtctgttcctgctgcggctggtggtgcaggtgccgctgtatctgaccaaccatgtggctgcactcggcgtgacccgcctgctcatgggcattccgttctgggcattggcgatttgggtgagttacctcattattgccacgccgatgcaccggcataaggtcgcggctaggaagatacagactgaagtcgctgttgatgccgaactcgaaccgagcgcaaccggaaaggacgatgatgcaagctgaagttcgtatcgaacgatacgccgaccaaggccgctgcgtggcccatatcgacggtcgtgtggtgttcgtccgcttcgccttgcccgacgaactcgtgcgagtcgaacttgacgagccccacgaccgggacgaccggttctggaccggcgaagtcgtcgaggttctcgagccgtccgaagaccgagtcaccccggcatggccacttgccggtcccttggcgatgggcgggggagtgggcggcgcggatctcgtgcacgtctctttgcccggccagctcaagtggaaggccatcaccgtctccgaacagatgagccgactcggccatatcgacgtggccgttcccatcgagcgcatgcccggcgacaaggcagccggcggcctcaattggcgtacccgcatcgaaatgattgccgacgacaacggcatgccatccatgcgccggcgcggcacacacaaccgtgtggccatcgacaccatgccgcttgccacgcgcacgctgctggacgtcgccaagcgcgaacacgtgtgggaaggcggctttgaacccggctcccagattcgtctttccgtgcccgaaccgcgcggcgagatcgtcgataccgcggcagcaggcgacaattacgccgtacttgtggacggcgaactgcgcgccggctcccagctgctcaccgaacaggtgaccatcaacggcacgaccttcgactatcaggttgacgccaacggtttctggcaagtgcatcgccaagcgccgatcgccctcggtacgcacgtgatcaacctggtcaacgggcagctgcagtcagcggcggacgccgtaatctgggatttgtattccggttccggcctgttcaccctgccgctggccacaatgaccggtgaacgcacccgcatgctcagcgttgaaggcgcgcgtgtggccgtcaagaacgcccagcgcaatctgcgcgccatgaacctgaacgacgtggacgcccgcgcgggtgacgtctcgcgcacgctggaccatgtgccggcgcatctggccaagccgaatgtcgtagtgcttgatccgccgcgtgccggtgctcgtgccaaggtctgccgccagattgccgcggccggcgcatccagcgtggtctacatcgcctgtgatcccaccagcctcgcacgcgacaccgcgatactcatcggcgaaggctacgagctcaaagacatccgtgcctttgacatctacccgatgacccaccacgtcgagacggtggccctgtttacccgctgacaggtgagcatatgacacgacgaattctcggattgctggcctgcatggcggctgtgttgtccctggccgcctgcacgccggccggtagggcggtcggcgatacccaagacagcatgccggaagtcgcccacgattccacacatcccacggatgtcacagtcggctttgtggggtcgactgacaccgccgcagacgagttcgtcatcaatgcgctgtctgatgacaaactcaatgtctactatgcctcgctcgaaacatccgcaagctcggcaaacgcaactgatggtgtatccggtgaaaccgaatcttctgacgccggcactaccagcgaaaacggtgccgatagtatggatgctcatactggcgtcgacaagaatgcggccaccgcacagcagggtgttgccgatttcgtagctcgcgcggtcaaaatcgtggttatcagcggcatcgacgttaccgacgccaaccgggagagctggaaccagacgttgaccaatgcgcgtgaagccggtattccagtcgctctcattgatccaaagcatgcgcccgaagatgaactgctgtacgccgtcatccttcacctcaacaccaacagtgccgattctggcgacactgccgataccaagccaatgactattactgacgccgtgctcaccatcacgcgcgatgaaccccacgaacgcgagatcaaagtcaccgtttcctgagccgaatcaggcccttgaagctgagaaagcaccctgaatcatccctgagccttagcggattgcgaaacaagacgcggtaggctggggaatatgagtgcaacaacagccgtggaaatgcctgaaatcggagcaaccggtcttacccccaaagaagtggtgcagcgtatcgaaagtggccaatcgaatgcggtgaaaacatccacctcgcgttcggttcaagatatcgtgcgagccaacgtgttcacgctgttcaacggcatcatcttcgccgcgatggtactggtgctgatcaccggttcctggagggacgcggtgttcggtttcgtcatcatcatcaacacgggcatcggcatcgtcaccgaactcagggccaagcgcacgttggataagctttccatccttgtggcctccgaattcctcgtgcatcgtgacggcagggacgtggaggtgccccacaacgagatcgtgctcgacgacctgctgtggatccgtgccggcgaacaggtgccggccgacgggcagatcatccagacctggggactggaactcgacgaatccatgctcaccggcgaatctcgtaccgtgcgccacaaggtgggggagcaggtgtattccggtgccaccgcggtctccggcatggcattggtcaaggtcaatgcggtcggcagccattcctacgccgccacgctcaccgcgcaggccaaggtatacaagaaaaccgtgtccgacctgaacaagggcatcaacacgattctgaaattcatgaccttcctcgtggtaccgctgtgcattctgctgattctttcgcagattcatacggtcggcggttggggtacggcactctccaccggcgaatggcggcaagccgtggtttccgcggtcgccggcgtagtaggcatgattcccgaaggcttggtgctgctgacttcgctgaacttcgcggtggccgccatgcgtctcgcccgtcacaatacgctggtgcaggagcttgaatccgtggagacactggctcgcgtggacgcgctgaacctcgataaaaccggcacgatcaccgatggcggtatcgccttcaaccggctcgtgatgctcgattccgccaattcggctgcggaacaggcagccacgcaggccctctacgactgctgcaacgaagagcagcccaacggcaccggccaagccgtactcgccgggctcaaggcccaaggatatggggcaggtgcggttgagtctcgtgtcccgttctcttcggcgcgcaaatggagtgcggtgcgtaaatccggcgagacctggtacatgggagcgccggaggtgattatttctgcgcttgagggtgactattcgtcggtgttgcagcaggttaacgagtatgcc

SEQ ID NO: 2214 - DNA, 3589 bp, Unknown
  R51_24m  MAG No. k141_30809
cccagcgccatctgctgccgggcgaagtacttctgggaggacttcatgatggccatcatgatgatcaggccgatgaggctggcaccgatggcgcacagggtcatgatcacgttgttgtagaacatcatcaccagcgcgcccacgaacagcgtcaccgaggtaatcagcgagccgagcgactggcccagcgtctggccgatggcgtccacatcgttggtgatgcgcgacagcacgtcgccgtagctaaccttgtcgaagtatttgagcggcagtttgttgattttgaccgagatggactcgcgcagtcgctgggcggtgcgctgggtgacgttggccatcatccagctttgcacgtagccgagcacggcgtagcccacgtacagggccaccaaagtccaggcgatgtggcccaccgtgccgaaatctaccgagttcatcaccggtctgccgttaacgatggcgggcagacctttgacgatctcgttggtcatgtccttgagcttgtccgggccgacgatctggcagacggtgccggccgcgcccaggatgagcgcgatgatgatgacgggaagatagttgcggcagtagttcacgagtttgcccatgactttgccgaaatcatggggcttttcgacggcacgcctgccgcccattggtcctcttggcatttgttttactccttaaaagtccgtattgacctccctctgatgagggaggtggcgcgaagcgccggagggagagaagccgtacgcgactacccctcagtcagctgtgctgttttattcgctcgcttatcagctcgtcttcgcctgggaacagcccactgggctgttccctttacggctcagcccctgacatggggagctaccgctgccgcccccccctacgccgtaagctccgactggctgagctgggattcggcgatctggcggtatacgtcgcagttgtcgagcagttccttgtgcgtgccctgacccacgaccttgccgtcgtcgagcacgacgatgcggtcggcgttcatgatggtgccgatgcgctgggccacgatgagcttggtggaatccttggcctcgcgggcgagcgcgtcgcgcacttcgcggtcggtcttgaagtcgagcgcggagaacgagtcgtcgaaaatcaggatttccgggtgacggtacaccgcgcgcgcaatcgacaggcgctgcttctggccgccggacacgttcgatccgccttgggcgatcgcggcggaatacccgccgtccatgcgcgccacgaactcgctggcctgcgccacgtcggcggcggccttgacgcgattcagctgctcggccggtatatcggcaccttccgcggcctcgccagcggcgatcaacgcggcctcgcgcttgcgcccggccggggtggaggtatcggccatctcgacctccgccgggtcgcccggctgatcgccgtagctcacgttggaggccacggtgcccttgaacagcacggactgctgcggcacgtagccgatcttgtcgcgcagggccttcaggtcgtagtcgcgcacgtccacgccgtcgaccaacacctggccttggctggtgtcatagaagcgcggcacgagattgataagagacgacttgccggagccggtggagccgatgaacgccaccgtctggccctgctcggcggtgaagttgatgccttccagcatcgcctcgcgcgaatccgggtaggtgaagctgacgttgcggaattccacggtgcccctctggccggttttggccacgtcggcggcggttttggtgccgttctcgacgattggctcagtgtcgagcacctccatgatgcgctgcgcggacacgtcggcgcgcggccagagcacgaacaccatgctcatgagcaggaagctcatgatgacctgcacggagtagttggagaacacgaccatgttggagaacacggtgagcttgtccttgagcccggcggcgtcgatgaggtaagcgccgatccagtagacggcgagcatcaggccgttcaggacggtgttcatcaacggcatcatgaacgccatgacgcggttggtgaacagctgggtctcggtgaggtccttgttggccttggtgaatttggcttcctggtagtcctcggcattgtaggcgcgcaccacgcgcaggccggtgaggttctcgcgggccacgaggttgatgttgtcggtcagggtctgcatgaccttgaacttcggcatgaccatggccatcatgacggtgatggacaccagcaggaccgccacggcgatgccggtggcgagcgtccattcgaagccttcgccggcgatcttgcacacggcccatacggccatgatcggcgacttgacgatgagctgcaggcccatggtgatgaacatctgcacctgcgtgacgtcgttggtggaacgggtgatgaggctggcggtggagaacttgctcatctcggccgggccgaaggactcgaccttgcggaattcgagcgagcgcagacgctgggtgaacgaggcggccacgcgcgcagcgatgtagccggtgatgatggcacacgccacggatccgagcgagatgagcagcatcttgccgcccgcgatccagatgtccttcatgtcgctgcccggcgtctcgaccagcgtggtgatgtctgacatatagtcgggcagtttcaggtcgaagtagacctgcccgacgatggtcaccagggcgatgagcatctgaccgatctccgctttggagaggtatttcatgatgcgaaacattggtttccccttgtgttggttgggttggttattggttattggcgattggttcttaagttggctgggttatcggtgattatcggttcacgatgtcttaatagtttccattgtttgattacttacactgtgagatattatacgcacttctgtatgttcgctgtgagcgtcctcaattacctttacctccctctgacgagggaggtgtcaccgcgcagcagtgacggagggagagacccgccagcgggaggaagctagtctcgctcagcctccgcgcacttagctgccatgtgttcagccacgcgcttgtcccgctccacgaatgcctcacgcacttgttcagccgtcggccgaggccgccccggatggcaaatcgacatatatgtggtgaactcagacaccaggtcaacgaattcgcgcgtgcgccgctcccccatttgcgagaaaatccagcaaattgcggaacgcatttcctctatcatccgatgagactgctcgcgcccggaatcagtgagattcacgcgaataatgcgccgatccttggaatcaatgtcacgcgtgacccagccttttttctccagagacgacagcacagtggagatgcggccggaactggcctgcagcgccgatgccaattgcgatggcgtttgcgtccccttcatggacagctcccggagcacgaactgctcaccatgggctccacgagtgaattccctctgcattgtcgaacgattgccccacacgctggcatacagttcactaactgcttcctgctcaaatcccataagagcaccatccattcccattcgccacacggcagagcgccgcaaacacccc

SEQ ID NO: 2215 - DNA, 28764 bp, Unknown
  R51_24m  MAG No. k141_31005
agcaggtcttcgttgtagtaatccgaagcacgacccaccgagcatcgggcgatatcgcccatggtcatcagaccggcgtgctcaagtttcctggcatagccgcgcccaacccgccaaaaatcggtgagcggacgatggctccaaagcagccgacgatatgacatttcattcagttcggccacgcgcacgccgcccttgtcggcgggcatgtgcttggcgacgatatccatggcgactttggccagatacatgttggagccgatgccggcagtggcggtgatgccggtttcatcgagaatttcgcgcacgatggttcgcgccatggcatgcggccccatacccagcgagcgcagatatggcgtgacgtcgatgaacacctcgtcaatcgagtagacatggatgtgctcgggtgcggcgtatttgaggtagatgccatatacctgcccgctgacctccaaatagtgcgccatgcgcggcttggcgatgaccatcgaggctttgagtctcggcgagcgttccaggtcgcgcgcatcgcaggactccccgattaatcgaccgccgggagcatggaccgcgcgctcgatgttgactccattcaggcgctgttttacctcgaatagccgcgcacgaccgggaatgccatagttcttcagcgagggtgagaccgccaaacatattgtcttatcggtgcgggtttcatcggccaccaccagatgcgtggtcaacgggtcgagtccgcgcgccgcgcactccaccgaggcatagaaggacttgagatcaatggcaatataggtatgctcgcgttgcgtcgataccgttccgctgcccatcgccatcacctccttaccaccgccggcccgaccagcatatcaatacggtcgaacatttgttcgatacaacatgtctgttcgaagctgccgaagtcgacgcacgcaacgcgcccaagcatgctcttcacccacaccacacgcacagcggcagagcagcggcatgcatgcgtaccatgggaatatgaagaaaagcattacggcagacagcgattttgcggcgtgggcggcagcccgatcccagaaaacgaatcgatcactggcaggagcccgcctcgcgattccggagccgcagaagcatgccgaaatcaagtctcaggcccagcaatggggcatgaccgtcgaagatgccacgatgaccgacgggcacagcgaggaactcctatgtgacggcacacaaagcattgattccattgccgatatgcgcacggcaagtgggctggaggcaatggagtacgcggaacagcacatgccggtattacgcgacaccatggatgacctcaccacccgcgtcgatttttcaggcattcgtattgccgtctgcctgatactggagccaaaaaccgcgattctgctgcgcaagcttaaggccgccggcgcaatcgtcggcgtatattgcggcccggattccacggatccccgagtggcggaacagctgcgccgggaaggaatcacggtcgaatccagccgagcctggaccgcggaacaggcgcacgaggcagccctgcgcctgctggacaagatacagccgaacatcatcatcgacgatggtgccagcttcgcccgtctcgcctcgctcgaacgccccgagctcacggcgaatctcattggagtggccgaggaaacgaccagtggcgtacgcgcgttccagcagatgcaggaagcgggagccctcacctacccggtcgtagccgttaacgacagtgtgctgaaaaccggattcgacaacgcccacggcactggggagacatgcgtgaccaccatgcagcgcattctcggcgagcatgcattcgacggcaagaacgtcaccgtcatcggctacggcccggtcggccaaggcttcgcacggcgtattcgcgcacttggagccgaagtcaccatctgcgatatcgatccagtggcttcactcaaagcggtgttcgacggcttcgccgcacaagacattgacgaggcactcccttgcgcggatatggtggtgtccgccactggcgtgagacatacggtcacacttgagcacatgcgcgcaatgcacgagggcgcggcgctcgcagtgatcggcggcatcgccaacgaaatcgccttggacgaggtaagcgacttcaccccacaggtcaacagggacaccgcgcaactcaatgttcccgacggaccaacgctcacgctaatcgccgacggcgatggcgtgaactacacggtgggaggcggcaatccaatcgagatcatggatctgagcttcgccgtacaggccagcgccgtcgcatatcttctggaacatcgaggcacactggatcacacgcttatcagacttgacgcagcgaccgaccagcgcatcgccgccagcgcgctcaaggcgcgcggataccgagccagccatgccgtggaggacaacggctacgattggcgactgaccagattcgcggaaaacgaccgagagaacgccgaccgatagccataggcacggcaccgaacacaacgcagcgaggagaatatgaccgacaacacctggccgaccgtcgataccgagcttatcgatgatgtgacactgtattccgccaaactcatcatccccgtgacgggccccgtcatcatcgatggcgcagttgccatacatggcgaccgcgtggttcatgtaggtaaacgccgctgggtgctggaggcgctgaagcaggaaatgacgtctcacggcaccatccgtgaacggcattgggatggggtgctcacccccggattggtcaacgcgcacactcatctgcagtacagcggcatggtgcaggtcgggcaaggcacctacgatcggttccgcgcctgggaactggcattcaacgaggtgtacgccgaggcgcagaagacccagccatggaagcagtgggccgaggacggtgctcgccagatggtcgaatcgggaacgacggccgccgcagacatcgtcaccgatttggacgccgccggcgcgctggcttcgcagggcatgcacggcatcgcttattgggaggtaatgggctggcacaacgacgaatggatggaaaagggtcgcaccgagctcatccggcagttgcgccggatgaacgaggagcagctgccgaacctcggcatcagcccgcatgctccgtatacgctggagtccgaaccgttcgttgatcttccagacattgctcgtcagctgaacatgcgactgcatatccatctggcggagaccccgctcgaggccggcacttatccgccggtgctcaccacttattcggcgtccgactggcgtgaccacgattgggaaagctaccggcagctcaaggacgtgggcaaaggtgcctccgccatccagttcgtcgatcagcttggctcgcttggcccggatgtgcacattgcacacggcgtgtgggccaatggcgaggatcggcgtattctacgtcagcgcggcgtgggcgtggccttgtgcccccgatcgaatcgcattaccaacaccggcaaagatgcaccggtgcgcgaatacctcgaggaaggcaatctggtaagcgtgggcaccgattcgctctccagcacgccgaccctcgatctgcttgatgacgtgtcgatgctttacggcctggcccgcgaacaaggctatgccagcgacgatctgacacatcgcctgattcgtatgatgacgctgggcggcgccgcctccatgggcatgcacgtgggccgcaaccgcattggacagatcaacgcgggcgcattggctgatttcgcgttcttcgacatccccgtcgacacatcatctccggccggcatcgaagaaacgctggaaacactggtgaagcacggcgcaggcacgaaccgagccacggtgatatccgggcgcgaagcctacaacaacgcctggtgacaccgctgacccgacctgatatcaagaagccaaaaaccagcaaacccgccaagaacaggagatctcattatgagcgtcgctttgcgagacatgagtccatacgcccggtccatagtggaacgccttggactggaagcccaccccgaaggcggctggtacacgcgtgactggcaatccccgcacacggatgaggcctcaagccgaccgctatcgtcactgatttacttcctgctgcccgagggagatgccagcacctggcataaggtcgatgcggatgaggtctggctgtggcatggcccggcatcggtcaagctggaactcggcggcagcggcgagactccggaatccgacgaatccaagcgaaccgtaatcaccctgggttccggcatcaccaccgatcaggccgacgtaaccgtatcgggacatgcggtcgtaccggctggcgtctggcagcgcacagtgcctggccagggcgatgcgctggtctcctgtgtggtcagtccgggattcgtattcgacggcttcacactcgaacagtgaacgccatttcgctctgcgccaatatgagatattcgttcgcttacgcgccagattgcgcggctctagccggccataagcaatggagataaccagcatccgagaatatcgctgttttgtagtaacccaatagccatacaattggcgcgcatgcatcaagcacgactttgaaccgtgtgcatgacgaacacttgaggagaggaagcccatgttcaataagcaacacatcgtccgtaccattgcgtccaccgccagcatcctggctctgtcgttcaccgcagcctgcggttccggccagtccaccgcatccaattccgccgattcgaacgacatcacccagcagacgtacaagccgggcaagctgaccatcgccaccggacagccggcctacgagccgtgggttatgaacgacaagccggaaagcggtgagggctacgaggcggccgtcgcctacgcagtggccgacaagctcggtttcaagaagagcgacgtggtgtggacccgcaccgcattcgacaccgccatcgctcccggcgccaaggactgggatctcaacatccagcagttcggcatcaccgacgagcgcaagaaggccgttgacttctcgtccagctactacaacgacagccagtccgtcgtggtcaagaaagacagcaagttcgccaacgccaccaaggtatccgatctgaagaatgcgaccgtgggcgtcatggtcggcacccttgcctacgactacgccaaggcgaacatcaaggacgacatccagacgttcaatgatgatgccgcactggctcaggcacttgacgccggtcaaatcgacgcactggtcaccagcaccgtggaatgcgtgtacatggtgcagtccgagcaggtcaaggacgccaaggtgctcggccgtctgcctgactccgaagacaagagtggcatgggcatcgtgctgccgaaggattccaagctgactgcagccgtgaccaaggcagtggatgacctgaacgccgacggcaccatcaagaagcttcaggacaagtggctggccgagtacaccaccgacctgaccgaactgaagaagtaagtggagtaggctcacatcataaggtcacaacaccttggccgggcgttgcggaaattttcctgtgacacccggccattccggcattcaggaagcgagcgacattcatcacatgaccgcagcaccaaccgaaaccaggcagcacaatgcccctgacggacacgaggtaagtcaggtcgagctcaaacgacgccaatatcgtgttcatcagcaaattcaatcgacgattaccagtctgatcagcaccattgtgttcgttgtggtcatcgtcatcggcctgaagctctcccccggctggccacgagtcaaggagaccttcttctccggcgaatacttcgtcaaatcgtttccccatgtgcttgacggcctatggctcaacatccgcgttctgctcgtcgcagtggtcggcgtggcgattctaagcacgctgatcgcattggtgcgcaccagccgctcccctattctgttcccgctgcgtatcctggcattgatctacacgactgtgatgcgcggcgtgcctattatcgtcgtgctgtatctaatcggtttcggcattcccggcctaggcttgttcggccgtatcgatccctccgtactcggcaccattgcagtggtaatgggatacagcgcctacgtctccgaggtgctgcgtgccggttttaacgacgtacatccttctcagcgagcctcggcccgctcgttgggcctgacctccggccagacgacccgactgatcgtcattcctcaggcattgcgcaaagtcgcgcccgcactgatgaatgacttcatctccatgcaaaaggacgtcggcctgatttccgtgctgggtgcggtggatgccgtgcgcgccgcacagatcgacgtggccagcacctacaacttcacgccgtatgtggtcgccagcctgctgttcatcctgatgagcgtgccgttcatcctgctgaacgactggtacacggaacgtctgcgtaagcgcgaactcagcggaggaacggtatgagcgaaatgaccaatatcaccaccgaggcgagtgactcccccgtgagcaacaagacggtgctgcgtcttgatgacgtgcgcaaatcctttggaaacacgcaggtgctgcgtggcatttcctttgacattcaccaacatgaggtggtggctttgctggggccttccggttcgggcaaatccacattgatgaaatgcgtcaacctgcttgagcaggtcgatgacggccagatttggctgggcaataccgatatcaccgacccgcgtgccgatcaggacaagattcgcgcacgtatcggcgtggtgttccagcagttcaacctcttcccccacatgtcggtgctcaagaacgtgacccttgccgcaatcaaggttcaccactggagcaaggatcgcgccgaaacccgcgctatggaactgcttgaacgcatcggcatgcgcgataaagccagcgcctaccctgatcagctctctggcggccagcagcagcgcgtggcgattgcgcgcgcactgatgaccgacccggaactgctgctgcttgacgagatcacatctgctcttgatccgatgctggtcggcgaagtgctcaacatggttgccgagttaaaggcccaaggcaccacaatcctcatggccacgcacgaaatgagcttcgcccacgacgcggccgaccgcatcgtactgctccgtcacggcgtcatcgccgagaacggcacacccgccgaggtgatggacgagtcgcaggatcccgagaccatcgagttcttcagccatttcaggcactgagacgaagccgaaaaacaaacaccggattcatacgacgaaaggccaaaatcctaagccactattcatactcaactgatctggtgcttaaaccgcgtccgcgaaccccaacaagttccaccaccccacaacacgcgatgtagccgccgattggtagggttggcagatagttaatcccctgtttgaaaaaggagctttggcttgtcggctgaactcgaagacattcatgaggaatgtggcatcttcggcgtatggggccaccccgacgcctcacgactcacctattttggcctgcacgcgctgcagcatcgcggtcaggaaggtgccggcatcgtctccaacgataacggtcatctcatcggtcatcgcggactcggcctgctcacccaggtgttcggcgatgagcgcgaaatcgaacgactgaagggcaattgcgccatcggccacgtgcgttacgcaacggccggctcgggcaccacggacaacatccagccgttcatcttccgcttccatgacggcgacgtggctctgtgccataacggcaacctgacgaactgcccgtcactgcgccgcaagcttgaagacgaaggcgccatcttccattcgaactccgacactgaagtgctgatgcacttgattcgccgttcgatgcagcgcacctttatggacaagctcaaggaagcgctcaacacggtgcatggtggcttcgcctacctgttgatgaccgaagacgccatgatcggcgcactcgacccgaacggcttccgcccgctctccctcggcaagatgaagaacggcgcctacgtgctcgcctccgaaacctgcgcactggatgtcgtcggagccgagctggtgcgcaacattcgcccgggcgaaatcgtggtggtcaacgatcacggctacaagatcgtgcagtacaccaacaacacgcagctggccatctgctcgatggagtacatctacttcgcccgcccggattccgatatctatggcgtcaacgtgcactccgcccgcaagcgcatgggcgcacgtctcgccgccgaatccccggtggaggccgatatggttatcggcgtgccgaactcctcattgtccgccgcatccggctatgcggaagcagcaggcctgcccaacgaaatgggcctaatcaaaaaccagtatgtggcccgcaccttcattcagcccacgcaggaactgcgcgagcagggtgtgcgtatgaagctctctgctgtgcgcagcgtggttaaaggcaagcgcgttatcgttatcgatgattccatcgtgcgcggcaccacgtccaagcgcatcgtgcagctgctcaaggaagccggcgccgctgaagtgcatatgcgcatcagctccccgccgctgaagtacccttgcttctatggcattgatatctccaccaccaaggaactcatcgcagccaagatgagcgtggaggaaatccgcgaatacatcggcgcggattccttggcctacctttcgctcgacggtctggtcgaatccatcggactgaacgccgacgccccatacggtggcctgtgcgtcgcctacttcaacggcgactaccccaccgcgctcgacgactacgaggccgacttcctgaagtccctcacgcccgaggaccgtgtgcgtctgcctgaattcgcgctgtacaagagcaagtacatcggcaacgagtacaacaccgtgcagccggacgtgcagtaggttcggccggtccttcgactacacctcagtcattggtctttacgactacccctcagtcagcttcgctgacagctcccctgacaaggggagcttagtacaaacgaaaatccactttttgcaggtggctccccggcaagggagcttgaaaatagaacagaaaggccccaccaaatgccaaaagcatatgagaacgccggcgtgagcgtcgaagccgggtacgaagtcgtcaagcgcatcaagtcgcacgtggcccgcacgaaccgtcccggcgtggtcggcggcatcggtggcttcggcggcctgttcgacctagcctccctgggctacaaggagccggtcctcatctccggcaccgacggcgtaggcaccaagctcatggtcgccaagctggccaacaagcacgacaccatcggcatcgactgcgtggccatgtgcgtcaacgacatcgccgcccagggtgccgagccgctgttcttccttgactacatcgcttgcggcaagaacgacccggccctgcttgagcaggtcgtggccggtgtggccgacggctgcgtgcaggccggttccgcactggtcggcggtgagaccgctgaaatgccgggcatgtacgacgaggacgagtacgatctggccggtttctcggtcggcgttgccgaaaagtccgccattgtggacggttccaccatcactgagggcgacgtgcttatcggtctgccttccaccggcgtgcactccaacggcttctccctggtgcgcaaggccctgttcgagcaggctggctataccgtggacactgagctcgccgagctgggcggcgcaaagctcggcgacgtgctgctcacccccaccaagatctacgtcaaggccctctccccgctgttcaaggcgggcgtggtcaagggcgtggcccacatcaccggtggtggcttcatcgagaacatcccgcgcatgattccggacggtctggccgccgaaatcgaacttggcacctggcctgtgctcccgatcttcgacgtgcttgagaaggccggcaatatcgatcacaaggagatgtacaacatcttcaacatgggcatcggcatggtgctggccatcgaccccgcccgcaaggacgaggcgctgaagctgctcgccgacaacaacgaacccgcctacgtgctcggccagatcaccaccgacaccaccgacacgcaaatcgtactgaagtagctccagataccggctcccctcaaagaggggagccaaagactttaggaaggaaaaacatgggtcagaaagtattggtcatcggctccggtgcgcgtgagcataccattgcctacacgctactcaaatcgccgagcgtcgacgaagtcaccgtggcgcccggcaacccgggcatgctcaaggatggcatccgcaccacacagctgagccagtcgaatcatgccgcgctcatcgaattcgtgaaggacaacggctacgactgggtgttcgtgggcccggaagtcccgctcatcgaaggcatcgtggacgatttcgccgccgccggcatcaaggcgttcggcccgtccaaggccgccgcccagatcgagggttccaaggacttcgccaagcagctcatggaccgtcacaacattccgaccgccaaatatcagacgttcggagacttggacatggctcaggcttacgtacacgagcatggcgcgccgatcgtcatcaaggccgatggtctggccgccggcaagggcgtgaccgtggccatggacgagcacaccgcccagcgtgcgcttgaagacatcttcatcgatcatcgcttcggctccgccggtgccaaggtcgttatcgaggacttccttgacggccaggaattctccctgatgagcttcgtcaacggcactgatttctggccgatgccgatctcccaggatcacaagcgcgcccacgatggcgacgaaggcccgaacaccggtggcatgggtgcctacagcccggtgccgcagattccgcagtccgtggtcgacgaggccatcgagaaaatcgtgcgccccaccgtcgaaggcatggccgaggaaggcacaccgttcaccggcatcctgtacgccggcctgatcgccaccgccgacggaccgaaggtcatcgaattcaacgctcgtttcggcgacccggaaaccgaagtcgtgctcccgaaactcacctccgacctcggtgccggcatctccgccattctcgacggcgaaacccccgaattcatctgggatgagtccaacgccaccctcggcgtggtcatcgcctccaacggctacccggagaacgtcatcaagggtgcccgtgtgcccgagatcgaggtcgacgaggattcgcatgtctactatgccggcgtcgcctccgacgacaagggtggtctgattgccaactccggccgtgtcctgctcgtcgaaacctccgccccggacatcaagtccgctcaggacaaggtctacgcaatcatcgacaagctcgagctgcgcggactgttctaccgccacgacatcggcttcaaagccctgaagtaacagaagcggcgcatctgccgcatatttttggcccggtggccatgtcaatcgattgacgtggccaccgggccagatttttctgtcccggtagccgatttcggctctttttcgcaaaccaggacagttgaacacctcgaatataggaatatttggaattcccttccatgcaaaaccgcactattccgccattttcgtaatacgcggacgatactttcggcgtcagttttgtcccggtaagcagaaaatgactcgaaatcaaataccaggacagaaaaatctggcccggtacacgaatcaatcgattgacgtggctgccgggacagcgaacgtcactatgacaacgccatcacccaatatcagcgagcgatatcacgctagctgaatttggcgatgatgttgaacagtttggccttggcttcattgaagggcgggtacacgaggcgcagagtgtcggggaactgcggcttggtaaccacggttttgacgtggctgaaggtgaggaagcctgctttgccgcggtaggcgtcgatgccggacgcgcccacgccaccgaacggcagtcggctggacagcaggtgacccaacggcaacgaatatcccaaagctccggagctggtctgacgttcgaaagtcagccgaacctcgtgatcgcgcgagaacacatatgcagccaacggccgggaccgcttgttgatgaatcggattgcggactcggcatcctcaaccaccaggatcggcagaatcgggccgaagatctcctccttcattaccggcgcatccggtgacgtgccgtatagcacggtaggcgcgatatatcgggcggcgcgatcgaccttgcctccgcaaacgattcgcccggccggatcgaatacgccgggcaccttgtgaatctcgctcggctcaacagcggccgaggcagtcgcatcactatcagcggctgccgtattcgaaccggccgccggcttcgccgcattgttcgcgctaccggtgccaccaccggctgtctcccccgcgcttccgcgtccggcagccgcgacattgaagcgccgcccgaccatatccatggccgcgcctaccgccgatgccacctgtaccagcggcgagctcggctcctcagacggcacggtgccgaccggcaatagcttgcacaatcgttcaaaatgacgatcgttgataatacgaccaaaatcaggtgaggccttcggatcttcgccatagaattcggtgatggctacggcgatgcgctcggccagagcctcggccacatccggcgtggcgagcacatagtcgggtgccacgcaggtctgtccggcattggtgaacttgccccatgcgatacgtcgtgcggccacattgatatccaccgtacggtccacgaagcacggtgatttgccgccgagttccaacgtgaccggtgtcaggtgctcggccgccgcacgcatgacgattttgccgacgtgcccgccgccggtgtagaagatatggttgaacggacatttcagcagttcgccggtttccttgggcccgcctccgaccacgcacacggactcggggtcaagatattgcggcacgagttcggcgatgaggcgcgaggtgttgggcgaaagctcggagggcttcaggcagatggcgttgcctgcggcgagcgcgtcggccattggctccagagccaacagcaccgggtaattccatggcgagatgatgagtaccacgcccttgggctcggcgatcgtccagccggcggcgggttgcagcatccaatgcatcgccttgggatggcgcgcggcccacagtccgagccggttgcggacgaactgcgcctcgccggccaccagattcagctccatcagtatggtttccgccgcgggtttgcccaaatcggccatggccgcagccacgaaagcatcacgattgtccgctaccagacggcatagcgcatccaattgcgcccgtcgccaagccaatggccgcgtacacccggattcgtaggcgtgacgcaactgagcgaaatccgcattgaccatggcacatccttcccgcaggatgcccgggtcggttttccgggcatcgactgtacctatcgtaccgtcatgacgatggcatgagggcgtttgtgctgcaggcaataccagacgtttcggctggtattcgccaaatagcttgggctcggccgaagtaggtggtgcaggtattgtcggcgagttcatcgacggtggtgggattggcgctggccacgccgagcagttcggcattggcaggcaggtcgtgttgtgcggccacagagtccacttgtacctccacatccacagcttcggcagaaggtccgacggcgatatgcccgcctgcatcaaccacaatgcggcggtcatcggtgacatgcacgatggcgtcgcggccctcatagcccgcccatgaccagctggccacgccgtcatgtcctcgttcgatgaatcgcgaggtgcggcccgcgagggtcgcgcgactcgtgaatcatcgcatcgtgcgggagcgtgactggctgccgcgctgccgtatcgcggtccttgccaattgaacggaaccgccagccatgattcacatcgatgcgcttcatggctttattgtaaggcgggagtgattggtctgtgggatctctccctcagtctcacttcgttcgacagctccctcatcagagggagctcacagcactatggcaacggtacagcaattttggacgggcttcgcccgcgttttgctggctcgcctgtcggctcgcacgttgcctacagaccgaaaatcctccggattctccgtcgcggcacagccgctcccctcacctacggatagcccactgagctatccgctttacggttcggccgggctgtctgcgttacggcaacgtcataaaatctgtgtctttgaggtagtttttgccggcggtgatgtcgtattggatgagcttgtagtcggcaagcaactgcttggtttccttgtcgaagtcatcggtggacatcgggttgccgttttggtcgagatagatgttctggccttcgggaatacgatcccagccttggaccttgttgaccacaggcggttccatagcggcaatcttggaatgcatttcggtcaggaacgccagatacgggctgaccttggcgttcatgtgatcggcggcctgtgccacgaagaagttcggcgaagagtaggctgcatcgcttgccttattgccttgggagctggaagccttattcgaccagatgaagtaatcggtcaggtgcagggccaaggagttgttgccatcctcgctggcggacgagtagatgcccggcaagtgatcgccgtagaacactacggtgacgggcttatccagcgcatccagttcgtccaggaactcctgagtggcctgatcggtaatctccacacccttttgataggtctcaatcgactgctgttcatcatcacccagcggcgtacccgtggtggattcagcggtgtagtcgttgttctcataccactcgtggtagggcatgtggttctgcatggtgatgatctgaatgaacttgttcgtcttgccggacctgatgccttccagcgcagaatcataggaagacttatcagagacgtacggcgactcgtcaatcttgtcctgatacttgatcacgtccggaccggtcagcgtgtagaagtgcgagaacccgaacttcttgtagttcgtagcgcgcgagtacatgctggactcgtacggatggtagccgagcgagttggcgggcgcaccccacatctggttgatggtgggggtccaatgctggctcgggaccagctgctggtacgggctggacagggaggaatcgaaattggccatgctcagaccggaaagtcccatgtattcgaggttggccgtaccgccgccgtagccggaggagagcatcaggccggaggtggtgcccgccttgatcttgcggatgttgggcatcgaatccttattggtcttcagtcccggcacgcggctcgggtcggagaaggattcggacagcacgtacaccactgtcgaatcagtgaggttgttggtgcgggaggcgttgattgtctccgcttccttctggtagcgagcggcgaccttcttcatggtctcctcggagtagttgctcggcttgtccatgatcttcgggttgagctgacgggtaaaggccacgagcggaccgttgcgctgcgcgtcatacacggaatcccacatggatggcgtgtcccccaaggcgcgggagaacttgttggccagcgaatcggtggtgctcacatgaatgcagtacaacgcgaacaccagaatcggcagcagcagcagaatcagacgggaggtgaggttcaggctcaggttgtccgtacggatcatgcgacctttgcgcccgtcgaagtggcgcagcaccagaatcagggcgagcagcgcggcgaacgcgccaagtgccacgaggatggtcacgtgcgcgccggccggaatgaaggtgagcatattgccggtgttcgagccaaggaagccgaggtcggcgggcagaatggcctcgtaacggatctcgaccttgaaatgttcgatggcggccacgatgattccgaccgcaagaatcacgatgcttgccgtccagaatctgttgaacagcatcagcaacatgaggtacagcaacgcgacaagtatcacgttgagtacgaatacgaaattgccgtcggtccacatcttgctcacgaagccgaatccgacggtcggactggacagttgcacacgggtggagctggacgaaacgcccacttcgagcgccgtcacaacaataatgtcgaagataacgaagagcacgccgtacgcccagccggggaagggcttgtgggggtgctggggcgtgacttcattggcttcggcctttttgacccaaagcttgaaatggggtttcactgtggtgatactactagtgttctcgctcattcgcctgtttccgtatgggacttttcaagggcatattgttgccgctgaaccttggaaaatccatagttccactatttttcttaccgtttcctaactattcaccctaacgcaaagggtgcctcgggacatccccgaagcaccctgatatataaggagccttccctgatagcgaagcgttctgttctcccctaggcaacgcctcgctatctgacttgattattccccttattgctgttgcggattgccggctaccgccgcattacttcacggcggcggcgaactggtcgaccagtgcgctcatccagtcgagcaggttggtgtactgcttcggcatctgctcggtgagctccacgatcggcacgttgacgtccttggcggcaccggtgatctggtcggtggtggagttggcttcctggctgttgaagacgagcatcttgatggagccgcccttcagggtgtcctggaagtccttgatgtcggccggggtcggctcgctctcgttggcggaagcctgggcgtagcccttcggggtggcgtcggtcatcttgaggtcgtcggccaagtgccaggccacggattcggtggcggcgtacggcaggttctcggtcttggcggaagtctccttgatcttggactcaagctggtcttccttggcgtgccattctttgttgagcttggcgtagtcgtccttgtgactcgggtcggccttctggtaggcggcggtgatggcgtcggcagcgttggaacgcaccttggcggagaaccagacgtgcgggttgtcgccttccttgatgccggcggtttcggcggcggtgaccagcgtggccttggtcgactgggcggccttggtggcccacgggtcgtaatcggcgccgttgaccacggccaccttggcagtgccgaacttggcaacatcctggctggtgggctcgtaatcgtgcgcctcaacgttggtcttggtcatgatgttggtgacttcgacgttgctgccgccgaggtcttcggccacggaaccccactggttgatggaggcgacgacctcgatcttgccggaagacgcggcgctgctggaatcggacttgctgccggcggcattgctggaaccgcaggcggccatcgagaacagggtcgccgcggcggccgcgatggcgagcgcgcgcttggcgttggacatgatggacatgattggattttcctctctaattcggctgtttggccgggcgatgctgctgttgctgcatcatcgcccggcccccaacacgacagaataacatgtattgagaattattatcatttgcatttacgtcggcgtgttgcacgcgcacacccgcgctgccggcggaaatcccgcgccccgacgatgacaacgcgggatcccgccgttttcggcagacgaaacggcagtatccccgcgtccgaacgatacccgcgcgggggttctgccatttaaggcctcggaaacgacagaaatcccgcgccaccttcgttcggacgcgggggttctgccgtttgccgcacatgtcacaacggcatcgcggcacagaccgacgcctgcaccaggtcgacgagccccacggtgcgggcatcctcacagaccagcgcatcacgcaaggcgattgcacggatgatgtcgcggcaggcgcactccccgtctgtatccaaatggcgtgccaggcaaccggcaccaatgaccggcaattcgagcacgcacgaggcctcacggatcaggcgggagaccactacgccggtcgaacgctcgtcatagacgccgttctcctcgcccatgccgtacaggcacaaacggtcgtcgtcaaagaatcgctcttcgaattcgtcaaggcctacggcattggccaccgcacccacgaacatcgactcaccccactcgttgaggcggaaggaatcggccagatactgcgcgaccggcgtggcctcaaggcccacaggcagcgagaccagaaacgcgccggcccgcccttgcagcgatccgagcgtccgttcaaggtcatgtttgaccgtgcagctcatgcagcacccctcgagcccgaacgaatcggactcgccgaacaccaccccgcttgcctggggcttcgcgacgttgcgcacgatatcgagaccggattccacggcttcgttcgggcgcacgtcataagcaatcgagcatacggacgggaaggaatcgaccaacgagaacgccacggagtccaggctcaggcggtcggcgccggtgagcagcaccacgggcgtgcgcccctccgcgtttccctgtgattgcaatgccggatgaatcatgacagcctttcttatttgataatggttatcattatgatatagttgcaggcatgtccaaaacatgtcaaattctgggaacacgcgccggggtcggcaaccgcgtctcccactcgcacaggaaaacacgccgaaccttcgccccgaacctgcagtccaagcggtactgggtgccgtccttgcagcggcacgtcacgcttaccgtgagcaccaagggcatcaagaccatcgaccgcatcggcatcgaggcggcgatcgcccgcatccgccgcgatcagaacgtcaactgaaccggccacggcatcacccccatgctcgggcagtcagtaggcccgccactgtgccggcgcgtaaccgcgcaacaaaccgcgctaacgagctgcatcacccacatggcaccgcgacgtacgcgacataacagcgtgacacccacacatagaaagcaccactcatggcaagcaaatcctccgcaatccgcccggtcatcaccctgaagtccacggccggcaccggattcacctacaccaccaccaagaatcgtcgtaatacgccggaccgtcttgagctcaccaagttcgatccggtagtccgcaaacgggtgctcttccgagagacccgctaatccatctgttcgttcattggacaccagtcgcgaggcgaggaagaggcttaagcacccgccgaaatcgtttccttgttggcattccggcggtttcctctatcaccatttcatgaactcatcttccgaaccttgcggcatgcgcccaatgaacgaatgcactcgtcccagctccggccggcgcgattcccgcgccccggagccttatcaaggagccggacatggccaaaaccagtaagatcaaccgacaattgcagcgcgaacgcatggtcgccaagtatgccgaacgccgcgccgaatacaagcgcgacagcgtcaaccctcatctgaccgccgaagaacgcgccgaggcgatgcgcaagctgcaggccctcccccgcgacgccagccccacccgtctgcgcaaccgcgattccatcgacggccgcccgcgcgcctacaaccgcaagttcggcctgtcacgtatcaatctgcgtgagaaggcacacaagggcaaactgcccggcgtggtgaaatccagctggtgatcgggccggcacaaccggccgtcaggccgtctcaggccatctcaattcaccggattccacccgcgcgtccgacgccattctcatccatatcaccacacaacaccacacaaccaaaggtccataaccatgcaagagggcatccaccccgaatacggccccgtggtcttctatgaccgctccgccgacaagtacttcctcaccaagtccacactggtggccaaggccgtaaacctgccgaccatcgactgggaggacggcaacacctacccgctcgtcaatgtggaggtgtccagctacagccacccgttctacaccggcaagaatgtggtgatcgacgccgccggtcaggtgcagaagttcaacgctcgttacgggcgcaagtgattcgccgcacattccgcaaagaccgtaagacaagaagaaaggaacggacatgaaggtcaaggcatcggtccgctcattggcccgcaaggatggctcctatgtcgtccgccggcgcggccatctgtatgtaatcaacaagaagaacccccactggaaggcgaggcaaggctgatggcactgcccaagtacaaggcgtcccgagcaaacacgcattcgcgccgagccaactggaaggccaaggtgcctcagctggccacggtcagaacgcctgaaggcgaagtggttcaggttccgcagaatctggccgcagccgtacgaaaggggtatatgaagccataaccaacatcgtggattccgcaatccatcaagtctcgtaacaacaactcgacggtccgctccacaggccggcggcgtacgttctttctcccatttccttccgtatgccgtcacctgccggggcgaaccgccgttttatgaggccaccgcatccgatctggccaagctcgccaaggcagacatcgtggtgctcaacggcgccggctacgacggctgggcggaaaaggcgcagcttgacaagaaacgccagaccatcgtgaacgtgggcggcctcatgggcgtcaccaccaccgacgagcacgagcattcccacgaccacgccgagggcgaagaaggccgccatcaccaccatggtgctacgaacccgcacctgtggttcagcccggaagccgtgctgaaggccgccgaagccatcaacgccgcctacgcggacaaggccggggccggttctgccaccgccgccaccgtgcaacgtcacttcaacgacaggaagaaaccctcaaggaaatggacaactggcccacgtattacccggcatccatgagcaaggaggaagtggccaccgagatgctggcccaccgattcgccatcggcccaggcaaccatgtgcaaagttccccgcatatcgatgtgtaccatcggtatgcggggaactcgcatattatctcgaccactatcatgcgtacggtgctaatatgacggcgatatggcaggtgatattcgcatgaaagaacctcgcacgcagcgcacggaacaggtgaacaccgcgcaacaggaccattcggcgaactatctgtttctgattatcggcacgccgctggtggcgttcctgattgcggcttccgcgatgctcgagtcgcgtgggtttccggttccgctggtgcgtatcggcaccggtgccgcggggcttatcctgcaggcgattccgttcatgctgctgggcgcgatgatgtcggccgcggtcagcacgttcgtcagcaccgattctctggcccgccacataccgaaatcgttggccggcggactggccgcggcattggcggccggcctgtgcctaccggtgtgcgattgcatggtggtgcccacgttcgcgaatctgatgcgcaaacgcctgccgctgccgtgtgcggtgacgtttctgtgcgcggtgccggtgatgaatccgatggcgatatggtccacatggttcgcattcaccgacaaaccatggatggtggcggcccgcatggggttgggcatggtagtggcgatagtcgcgggggtgtcgttcgcggtgtggccgctccgctcccctgcggtgcgtgagaggccgctgacgattgggcggtcgttgatttgcgaggattgtgcaggggcgacgggtgattcgcctgagagccgcccccagtcggctttgccgacagcccccgccggcgggggcacggggcgtggattggagcggttcacgcatttcattcggcatacgcatgacgactttatgcggatgatgccgattctgctgttcggcacgatcattgcctccatcatgcgcaccgcattgtcgtcgttgaccaacggttcaagcacgctcgatgacgctggtgccatcgtactgattctggcggcgatgggactggcgttcctgtgttcgctgtgctctacgtccgatgcggtgatcgccgccagcatgattggcgcgctgccggtctccgccatgcttgccttcctggtcttcggcccgatgctcgacctcaagaacacgctgatgctggccacggaatgccggccacggttcatcatccggttcatcgcgaccgtggcggcggcctgcttcctcgccgcgattgccgcccatctggtgatgggagcgtagccatgaagcgcaaagtcacactccccgaccgcgtggaggcgctgtgtttcgcggcgctgggcgcggccatcgcctatgcggcggtgggcggatcatacaccacgctgaccacgccgcgctcgctgccgtatctcatcatcggtgcggtactgctgttcgtgctggcgaccgcagcatggctcggactgttccacgccacggagcgttcggttttacggttcctgatcgccttgattattccggcgctgctgatcgccgtgccgttccagcccagcagcggcagcggcggcttcgacgagtacgccggcggccgcgctatcgccattccccgcagctcgcacaagcctgatggcgcctcgcagctgcacggactcgacacggcgaacaagaccctgaccatcagcgacgacgaattcggctcatggttcgagcagatcgaccataatccgcagcgttacgtcggttaccatgtgcaggtcaccgggtttgtgagcaagtcgcgtacgttcggcgcggacgagttcgagctgtcccgccagttcatgtcctgctgcattctcgacatgaccccattcgggttcatagccagctccggcaaggccggcaccccgcacaatcacgactgggtcaccgtcgacgccgtcatcaagcagggcgcctacggctccgccggccacgagcgccaaggcctgatactgcaggtccggtcggccagcaaagccgcagccgccccgaccggctacttctactggcagtaaatgacgcgtctcccgaaatggaaagcactgcgctgcgccatgactcgccccatatcggcagaaatcccgcgttacaacgaaaggtacgcgggggctctgcctttatagggctcaaaactggcagaaatcccgcgcaggcctcgttgaaacgcgggatttctgccagttgattcaaatcatgtgacaacatgcgggcatctgatttgctttaataacgataatgaatatcatttgttaacagaaaggggcagaacgtcatgagcatcgagcaaaccgcgaccactcggcgcgtgacgcgaccccgactcctcatcacccaggtcctggcggaactatcccgattcgccacggcccaggaaatcaccgacatcctgcgcgagcgcggcacgcgcatcggcacggccaccgcctaccgcaatgtgcagatgatggcctcccaaggcgagctcgacgtaatccacgtcaacggcgaggccctctaccgcgagtgctcggaccagcatcaccaccatcacatcgtatgccacgaatgcgggcggaccatcgaaatcgagattcccggacttgagcagtggatcgacaaagccaccaagcagttgaagtaccagaccatcgcccacgaactggagattttcgacctgtgccccaagtgtgcggcgaagcatgccatcgaaccgcctctcagcgtcggcacctcaccaaaggatggaccactgacgacgccagacgatactggccgtcggcgctcgaacaaataatggcgcagtcccgacgctactggccttcagcatcggtgcccttccaatccttggcgcaatagcgacgatataagctccactcgcatcgttagattgccaacgcttggcgcagcaccgacgccagacacgctcatcgtcgtcgttccaccaatatttggattggtaccgccaccacctataccaggcgtcgacactcggccaacaatcggcccgttaccgacacaaaactgcatgaggtctcattgctcttaatagcagcaatgggcctgataatcactttcaccaactttcgccgctgccgtctgccgccctacagtcgcagacgaacaaacgctgaaaggaacaacaatgactatcaagaccatcgatgagcatgcttacgagatcgttaccgaagagggcaccttcgccgtctgcaaggacacgctggccaagttcgacgccaccaagcacgagcacggcgtggccgcctgtggccgctgcggctgctgcttcaccggcgactgctgcgacgacaccggctgcgagcacaaccacaccgaagagtgcgggggcaaggcttgcctgcacgcttgccacgagaaccgcgaaggccacgagtgcgccttctgccaccttgccttcgacaccaacgagaagtgccacgatgagatcctggccgacctcaaggaactcaaggccgagctggctgtctgagttttaggtttccgatttctcctgcggattgactcctctcagggaggggagccagattccgacacgaaccaccgcgcttaccgtatgatgtctacgggcgcggtggttttgtttttctcgatgatggcgcagatttgctcgggcgcctccttgcagccgcgccggacccatagccagataatcgatgagacggcggagaccagaatttccagcgcataggcgcgcggaatgccgccgtagctcagctcggcacccacacgggccgcctgcccaagcagcatctgcttcaacacatccttgacccggtcatacatctgcatatcgttgcccgaacgggacagtgcgtcgaagaacgcatactcacgcttgacatagcgcaacgcctcggcttcgtgttccagtcctacaatctggtggccaacctcacggccaaggagaacgtggagctcgcctccgaaatcatgaaagacgcgcaggaaccgacccaagcgcttatcgacgtggggcttcaggaccgtatcaacaacttccccgcgcagctttcgggcggcggacagcggcgcgcggccatcgcccgagcggtggccacgaacccgaagattctgctgtgcgacgagccgactggcgctctggactacaacaccggcaagcaggtgctgcagattctgcaggatcagagccgtaagaagggtgcgaccgtggtcattgtgacgcacaattccgccatcgcgtcgattgccgaccgcgtgatccacatgcatgacgcgcgcgtcaaatcgatcgaagtgaacgagcacccgatggatatcaaggatctggagtggtaagcagtatgaccgatctcaatgatttcaccgaaacgaccaaccttacgcccgcgaccgactccgcagccgattccgccgcaaattcagcaaacgactcctataccgcgcccggcagaacgccccacgcgcacaaggccaagcgcaaccgccgacgcaacgggtcattccataagcgcatgctatggaaagacacccgcgtcactatggccaaatccaagggtcgattcgcctccatcgtgagcctgatgacgcttggctcctttgcgctcgtaggcctgttcgtcaccggcccggacatgcaaataaccggcaccgacttctttaatcagaacaatctcgctgacataaccgtcatcagcgattatggcctgaccaaagctgacgaaaacattattcgcagcgcgccgaagtggccaaggcgatgaggggcggggccgtctccgagtccgcgccgatctactacgaggagatgtcgaaagtggccggcaaggagaacgacaaacagtcgattaccctgatcgccactgatgacgcctacaatttcggcgactacatcaccctgcgttcgcgcaccgggcacaagccgcaggtgctcaccgaccgtggtgcgatcatctccgaacgtatggcggggatgatggacgccaaggtaggcgacacgattaccgtcaccgattcgagcggtaccgagcgcaaggtgcgcgtggacggcatcaccgaaatgcatatcgggcatttcatgttcatgacttcgggtggctataagcacgtgtccggcgaacagtaccagtcgaacgcctatatggtgaggctcaagaaccatgagacctccaatgtggagtcgcgtagcgccaagctcataaagttggacggcgcgaagggcattgtgcagaacacgacttcgaagaaacaggtggccacaatcgtcgacttgccggatcagatcatggaagtgctgattctcgcggctgagctgctggccgtggtgatcctctacaatctgacgaatctcaacgtctccgaacgtatccgcgaactgccgaccatcaaggtgctcggcggactcggcgtgctggtctaccggcggttgaagacggtcgacatgctcggcgccctgaagtcggtggaatagcagcggaatagcaaatgggatcggctttgaagccgatcccattcaattattcgctcactgctttctgagccttctgcgctttctgctccttttggcaatcagggcatagtccgaagacctccagggtgtgggattcgacggtgaagccgtggccgtcggccactttgcgcagccaagcctcgctgggcgggtcgatttccacggttttgccgcaccgcttgcacaccaagtggtggtgatgtccgtcgtcgccgcataggcggaacagctgctggccgtccaggcggatcgtgtcggcggcaccggcatcggccaaggcgttgagctggcggtacacggtggccaagccgattttcgagccttcgtcctccagcctgcggtgcaggtcctgagcggagatgaactcctcacagtcggccaaggcggcgcgaatcgcgtccttctgcttggtctggcgttcgatatgttcaaccatcgataaggtcacgccttctttttcaggtcgtcccagcagccggtggcctcaaggtcagcaaccgtggcatcagggttgtcggtgagcacggtgatgtggcccatcttgcggtcgtggcgcacttcggccttgccgtagtcgtgcacattccactccgggtgggtggcgatcagcgcgcgcgtcggctccacatgctggccgagtacgttgaccatcacggccggcgagagcagcttgggcttgggcatgggccagccggcgatgccgcggatgtgggcgtcgaactggtccatcgagcaggcctcgatggtgtagtggccggagttgtgcgggcgcggggcgagctcgttgacgatgacctgatcgtccttggtgatgaacagttcgatggccagcgtgccagccagttcgaagcccttggccaagcgaatcgccagttcatgcgcttcgcgagccacatgttcggacacttcggcgggggcgatggtcatgtgcaggatgttgttgcggtgctcgttacgcacgatggggaaggtgacgaagtccttgccgttgccggagaccaggatcgaagcctcgaatgcgaagtcgacgaagccttccaggatgctcggcgggaagccgccaccacggtcggaacgggagcggatcttctccaagtcggcgtcggaacgcagcacgagctgaccgtggccgtcgtagccgccggacacggtcttcagcacggccggataatgaatatcatccaatgcggcgtcaagctcatcgaagttgttgacggcgcgccacggtgcggtggcggtgccgtggtcgttgatgaaccgcttctcatgcacgcggtgctgggtcacgcgcagcaagtcagtgccctgcggggtggcggtgatgccgcgcacctcgtcgatggcatcggcgtccacgttctcgaactcgtaggtgagcacgtcggactgcacggccagatcatggatggcggttttgtcatcgtattcggcggtgatctggaagtcggccacctgaccggtcgggcagttcggcgtcgggtcaagcacgccgacgcggaagcccatgtagcgggcggacaaagccatcatgcggccgagctggccgccgccgatgatgccgatggtcgatcccggcatcagcatcgaaacacgaccgcctgtttcctcagacaagctgggcattggattcagccaccttttctttcagttcgttacggtaatcctcaagcttgtcggccagttcgggctcgaaggcggagagcatctgcacggcgagcaggccggcgttggtggcaccggagttgccgacggcggtggtggccaccggaatgccgccgggcatctgcacgatggacagcagcgaatcccagccggacagggcgtgggagcgcacgggcacgccgattacgggcagtgtggtctgcgcggcgatcatgcccggcaggtgggcggcaccgccggcaccggcgataatgaccttcaggccattggcgcgggcgttgtgcgcgaactcggccatgagctcgggcgtgcggtgcgcggagatgacctgcttgtggtaggcgacgccgaactggtcgagaatatcgcaggcgcgcttcatggtctcccagtcgctgg

SEQ ID NO: 2216 - DNA, 11022 bp, Unknown
  R51_24m  MAG No. k141_31185
catcgccctgtacgcgctgatgatcgtgttcttctgcttcttctacacctcgatcacgttcaacccggacgagaccgcggacaacatgaagcagtacggcggcttcatccccggcatccgcgccggcaacgccaccagccgctacctgacctacgtgatgaaccgactcaacaccgtcggtgccgtctacctgctgttcgtggccctgatcccgaccgtgctgatcatggccctcggcctcaacgccaagctgccgttcggcggcaccacgatcctgatcatcgcgggcgtgggcctcgacaccctgcgtcaggccaaggcccagaccgaacagttccagtacaccggcttcctgtttgaaaacgtggaccacaaagaaggctgacgcccgcttggcagcggccgcccgcaatgggccggcggccgcgcgaggagtggaacagtccagtggactgttccacgacggagcaatctttcttccatatataactcaatggctcccctaaccaagggagccaaaaccgtattaataaccgacacaaaaggagaccaccatgcgtctgctcatcatgggcccccagggcgtgggcaagggcacccaggctgctctgctcgccgagcacttcaacatccccaccatctccaccggcgacatcttccgctacaacatcaagaacaagaccgaactcggtcttgaggcgatgagctacaccgacaagggcgagctggttcctgactccctgaccaacaagatcgtcaaggatcgtctggccaaggaagactgcaagaacggctggatcctcgacggctacccgcgtaacgccgctcaggtcaccgctctcgacgagatgctcgccgacctcgacactccgctcgaccacgtggtggccctcgaagccgcccgcgacgtgctgctggagcgtatgaagaagcgcgccgccgagcagggccgcgctgacgacactccggaggccatcgccaagcgcctggagacctacgagaaggaaaccgctccgctgctcgacatctacgaatcccgtggcctgctcgtcgtggtcaacggcgtcggcgacatcgacgagatcagcggccgtatcatcagccacctcgagtagtaggttcggcagcccggccaacaagccggagtgatgccgaaataccacatcaacgtttccatacccctgtgcgacacgccgagtgttcgtgcaggggtatgtgcgtatatagttgacagttggtgtgtcttcggatatgccatagtaatcatccaacggaataggactagaggcacatggcaaaagacggtgtgattgaagtcgaaggacaggtagtggaagcactgcctaacgcgatgttccgcgttgaactcgagaacaagcacatcgtgctcgccacgatttccggcaaaatgcgtaagaactacattcgtattctgccgcaggatcgtgtcgtgctcgaaatgagcccttacgacctgaaccgcggacgcattacgtaccgttacaagtaaaggtacacaagaaaaggataaccatgaaggtcagccctagcgtgaagaggatctgcgaaaactgccgcgtgatccgccgtcacggccgcgtcatggtgatctgcgtcaacccgcgccacaagcagcgtcagggctgagagcagattctccagcggcactaagtaaataaggcactctctcacagtgcttcccgcaagggaacgacactgaaccacgggtacgtaggcccgtgccgggtaaccgggcgagcgggtgcaagacctacggcaacaagaaggaatcgcaatggcacgtcttgccggagtcgacatccccaatgagaagcgcatcgagatcgccctcacctacattttcggtgtgggtcgcactcgtgccaaggaaacgcttgccgcgaccggtatcagcccggacatccgcgtcaaggatctcaccgacgagcagctgattacgctgcgtgactacctcgaagccaactacaagatcgagggtgacctgcgtcgtgaagtcgatgcagatattcgtcgcaagattcagatcaactgctaccaaggccagcgtcaccgtaagggacttcctgtgcgcggtcagcgcaccaagaccaatgctcgtacccgcaagggcccgaagcgcacggtcgccggaaagaagaaggccaccaagtagtcggtggcatgattcgggccacgggatgatttcatcccatcgcccgaacgtcaacaacaaagttcgttactaggaaacgagggtcaatggcagcgcctaagcaagccgctcgtaagccccgtcgtcgcgaccgcaagtcggtcccggtcggccaggctcacatcaagtccactttcaacaacacgatcatttcgatcaccgatccgtccggtgccgtggtgtcctgggcgtccggtggtgatgtcggcttcaagggctcccgtaagtccacgccgtacgccgctggtatggctgccgagtccgccgcccgcaaggcgatggaacacggcgtcaagaaggtcgacgtgttcgtcaagggcccgggttccggtcgtgagaccgccatccgttccctgcagtctgcgggcctcgaggttggttccatcaccgacgtcaccccgcaagcccacaacggcgttcgtcctccgaagcgtcgtcgcgtctgagcactcagcaataccaaatccatccaaaaccgcctgaccggtgagtgcaccaccgagttcaagctgaaaggataaccacagtgcttattgcacagcgtccgactcttaccgaggaatctctgaatccgcagcgctcccgcttcaccatcgagccgctcgagcctggcttcggctacacgctcggcaactcgctgcgtcgcacgctgctgagctccatcccgggtgctgccgtgacctccgtgcgtatttccggtgccctgcatgagttcaccactctgccgggcgtccaggaagacgtcaccgagatcctgctgaacatcaagggcatcgtgctcaccagcgaatatgacgagcctgtggtcatgtatctgcgcaagagcggcaagggcgaagccatggctggggacatcaccccgcctgccggcgtcactattgccaacccggagcagcacatcgctaccctcgccgacgatggcgaactcgagatcgagttcactgtcgagcgtggccgtggctatgttcctgcccagatgaacaagcaggacaatgatgagatcggccgtattccggttgattccatctactccccggtactcaaggtgagctacaaggtcgaggccacccgtgtggaacagcgcacggacttcgacaagctcattctggacgtggagaccaagcccgccatctccccgcgtgacgcggtggcttccgccggttccaccttggtggagctcttcggcctgtgccgtgagctcaacgcccaggctgaaggcgtcgaggtcggtccggccccggtggccgaggagaccaaccccgagatggccgttccgatcgaggacctcaacctgacgcagcgttcttacaactgcctcaagcgcgagggcatccacaccatcggtgagcttgtctcccacaccgagcaggacctgctcgacatccgcaatttcggtatgaagtcaatcgatgaggtcaaggagaagctgcagaccctgggcctgagcctcaagtcctcgccgatggccttcgataccaataatctcgaaggtggtacgttcttctcgccggaagacgagtgatctgcctctttgaccaatcgttcgttcactaggcaagcggatgttcgggcatatgcccacctgcttgcctgaagaacggacatataaggagtaaacccaatgcctacacctaagaagggcccgcgtctggcttccagccccgcacacgagcgcctcatgctggcaaacatggcgaccagcctgttccagaacggccgcatcaccaccacgctgccgaaggccaagcgccttcgtccgctggccgagcgcctgatcaccttcgccaagcgcggtgatctgcactcccgtcgtcgcgtgatgcgcgtcatccgcaacaagtccgtggtgcacattctgttcacccagattgccgagcagatggagcagcgtgaaggtggctacacccgtatcgtcaagatcgccccgcgcgttggcgatgccgctccggccgctgtgatcgagctcgtcaccgagccggttgccaagaaggctgttgtgaaggaagctgaagccgccgccaaggttgccgaagaagaggctccggccgttgaggctccggtcgaggagaccgccgccgctgaggctgaggctcccgctgaggaagccgctgacgccgagaaggccgagtgagctgaatagcgtttcgccaagctagctgaaagggctggaatccgtttgggttccagcccttttgcgttgtttcatagaaactacaacgtacgtacggctcgaatggcctcggctcttgcggccagctgatcatcgacggggtatgcgatatgctccaaagtcaggccctgcggcgcaatcggcccgcttgagccttcacgcactggctcggccattttgccggcaaaccattccagagatttgcgtcccgaaccaactttgatgcatgagccgaccaaggagcgcaccatattgcgggcaaaggcgtccgccacaatcgtgaacaccgccagtccggactccagcgacggagtccgatatgcttcatgcgatgccatcgcatccggcaccaggggagtgatcggcacccgccgccaataggcggtcttgacttcgcggatcgtagtgcctcccggattcggagtggcgaaggaaccaaaatcgtgcaggccgatggtcaatgaggctgcgtggttcataagctccagatccagcgattcatccacggtaagcacgcatccacgcaggcgcgggtcgatctcggacgaacgatcggcgacccgatacacataagtgcgctccaatgcggagaacctggcatcgaaaccggccggtgccacggcaatgccatgaatgacgatgtccgaaggcagcacagccttgagtctgcgagtcagcgcctcggtgaccggaatggtcatgtgacctacgcagcgattcagtacctcatcggatacatccaaatgcgccacttggtgggaggcgtgcacaccggtgtcggtgcgcccagccaccgtcagacgcaacggttcggccgcatcatcggccggcacccgcagcaccttgtgcagcgcatcttcaatggtgccttgcaccgtacgcagattgggctgtttggcccagccatagaatccgccgccgtcgtaggccaagtcaatgcgcagtcgtgtcatagccattcattgtaacgagtgcggtcggcgagatgcgcgcggtcggcgagacgagtgcggtcggcgaagtgacctgcctgtaacattctcgcgcgtttgctgaaacggggccgccttaggttgtaaccatcaaacccggttacggcttgcggcgtcagcgtgcgctcgaaacgcctaaccgcttgaggccacagaagccgccacagcaaggagcaggcacgatgatcgaatccgcagcacgcagactggcccatgaactggtaaaccgtcgcgaggcgatcaaccgcgagctgtcccgcaacggcgtacgcttcggcatctacaagaacggcgaataccatgaccggctcttcccgtacgatcccgtgccgcgcattatcgaatccgacgaatacgacgaattggagaagggcctgaagcagcgcgtcaacgccctgaacgcctatctgaaggacatctactccgacaaggccatcatccatgacggcgtcgtgccggaggaatacgtatacacctcggccggctacttcccgcaggtcaacggcgtgactcctcccggcggcatcttcgcgcacatcgccggcgaagacctggtccagggtgaagatggccgctggtgggtgctggaagacaacctgcgcatcccctcgggcgccagctacccgctgttcgtgcgcgacatcgagcgccgcatctccccgcgcctgttccgcgacgtgcacatccgcgacaatcgcgaatacccgcgcctactgcgcaaggccatggactttgtgtccactgagggcatcgccgtggtactgacccccggccgctacaattccgcgttcttcgagcacgcctatctggcggagaaaaccggcgccgcactggccttccccgaagacctcgaagtggtggacaacaaggtctacttcctcgactacgccggcaaacgccaccgtgtgggcgtggtctaccgccgtctgtccgacgaattcctcgatccgtttgccttcaatcctgattcggtgatcggtgtgcccggtatcctgtccgcctaccgcgcgggcaacgtggccatcgtcaacgcgccgggcaacggcgcggccgatgacaaggccatctactacttcgtgtcgcagatgatcaagtactatctcggcgaggaaccgattctcaacaacgcgcccacgtatatgccgatgttcgaggccgaccgtaaggaagtcctgaatcgtatgggcgagctggtcatcaaggatgtggccgaagccggtggttacggcgtggtgttcggttcgtcgctggatgctgccgcacgtgaggagcttgccaaccggatcaaggaggagcctcgtcgattcatcgcccaagaggtgattcagttccgcgatatcgatgtggtggacccgaagaccggtgagatgtcgccgcgcaaatgcgatttgcgtgcctttgtggtcaccggcaaaaacacgcacgtgtggtattcgggcttgactcgatactcgtcggtgcccggccagatgatcgtcaactcgtcgcagggtggcggattcaaggatacgtgggtgttggcacccgaatccggcgtggagcatgaatacggtgctgaagtgcaggtggcgaacctgctgagccagtcccgccgccactcgttgtctctggtcaccgcctccaaggcagacaacctgtattggctgggtcggtacaccgagcgcgccttcaccacgctgaaccagttcttcccgttctacgatcgtgtgatggacaccgatgtggacgccttccgtccgttcgctcacgcactcgacctgcccgaagatttcgaggacttcgacgggttcgtgaacagcttcctgtacgacgggtccaaccctgattcggtgcggtcggccgtaacctccgcattcaacaacgccgtgattctgcgcccggaattgagctcgcgtctgttgcagtacgtggagttggcgatgaccaatatcaccgatgccgccaaatacgcggccgacgccgaggacatctacaagcagcgcgatattaccgatgacatgctcgccttctggggcggcatcgagaattcgccggtcgaccccacgctgaaggcgttcatcttcatcggcaagtatcttgagcgcatcgacctgtacacgcgcttcggcctgacgatggaggagatggaagccccgcttaggaagctcgcctcctactcgatgatcctcgacggcatgccgttgcctagttgcttcgccgatgggctgagctggctggtcggtcagctgccgtctcgcgggtatcaggaagtcgccgacctgctgaagaagtaccttgacgattattccggccgtgtcagcgccctggccatcaaagacatgggctcactgagctccatgaacatggatgccaagcgcccctaacccgacgttcgccctgacgggttcaaatgctatggtggtatggcgaaaaaccgtgcgccggccgatgcgtatcggcgaattgccggaatatatgcgtggactgtgagcgcgcggaccatacctcagccatggctgtagtgtcgttatcccgagaatgtgccggttgccggctcgtgtgtaagtgcaggagacgttgtgaaaaaactcgtgttcgactatgagatgaagctgtccttcagcgcaccggtcaccgatcacaggttccagcttcgctgtattcccgccactggccctcgccaacaggtgattgacgtggaagtgaagattcagcccgaaaccgaactcgaaaccaccatcgactcctttggctccgtggtgatgaccggattcatccccgagccgcacgacatattcagctattcggtgaccggcatcgccttcgtggacaatgcgcatatccataaggaagcctataaaccgctgtaccgattcaattcagcgctcaccattcccggcccgaacgtggaggcgatgatcgacgtatgccgcgaacgcttggctgcgttgcctgccgacgccactccggtgcagcaggccgccgaagtgatggatgaggtctacaaggcgtttgtgtatacgcccggttccaccacgattcgcaccaccgccgaacaggccttggcccagcgcaagggcgtatgccaggattatgcccatgtaatgctgtccgtgtgccggcatgtgggattgaccgcgcgctacattgccggtttgcttgggggagagggcgcgacccacgcttgggtcgaggtgtatcaggatggccgatgggtcggactggatcccacgcataaccgattggtggacgacagctacatcaccatcgcccacggccgcgattaccgcgactgcatgctcgacatcggcatcttctccggctacaacgtccagcagacccaatgggtcaatgcctccgtccacgaacaggtggcgtaaacaaaattccaagccccctctgatgagctgagccgtgaagaaaacgccggaggcgtttttaggcgaaggcgaatgacagtgagcaaataaaatggcagctggaaagctgtccttaaattgcgttcgagctgtcgagcgtagcgagactgagagagaccgctcaatgcagagtggccccgtcaccgcttctaccaccaccaatattcggattttcgtcgttgcaacattcggattttggtagttgagaaattcggattattgtagttagaaagttcggattttcgtcgttgcaacattcggattttggtagttgagaaattcggattattgcgatggcggacgtgaaataacgggaggtgcgcggaatggccgattctctggcgagcgacatcaagccgaaagcctatcgccctcgtatcgtggatgcacagatcgaacgatatatgcgcatctttggcgcggtggagattaccggcaccaagtggtgcgggaaaacttggtctgcgcgggcccatgcagccagcattacctatgtggatcgcaataacaatttggctgcggctaaggcggatccgtcattgatgctgctgggagataggcctcatatcgtggatgagtggcaactcgctccagctatatgggatgaagtccgtcatcgcgtcgacgatgattccgcgaataaaggtcagtggattctgaccggttcatccactcctctcaatgagaatcggccgaaccatagtggtgcgggacgaatcggacgtatccgtatgaatcctctgactttatatgagtccggactctcgacaggtgcggtaagtctcagtggactgtttgaacataagttcgccgctgcaaaatcagagataagtacacaaatgttgttggatgccgtatgccgaggtggatggccggaggcggtggctctgcctgtatctgacgcacagattctgattcgggaatacatgcgactcacgctgactgagagtgtgcccaggcaaggcaaggatcctgatgtggctcgtcgtctgctggattcgcttgcgcgcaatatcagtcaagctgtgacattcaaaaccttacgtaaggatatgtacggtactgaagaaaaccttgacgatttcatttcggagagaacggtatccgggtatacggccatgttcgagaacatgttcgtcatcgatccgataaagggctgggtcccgccggcacgggatccaaagcgactccagaccaaggcgcgtcggtattttgccgatccttccattgcggccgcaatgttgggcatgagtcctgctgctcttatcggcgattggcagacttttgggtttctgtttgagaatctatgcatccgtgatctgttggtgtatgcgagatctctcctcgatattgggatagaaccggttcggtattatcgtgacgattccggtctggagtgtgatgccattattgaattgtccgatggacggtggggcggcatcgaaattaagtccagtgaggataaagtccctgaggcatcggcaaatctatgcagactgaaagataagctgctgagaaatccgagtgcgcgaacccgtgaaccggagttcttggcggtgttggtgggggtcggcgagttcgcgtatcaacgcgatgatggagtgtatgtaattcctgtcggagtgcttggcgcgtaaacgcaatgccagcgcttcgggcgaattccgggattgtgatctgacatgtctcaagcggcatacactcgagacttgctcagcgaaactccgatttgccaggtcggcagaatgtggcataatgaacaagttgccattttggcagcatggataagtgtccgagcggtctaaggagcacgcctcgaaagcgtgtgaggtgaaagcctccgcgagttcgaatctcgccttatccgcctttagggttccggggtttgtcccggaaccctttttgtttttgatgcgaacgtccgtattcggggttataggccaaaatggggttataggccaaaatgtgtgtccggcggtctagtcgttcgactgccattcgacccgtgtgtggaactcgttccagtcgatgccggtgccgtatcttgcggggatgccgaacgtctcgtactggccttgcgggctcctttcccatgcctgccggtagaggcgctcgagtcgttcgtcggtcatcgcgttggccgcgagccacgcgtcggtctcgggacgttccgtgtgctggtggcaccaccagcagatcgccttcagccgtctgaccagccgcagtccgcggtggcggcgcggcatgtcg

SEQ ID NO: 2217 - DNA, 3749 bp, Unknown
  R51_24m  MAG No. k141_31195
cgcgaccccaagagctaccgtggcgtggaccgcgaccagcaggtcgtggacatcatctccaaactcaccagtgagaaggccacgattccggcaagctgcgtgcagcgcgacgccgccgacaccggtctggaatccaacagcgccgacgtggtgatcggcgaagccatgcttaccatgcagaccgagcgtggcaagcaggcgattatcggcgaggccttccgactactgcgcgccggcggcacctactcgattcacgaactcggcctgcagccggacaacctggacgaatccgtcaaggatgaggtgcgcaagcccgaagcgtaacagcggtgtgccggcccacgatggccggataatggaaaacaagcaaaagcgatgacgcgtatgtgaggtacgcgcgacgaataggagaacatcatgaccgatgagaacgagcagcagaccgtatgcaaggcagggcgcgacgagcagcattgcaagtgcaagcagcgtagggaagccgccgcggcggccgaggcggctgccgccaacggcgaacaccactgcgcctgcaagcacgagcacgccgagggcgcggccgcggagccgggcgcgaagaaggagtgccactgcaagcatggcgaagtcgcggccgctgaagcgggtgaggccaagcactgcgcctgcaagcacgacgcccacgacgccgaaggccacgccatttcgaccgagccgcatcttggattcatcgaagacttggcctcgttgatcgatattcaggaggaggccactgtctcccgtacggtgctgcgcgaggacggcctgcgcgccgtgctgttcggcttcgacaaggaccaggcactgagcgagcacaccgcggccatgcccgtgatcatccaggtgctggaaggcaagctgcgcgtcggcggcgaaggccgtgaagtcgagcttacggccggcggcatcgtctacctgagcgcccgtctgccgcacaccgtctatgccgtcgaacccagcaagatgctgctgcagatgttcgacaaccgcggctgattcggtgaatgactggcaatcacgtatgagaagctgattgccgttagaccattcatgatggcttccttcatatggtgttggtcgtatgaccgtaatatgaaggaagccatttcttagacgttggggagagcttgaattcgacgccatcatcatacggcctcaagggtgcataaacgatgtcacaagtagacgcacgcccgccagccatcccaaacgtcacagcaaacctagaacccgcatgagctgacggccgatattcgccatggctgcatcatcaaccacgccgacttggtatcccagcagtttgcggtcgacggtgacgatcttgtccgtcatcacgtaactcactttgttcaggccgttctccggacttggttccaagcggacccgcgtgtcgatgtcggaggaatcgtatgaggtcagcagacaagtgatgacggaatcgaaccgatcgacggcatcgctctgcacgatgacaaccggccgtggcttgctggcgtagccatcggcctgcaacgtccaaatctcacctcgtttcatcggacatcctcaaggcgagacgactggcatactcagtagcgtcccgctcggacgcaaacggctccacgtcatttcgtggcaaacgcacctcataggggaacccacggtaatcattgaacgcgctgatgaacatacgcagggcatcggccggggtggtacccagctgtcgggtcgtctccttaaacaacgcagcctgctcgtcatcaactcgcgtggcaatctgcatgctcatagccactccttattgctatttactatctttttgcaccaaattgtatcaaatacttgacttcagagtgaagcccccgcgttccaaggcccttgtctatactgtagacagttgttcttcatatgtgaatcgcccgatatgactttggagcgggcttgtgattggaggggccggatatgacgagttacgtgctgcggctctatgatgatccgctgctccggttcgatgcgtcgtatggcgagggcctgctggcgggcaagatcgaggcgcatgtccgctggttcgatgagtcgaagcgcgcgttgctgccgtttccgttggctccggagccggataatgcgaagctgacgacgtggctggagcggcgcacgattccgaagaatcgtgagttcgccacgcaggttctcgcgcaggcggggttgaacattgcggatacgctgggcatcatcgacctgtgcaagggactgtcggtcaacgattcgttctgggcggaacgcgacggtgagaacctcaagttcgcggacatcaacctgtatgacaatccgttggacgagacgctcgccatcgtggcctacacggggtatacgtcgagcgagaagcatgcgatcggcctgtcgagcgagtggacgacggacggccagttcccgaaggcgtggcggcatacggaacgtgggctggaactgtggaaggcgggttccgaatggtatgcgaacgccggtttggaaccgtattccgagtatctcgcctcgcagctggcgcgcaggctcggtgtgaatgcggtcgactaccgcatcgcccgttggaagggcaagctcgcgtcggtgtgcggttcgatgaactcgaaggacgtgtcgttcgtgccgttctatgtggcgacgcagctggcgtcgttcccggagatcctcgccgccgcacgcgccgtgtccgaggaatcgttcgaggcgatgcgcacgatgctagtgttcgacgcgctcatcgtcaatcaggaccgtcacgccaacaaccacgggttcctgcgcgacaaccgtaccggccggattctgggtccggcgccgttgttcgaccataacatgtcgctgttcaagaacgacatgcgcgccgactgggagggcggcgcgtggattccgcaggtactgtccgaacgtcagccggcaaattctcgtatgacgttccgcgaccagtgcgcggccatcatgggcagcgcgcagcatgagatgttgcgcaaaacgttggacgtcaccttggagaacgacccggcttacccgctggagccgggccgcatcgaggcgttgaacgactacctgcacgcggccgcacgatccctgctcgaactgccggtggtcgacgagtcgaagctgtccgaccagctcgatgcgttgcggccgtcaatcgaacacgctcctgtcatcctcaacgaacgactgttgcgataggccaaaccggtcgagttcgccaataaaaaggaccttccgggttgcgcactgtgaggaggcgtggaaggctgctattgacttgaatcctattatgcaaccgtgactgcgtgcctgttcatgttccagtccggttgtgtgatggacaagtgcggtatgaaggccgtttgcatatccacacatggctttgatgtctcagctgtccagggcgaaggtgatggaatcccgtcctagaaccgccgcgttacgtgcgcgactggcggcagcatcgcggtggccagggcgaacgtcaccgccaggaccgcgcccgccgggtggacgctgtacgcccagccgtatgcgatctgtccgaggggctgggcgcacatgctcgcggagagcgcgagcgacatcaccttgccggtcatgtcctcggggcagcccatctggatcgccggcacggcgatgaggttcgcgagggtgatggcgatcatggttccgcaggtgctcgccgtgagcaccgcgagtcgcatcactcc

SEQ ID NO: 2218 - DNA, 3420 bp, Unknown
  R51_24m  MAG No. k141_32114
cttaaccttgatgtgtcaagtctttcacgcattcgaccgccggtttcacccgacatgccgaacacacaacttcacaaatatatagcccaataccgacaaccgcaactcttgcgtgtatcatgggcgaacttcggcggttcacgcgcggttcgagcgtaacttgcgagtgggccatcagcggttcgcgagcggttcggcattggttcgccagcggtccgcaagcggttcggcattggttcgccagcggtccgcaagtagttcgccagcggttcgccagcggcgaattacgctgcaaatcgtagcgtttacccgataaaacacgccggactgcctattccgcatccaacaaactctcatataatctcggtataagagacggcaagggacgaaggggtcctcgtgcaacttacgacgaaggaggctgtcatgttgaatctcaggcgaggtatcggcactcacgagcccagcgtgatttcactgggtcaagtctgggtggacattatgctcaatgtggacgaggtgccggcacagggcggattcgccgtggccgatcatccgaagccctccattggcggcagctatcgcgtgctgcaggcggccagccgcatgggcgtgccgaccgagcacgccggcattctgggcaacggcctgtgggcgcatttcatccgccagtcattccaggacaacggcatcacgcatatcggccaggatcgtcttgatgaggattccggtttccgcgtggtgctgagctccggcgcgccgaagaagacgttcatcgcttcctatggcgccgaggctcatggcgacgcggacacgttcaacacgctggagccgcagcccaaagacgtggtgcacatcagcggcaacacactgatggaccacacggccaccggcgtggacggattcctactcaaggccggtaccgacccggctgcacgcgactacacgctggtgatcaatcccaccaatacgttgcgtctggtcaatgaccatatgcttgaggacctggtgctcgcacgcccggtctggtcctgcaaccgtcaggaggccatgacgctggccgagcgcctgggcgcgccgatcgacgacagcaaggtcaccatcggcggtggactcgacgacttcatgcaccagttgtgtgacggcttgggcactacactgcgcgcgccgctggtggtgcgtgtcggcgcccgcggcgcttggattcgtgagccaggtggcgagacgattcatatcgagggatacccgaccaaggccgtacacacccgttcggcgggcggttgccacaccggcgtgatgtgcgcgatgctggcaaagggccatagtctggccgaatcggtaaagatcgccaacgcggcggcatccatcgccatccagcgcagcctcaacggcgtgccgcaatgccccgattacgacgaggccatcgcgctgatcggcgaatagtttccggacgattgagtggatttcctcatctgggggaatccacgatcggctcccttcagtccgcttcgcggccagctcccctcagcgaggggagctatttttttgctctggctccccttagaaaggggcccggcattattcacccgccgttcaactttggcggttttctaccctagtccgcgcttctacgatagattgagttgaataccgtcgaggagtgcatatgaccgatcccacgaatgtccacgaaccggtgccgcaaagcgccaaactgaccgcccgcgagaagaagtggatcatctacgacgtcggcaactcggcattcgtgctgctgtccaccgccgtcatccccatttacgccaaatcgctgatgccggcggacggcaacatcgtgtccgcctggggctacgcgcaaaccattgcttccttggtcatcgcgctgctcatgccgttgctcggctccatcgccgacgtgcaaggcatgaaaatcaagttcttccttggcttcttcggcaccggcgtggtcacctgctgcgcaatggccctgcccctgacctggctgccgttcctggtcgtctacattctggcgaccatcggcctcaacggctcgctgacgttctacgattcgatgctcatcgacaccacctcgaacgagcgcatggacaaggtctcctcgcacggctacggctggggctacatcggctccaccgtgccgttcatcttctgcatcgcgctgatcttcggcggcccgtcgctcttcgactggtccacggtggcttgcacgcgcgcctcgttcatcatcaccgccatctggtgggtggcgttcaccatcccgctgcttaccagctaccgccaggtgcactaccgtgccacccgcgaccagctgggctcggccgtgcgcggcacgttcagcgaactggcgggcacgttcggcaaaatcgtgaagaacaagccgttgtggatgttcatgatcgcgttcttcttctacatcgacgccgtgaacacggtgatttcgatgagtacctcctacggtgccgagcttggcatcgactccacccagctggtggtggcactgctcgtcacgcagttcgtggccttcccctgcgcgattctctacggtcgtctggccggccggctcggctgcaaagtgatgatcactgcggcggtcgtggcgtacatgtgcatcgtgctcttcgccgcattcttcctgaagtcggccgccggattctgggttctggcgattctggtcggcgtgttccaaggcggcattcaggcgctgtcccgctcatactacggcaagatcatccccaaggatcacgccaacgaatactacggcttctacgatatcttcggcaagaccgcctcaatcatcggcaccttcctggtggccaccaccacgtccctgaccggcaacgcctcgttcggcgtgctgtccatcgccgtcctgctcgttgtggcgctcgtcttcctgctgctccagaaggatccgacgcaagcgtaatatcacccatcaatcagcaacaggaacgccgaagcagcgataaaacagcagaccctaccgcccgagccgcgacctgaaacaatttagccctgcacaacacacatattttgacagggcggtagttgtcgcaaattctgcgacaactaccgttggtaaaccgaacgctataatcagaaactttcagatgctgagttccatgcagtatcccctgtgaccgcaatgcgggcaggtaagcttgcgtgtcttgggcgtgtgtgcggcgaatacgaactctcgcatacccggctggaaggtctcatggcaagccggacataggtactgcacgcgggagcgatagtacttcatcgcagcaacagtgagcgcaatcgccagcagaacggcgaccggcagcggccaccatacgtctgtcatcacaccgatgacgaggcatgcaatttgcaacaaagtcgcgggcaatgcgattgccagcatgacca

SEQ ID NO: 2219 - DNA, 7382 bp, Unknown
  R51_24m  MAG No. k141_32455
acatacccttgttcgcgatccgcgtgcttggcgatattggcaaacgtctcttccagcaacgaccgcgtcaactggatagtcttctcgtcaaaccgactcaggagatcgaagggatcggacacaaccacctcgcctcggaaaccaagcgctgcgagttcccgccggtgccgttcgatctcggcctcgaatcgacctgcaccgatcggaacgatggcttctccggagcgacgcgcatggcatcgcgggattcgcgcagtaccgacattgtgctttgcgagaaccgctatgacatcatgcgtctgatcgagcgcccgttgagccacttcgcgcaacagtggcaagtccatcgactctccttgcgaagggtgttccgacatgatcctgtcgatgctcatgatgagatatgagagatcattggtcgtcgcatcatgcagccttgccgccaaatccaacgattcggccctgccacgcgcttccgactccctctccccctcacgatgatgccaattcagcagcagaccgattccaacgcacgccaacgccggcatgacggtccaaggcacaacggacaccaacgccccggcatcccaacccatcggcaacccatactgccatatcagctgcgccacgcgagatacggtcacagccaccgccaacaccacgccgcaccatatgcgttgataggagaggacgattaatggctcggctatcaccacgctcaccgacatggacagatccaccggcaaggggaacaccacgcaccatgagatcgccaacgcgatattgccgccgaacgggaatgccacgcagagcaacgacaggatgacgaacaacagacccacccacagggcccacgcatcccaaaccggattgatacacgattcgatgaccgtatcagcggctatgcacaaggcgcaggctagcgccgcgatcttctcgccatgccaagacttcccgaaatcgcggaagcgacgtctaagaaaacggctgccgtcacagaacatggtatcgctcacagtaatcaaggagttcgccgcgcctcgtcaccccgaccttgcgcatggctcgtttcacatagctgtacacagtttcgacaccgattcccaagcggcgcgcaatttcaacggtcggtacatgatgtgcatagagacgcaacaccgccagctctcgatcggagaagagcctggcaccatccgcttccggctgtgcggcatccaccgtatgcaatgtctcttcaaggctatgcaaaccccaaccatgagggtatgttcccccgtcaaacaccgatttgaccgcctcgcgtatggtcgctgcgaaatctcttttcgaaatcaacgcttgggctccgcaacacgcgatatcctcaccataggttgccaggtcatacgaagtgactacgatgacgccaacctgcacgttccgctgtcgaatacgttccgtcagccgcactccgttcagcccgtccatcatgagatcgcaaataaggatgtccggcttccgcggatcgaacagacaacgttccaaggcaagactgggattatccgtaacccatagcatatgcgcctcgggaatcgtcctgccaataagcaaagccatcatctccgcagagcaacgatcgttgtccaccaaggcaagccgaatcaggcgcccgttcttcataagtaccccctccccgaatcgcctccgtcaaacgaaatcgtaacactgtgacgattcccgtcacacagacttcgttcgctcctcattggcatcttaccgtgttgcatgcggcaaaacagccgcgcaataatgtgcggcgagcgaacttcctatcgtccgccgcacaaacacattgttaccgggaataaggtgtatcatgcactggacttataaaatcgccagtatattggccgtggctctcatcactctcgcagcaggattctatgcgcaaaataacgaagaaacctatccctccggccctagctacgatattggaatttccgacgcgcacgggcagcctctatcgacattgaccggtctcgcagcgacccatcatgtcgtactcgcgagagtctcctatgagccggacggtcacggtaccaacagacgcgtaatttctattttcggcgcattagacggcaacggcatgcatgcgaattcgccatacccggattatgggttcgggccgcgcacacgtgtgcaacgcggagacagattcaccgacccattgggaagatggcttctctatggatcaccacgggataccgcttcagtagccaaatccatacggcgccaaggattcgaacttaacagagcaacccccatcggcatcacacaaatcaccaaacaattcttctccaattccatcgcccaagtcatattcgccggacttgctgtagtatttgtgtccggcgcgctttccgtgtcgacagcttcacgcgtttgcgcgatacaagccttgcatggcatgagaacaaccggcattattatgaggcaattcctgcggcatgcgttctttttcatcatctgcgtctgcatcggatggatgacttggatttccattggtgcgatcttctggcctttcgcttctcccttaggattcgccggtcaggtattcctctccatcatcatcgccacaacgtgcatggcattggttgccttgtcattgtcgattgctctagtaagggttctggtgccgaacgcactcaaattaatccaaggaaagcgccctttacgttttctcatggcttccggctgcatcatggcaatcatcgttctcgctctcagctctgccagtttgaacgttacgaacttcaaatggcggcaatcccaaacactgaaaacaacattggagcatcaattgtcatccaacgacggattccaattgcaactgtggtatagcagcgatcaaaaccgagctcgttccatgccctcatggaacgacttcgtcgaacaaacttcccaatcagaacatacgcgattcgcctcattccgggtaggatgcacgtgggtggatagctcgcaagacccacagccctgcatcctcatggattcccgtacggcaaggcttcatcatcttatacgaaacaacacgacacttgcacgaatcagtgtgattatgcccgagaatgaacaatggaacagcgaatccattacgaacaatgtgcttcgcgcatactcattcgagcaaagtttggcggcagaagagggaaagagtctgcccgccatcaatcgcacgagcatctccattgaatccagaccaagagatgctgtcttatcggcatttgacaccccttccaacaccgatggcctttcctctgttcctgttgttgtcattgacccgtctctgctctctggcgataccactacatcgatggtgtccaccggcggcatgaccttcgattacagctcccgccatcagctgctcgaaatcctacgggaaaagggcgtggactctttggtggcttcggtcgtcaatcggcatgacgagatacaaactcgtttggcacgaacaactcaggaaatgaactatttttccatcacagcttgcatatccataacatgtctgctgggcggcgcaatcatggtggctttgacactatgcacactccgacgtcaaattatgttcgtggaatatatgcatggagcgccgtcatatctccgttttcaatcgatactgttcctagcagcggcgttatgcagtgcatctcttccgatccagttgctcataggaggttacaacgccgtttccacgacctcggtttccttactattcatcgtcgtttctctggcaaccacagtgctttacgattcgcggctgcgcgccgacagtatcaaacatccctgatcgccatccacaaacctgtatcagcaatcacttaccacgtaaggaacatcaatcatgagcgccttattgatcacgcataatctgacatatcgaatcgacgaccgcaccttatgggaaggactgaacctgacgttcagtcccggtgacatggttgccctgaccggagaaagcggatgtggcaaaaccactttgttgaatgtcctaggtcttttggaagagccaagttcaggaacaattacctatgatgggcaaacaattgcctccagaaagggccgacggctcatgcaccgcaacgtcatgggattcatgttccagaattacgccctggtggagcaatggacggtgaacagaaatctgattctggctctgcgcagcgtcggaataccatcggcagatagaagtcggctcatcagacgcgcattgcgggccgtgaatctgacgggctacggcaatagaccgatctacacactcagtggaggcgaacaacaacgagtcgcaatcgcgaggcttctcatccgtcaatcgctgcgcgtcatactggcggacgagccaacagcggccctcgatgccgacaaccgcgccatggtcatgcgtcacctgcgtgatttcgccgacaacggagcgatcgtgatctacacgacgcacaacgaggagaccgcggccctcgccgaccgcatcatcgcattatgattccgccagccactgttcgtacagcgcatcgacggcttcgagcattcgacccatcggctgcgtggaatcgatcaccgcgtcggctatgacacggcgttgttccgggctggactggtggcgaatgcgcgcaagcgcatcatctcgcgtcatgccgcgggtcgacaccattctgtcgacccgtgcttgttcgggcgcttcgacggtgacgatatggtcgaatcgcatgggcatggcgtccaggacttccgccaacagcggaacatcatgcacgaccatggcatccggattgtccgcgaccgcctgccgctcccgcgacagcgcaagatcatagatcaacggatgctcgatatcgtccagtttcctccgcaatcgttccgagtcgggcccggcgaacacgtgctcggcgatccatcgccggttgagccgcccctgatcggtcagcgcgtcggggccgaaacattccgctatacgacgaagaccgacgccgcccggttccaccactcggcgcgcgagctcgtcatagtcgataagcgccgcgccgagctcccgcagtcttgtggacaccgtgcttttgcccgccgcaataccaccggtcaatcctattcgaatcatgctccccccatcatggccatgtttcgaggttcatgcacacaacggcaaaacccggcccgccgaagcgagaccgggttttgactatacgtcaggcgtcagtcgcccgatggcgaactcacttgccgagcagctggtcgcgcagggcggcgagctgatcggagtcggcgagggtaccggtagccggagcagcggaagagtagttggaggtctcctcgaccggcttctcttccttcgggccctggccgtcggcggctgcggattcggcagcgttctccagctccttggccacgaactccttgtgctcctcccacagctcgtgggcggcggcgtactgggactcccactcctcgcgctgcttctcgtaaccggcgatccactcgttggtgttcgggtcgaagccttcggggtacttgtagttgccctgctcgtcgtactcggccggcatgccgtagatggccggatcgaagtcctcggaagccgggtcgacggagtcgttggcctgcttgagggacagggagatgcggcgacgatcgaggtcgacgtcgatcaccttgacgaacacggcctcgcccggcttgaccacggtctccgggttctcgacgtgacggttggcgagctcggagatgtgcaccaggccctcgatgccgtcctcgacggagatgaagacaccgaactggacgatcttggtgaccttgcccttgacgatctggccgggaacgtgggtgcgagcgaagcgctgccacggatcctcctgagtcgccttcagggacagggagatacgctcacggtcgagatcgacgtcgagcacctcgacggtgaccttgtcgccgaccttgacgacctcagacgggtggtcgatgtgcttccaagacagctcggaaacgtggatcaggccgtcaacaccgcccagatcgacgaaagcgccgaagttgacgatggaggacaccacaccctcacgaatctggcccttcttgagctgggacaggaaggtctcgcggacctcggactgggtctcctcgaggtactggcggcgggacaggaccacgttgttgcggttcttgtcgagctcaaggatcttggccttgatcttctggccgatgtacggggagaggtcgcggacgcgacgcatctcgacgagggaggcaggcaggaagccacgcagaccgatgtcgacgatgaggccgcccttgacggcttcgatgacggtgccctcaacgacgccgtcagcttccttgatcttctcgatgtcgccccaggcgcgctcgtactgggcacgcttcttggacagaatcagacggccttccttgtcttccttggtgacgacaagggcctcgatggcgtcgccgacctcgacgacttcgtcaggatcaacgtccttcttgatggaaagctcgcgggaggggatgacgccctcggtcttgtagccgatgtccaggaggacttcgtcgtgatcgatcttgacgacagtgccctcaaccagatcaccatcatcgaagttcttgatggtggaatcgactgccttgatgaagtcctcttcggtgccgatgtcgttgatggcgaccttggcgacttcagtgttgttctctgccatgtaaatatatggtttctaatagtggatggataatttctcgatattcagttatacgcacacccttacaggcatacggatattcacaatacaagcaactctgcccaaatttcctaggaaactctaggcgtgtcgttcggccatttccacgacgttggccaggagcatggctcgggtcatggggcccacgcctccggggttgggggtgtaggcggatgccttgtcgtagcaggccttgtccacgtcgcccttgatgcggtagcgaccggcttcttcgtcgtagacgcggctgacgcccacgtcgaccagcacggcgccgtccttgatcttgtcgggcgtcacgaatccggccgaacccattgcggcgacgatcacgtcggcgcggcgcatgtggtcggccacatcccgggtaccggtgtggcacagggtgacggtggcgttgacggcgttgcgcgtgagcatcaggccaatcgtgcggccaatggtgatgccgcggccaagcacgcacacttccttgccgttcagatcaatgtcataggcgtcgagcagctcgagcacaccgcgcggagtgcaaggcagcggtgtcgaaatgtcgccgcgcacatgcagcaccagttcgccgaggttgtacgggtgcatgccgtcggcatccttggccgggtcgat

SEQ ID NO: 2220 - DNA, 10591 bp, Unknown
  R51_24m  MAG No. k141_32713
cgtgaaaagctacggcgcccgcaacctcgacccgcgctgccgctcgtccttctacgccatcgtgcatcatgccgacggtccggacgaacgcatcacctccaccggcggccgttcgggcggcgccttgcaggagctcacctcgttcgtatacggcgcggcgctcatctacctgcttggcggcggcctgaccagcgagccctcgtacaccacgctgttcctcgacgaggcgctcatcaaggccgacggccgttacacgcagcgcgccctcacggtgctgccgcgcctcggattccaggtcatcgtctccgccccggaaagcaagaccggtgaaatcctcgaggtctccaccaaggcctacgtgacctacaaggaccccgacaccggcctcacctccctgtgcgaggccgtgctgcatcagaatgacatggacgatgaatcatcgtcggatatattgaaggatgacggggttgccgaatgagcagtcccggcgtcgccggtattaagacgattcggttcgactcgacgatgttcgaaagcaggtgatgggaactatggccggcatgaaagacatcgctgcgatcaccacatgcgtgaagaaacatatgcgttcacatatgtacgacatcgaaccggcatggccatttcccgtgccggtgggattgccggaccaagcatttttggaaaccaatgcgattgcagtgcctgacaacaacaatgagatacggcaatgggcaagcaagaatggttgcgaaatcataaccaagcatcgcaccataggcacctctgtcgagttgatctccaaagtcgtcgttcctgacgaatcaatagccatgcgtgtggttggtcgtacgctggcggcggaatatcgcgaagcgcaccgtcgcacagattccactgacaggattcagcggcaaatggctgaatgagtcaaaaaccaatcgtcgtaaggccatttgccgactgctcggtgtcgaaacgttgggtctgtcgaaacggccgaccgaactgcggttccgttatctcgatccgggacacgacgattttggtaccgatcgtactgaacgcagcgcgaagattgctatgcgggagcctaagccgacgcccggccttcaatcggcggagcgacgtctttatgaacgactgtgtgctgacaaaaccatcgcttatcggcgtatcgaacaggaacgcattcccatgcgtgatgcagttgacgaattacgcaagcttggcatccccgtggagtccattgaagattttgtcccggttcgaacatcaatcgtttgacggacgtaccggggcagaatccgttgtcccggtttgtgatttcgggtgtttttcgcgaaccgggacatgttgtgttgccccggtatgggcgtcaatcgtttgatgcgagaatcgggacaacatggcgattctgagattggctttattccgccgtttccgttcgcgttttatgtggttcgtggaaactggaatgtcctggttctcgaaaacaggccaaaatcacgaaccgggacagcgggttttgccccgatgcggacgtcaaacgattgacatgtgaaccggggcaaatcagaggaggggaggtcttcgggatagagcttgactggggctgggcgcacggttgatgtcgcgtgggccggctcttgcgtttcggtccactgatggtccggaattttgcatactatggttcggttttccggcctgacacgccatcgaacaagcgttcgaatttggtcgtgtgttcgggtatccttgggacagattcggcgcgcgcataaccgtgcgcgcgggaacggtgagatggaaggtggggtgtggctgtggcggcaacgcggactggcgcaaggcgcgcaacaagcgcaaagggcgcgaaaaccagcaagggcaagaacggtgaggtcatcgtcgaaaaggtgatgaccagcgactccttcctgagccgggaaatcaaaaaggcgccgctgatcgaacacgatggttcgctggtagctgatatctcgcacatcccgaacgatctcaagatcacgattcagggtgcgcgcgaacacaacctcaagaatgtcgacctggcgattccacgcaaccgtatggtcgtgttcaccggcctgtccggttccggcaaatcctcgctcgcgtttgacaccctgttcgccgaaggccagcgacgctacgtcgaatccctgtccgcctacgcccgccagttcctgggtcagatggacaagcccgatgttgacttcatcgagggcctgagcccggccgtctccatcgatcagaagaccaccaaccgcaacccgcgttcgaccgtcggcaccatcaccgaaatctacgattacctgcgactcctcttcgcccgcaccggcatcccgcactgccccgaatgcggcgagcccgtcgcctcccagaccccgcagcagatcgtcgacacgctgctcggctacccggagcgcactcgattccagattctctcgcccgtggtcaagggccgcaagggcgagttcgtggacatgatcgagctgctgcgctccgacggctacgcccgcgcgctcatcgacggcgagatgacacagctgtccgacgacatcaaactcaccaagcagaagaagcacaccatcgaggtcgtggtcgaccgactcgtggtcaaggacggtatccgccaacgtttgactgattcggtggaaaccgccctgaagctcgccaacggcagcatcgtcatcgacttcgtggacgaggaggaaggcagcccggcccgccgccagccgttctccgaacaccgcagctgcccgaacgggcacacgctcgaactcgatgaggtcgagccgcgcaccttctccttcaacgccccctacggtgcctgccccgcctgcaccggtctcggcttcaaactggaaatcgacccggacctcatcatctccgacccggacaagtcactggccgacggcgtcatcgaaccgtggagcggcaccaagatgacctcccagtactacggccacatcctcgaaggcttggccaaggaaatgggcttctccatgaagaccccttggaaggacctgccggacgacgtcaagcacgacatcctctacggccacgacttcaaggtcaacgtctcctaccgcaatcgctggggacgcctgcgtgaatactccaccggcttcgaaggcgtgatccgcacgctcatgcgacgccacgacgaaaccgattcgcagtccatgcgcgaatactacgagtcgtacatgcgcgaagtgccctgccaggtctgccacggacgtcgtctgaagcccgaggtgctctctgtcaccgtggacggcaaatccatcttcgacgtatgtgacatgcccgtcgtacgcgaactcgcctggatcaacggcctgaaactcgaaggctcggcacagctgatcgccggcgaagtgctcaaggagatcaaggcccgactcggcttcctgaacgacgtcggcctcgactacctgaccctctcgcgcgcggccgccaccctgtccggcggcgaggcgcagcgcatccgactcgccacgcagatcggctccggcctggtcggcgtcatgtacgtgctcgacgagccgtccatcggcctgcaccagcgtgacaacgaacgcctcatcgaaaccctgcaccacctgcgcgatctcggcaacacgctgatcgtcgtcgaacacgacgaggacacgatacgccgcgccgactgggtggtcgacatcggccccggcgctggcgaacacggcggcgaagtcatctactccggccccgccaagcacctcatcgaagccaagcgctccatcaccggcgactacatcgcccaccggcgagagatcgccgtgcccgccaagcgccgcaagatccacaagacccaggtgctcaaagtcgtgggtgcccgcgagaacaacctcaagaacatcgacgtgagcttcccgctcggcgtgctcaccgtggtcaccggcgtctccggctccggcaaatcctcgctggtcaacacgatcctctacccggtgctcgccgacaagctcaacggtgcacgcatcgtacccggccgccacaggcgcgtggaaggcgtggaccaggtgcgcaaggtgatccacgtcgaccagaacccgatcggccgcacgccgcgatccaaccccgccacctacaccggtgtgtgggacaagatccgcacccttttcgccaagactcccgaagcccaggtgcgcggctacggccccggccgcttcagtttcaacgtcaaaggcggccgatgcgaggcctgccacggcgacggcacgctgaagatcgaaatgaacttcctgcccgacgtctacgtggactgcgaggtctgccacggcaaacgatacaaccgcgagacccttgaagtcacgtacaacggcaagaccgtggccgacatcctcaacatgcccatcgaggaggccgccgacttcttcaaggcgtacaccggcatctcccgatacctgaagaccctcgtggacgtcggcctcggctacatccgactcggccagcccgcacccaccctgtccggcggcgaatcgcagcgcgtcaagcttgccaccgagctgcagcgccgatccgacggcaaaaccgtgtacatcctcgacgagccgaccactggcctgcacttcgaagacgtgaacaagctgctcaaggtgctgcagtccctggtggacaagggcaatacggtcatcgtcatcgaacataatctggatgtgatcaaggaggccgactggctgatcgatctcggtccggagggtggcgacggaggcggcaccatcgtcacgcagggcacgcccgaacaggttgccgaatgcgaatcctcatggaccggcaagttcctgaaatccatgctttagccttccattgcagctgacctcgggtgggttggggtggtatgttgctggacacgctccgggccgctcaggccaagtctttacggtccggcagcacataccaacccgcccaatccctgatgattggttttgcttaatagcgaggaggattatgacgaacgatattgagcggcatagtccggatgagtggcggaagaccgcggcggcgttaatgccggaaagcgtagctgtgggcgccggggaaacgacggcgaaggtgaatgcgaatggggcacctttgctgggggattctcgcgacctgttccgacccaagacctcggatattcccgccaaacccggtgtgtacaaatggcgcgacggggaagggcgcgtcatttatgtgggcaaggcgaagaacctgcgcaacaggctcaccaattatttccagccgctgtatctgctgcatccgcgcacgcagaccatggtgctgaccgcacgcagtctggagtggacggttgtcgccaccgaactggaatcactgacgttggaatacacgtggatcaaggaattcgacccacggttcaacgtgcagttccgcgacgacaagacctatccgtatctcgcggtcagcacgggggagcgaattccgcgcgtgtgggtcacgcggtcgcgcaaacggcgggatacccggtatttcggcccctatgccaaagtgtgggaattgcggcacagtcttgaccggttgctgcgcacgttcccggtacgcacctgcaccaccaacgtattccacaaggcgcaactgaccggacggccatgcctgttcgcctccatcggcaaatgctccgcaccctgcgtgaaccgtatcgaagcggacgaacaccggcggctgtgcgaacagctggtcggcgtgatgaccggacgactcggacggccatacatcgcccagttgacccgcgacatgaaagaggccagcgccgaactcgaattcgagaaagccgcccgactgcgcgaccagatccaaatgctggaaaccgtggtgcaacagaacgccgtcgtcttcgaccaggatgtggacgcggacgtgttcggcttcgccagcgacgagctcgaagcctcggtgcacgccttttatgtgcgcgccggctctattcgcggcgaacgcaactggagcgtcgaacgagttgaggacatcgatgacgccgacttgatggccgaccttctggtgcaggtgtattcggacgccgccggggacaatcacccccagtcggccgcgaccatctccaccaatcgcgaggccatcggctccacacagaccatcacggccacggacgctgtggcacgcgcccaggccacccgagaacgcaacacccgtcaggagaccaccggacgcgcggacctgctggcacccatcgcaccggtaccgcgcgaaatcatcgtgcccgtcgaaccggcccgccgcgaggaactcgaaggctggctgaccaatctgcgcgggggcgcggtgaccatccgcgtggcctcgcgaggcgacaagaagcagcttatggaccgcgccaacgagaacgccagccaagcactgcaacgcagcaagatgagccgcatctccgacatgggcgcacgcacccaggccatgaacgatgtggccaaggcattgggactcgcgcaagccccgctgcgcatcgaatgctacgacatttcgaacactgtgggcggtgccttccaagtggcctccatggtggtgttcgaagacgcgatcgccaagaaatccgaataccgacgcttcgccgtccgaggcaaggacggcaaaggcgcggtggatgatctgtccgcgctttacgagacgctcacccgccgcttcaggcacggcaacatcgccggcgactccggcgaaagcatcgacgcggaacagcgcgcggcctcggccgccggcaagatgaccactgccgtggcggcggagacaatcgttgcgaacggtaacgacaatggtgagggcggttccgacatcagtggcaaggggcacgcggtgccggtcggagtgcagaacgatgcacgggagtcctcgcccgacatcgtccagcagaacacaaaccggcatcactttgcctacacgccgaacctggtggtggtcgacggcggtaagccacaggtcatggccgccgccaaggcgcttgaggactgtggcgtgatcgacgtggccgtctgcggactggccaaacgcttggaagaggtgtgggtgccggacgacgactatccgatcatcctcaaacgccagtccgaaggcatgtatctgctgcagcgtgtacgcgacgaatcccaccgcttcgccatcacctaccaccgccaacagcggcgcaaaggcgccctgcgcagcgcgctcgacgagattcccggcatcggcgaaagctaccagaagcggctgctcaaccacttcggctcggtcaaagccatgcgcgaagccagtgtcgaggacttcgagaaggtcaaaggcatcggccacgccaaagccaaagcgctgtacaacgcgctgcacgagcagtgagccggcccggtccagcagcccagagtgaattttcggttgcggggcctgtggttgacatattcgaagcaaagtgtcggctagcatggaaacagacatcaaggaggggatatggccaatcatcgttgcgctgtactcggcaaacccgtcgcgcactcattgtcgcccgtgctccacaacgcggcttatcgttcgctgaaactcgacgattggctgtacgacaagcacgaggtgggggaagacgacctcgacgctttcctcaaaggccttggctcgatgtgggctggcctgagcctgaccatgccgttgaagaagaccatccaaccgtacggtgttccggaaaatctgtgggccaaggaactgaaggtggcgaataccgcggtattcgactggagtgtggctaccgatgatcccgcttggccgaacggcaagccgggcatcaagctgtacaacaccgatgtcatcggcatccaactcgccttcgaccacgccaatcgcgaactcggcgaacaccacaccgcatcgagaagcggcgccgcgttgatcctcggcaatggcaacaccgccacttcggcgttggccgcatgctgcatgatgcccgaaatcggccatatcatcgtcgccgcccgccaccctgggaaaaacaccgggcttaaaccagtggccgaaaagttcgtcaacgtgcataacccgtacagcgaaatcgaattaggcgacgatcaggccctgctcgaggcagcccgcaacgccacctatgtcatcaacacgattcccggacatgcggccgacaacgtcgcggatgccctcaccaatgccggaaccgagccattctccggactgctgctggacgtggtctacgatccacgccccaccaagctcatggaagcctggcgcgctcatggcggtcacgccatcggcggcgaagaaatgctgctgtaccaagctctcgtacaggtattgctgatgaccggtatctgggatgacgacccgcccagcgatgccgaccagcgtctgcaggacaccaccaccgaagacgaccagctggagatcgcgatgcgcaaagctcttgaggaggcgttgtaatgagtcaacagacaacaatccgcgataccggcgaggcggccgccacgaatgcgccggcgaattccgcgacatccacatcgactccggacaaccagccgaccccgcttgatgccttcgaggtgctgctcatcaccggtatgtccggcgcaggccgctctcatgccgctgactgcgtggaagacatgggatggtatgtggtcgacaacctgcctcccaaactgcttatcccgcttgtcgacatgatgaccacctccggttccggatcggggtcgggcgtccacaagcttgccgccgtcatcgacgtgcgctccagctatttcgacgagctggccgccgtgctcggccatctggatgatctcggcgtcaaaacccatattctgttcctcgacgccagcaacgaagtgctcatcaagcgctatgaatccgtgcgccgcccgcacccgctgcagcacggcaaccgactgatcgacggcatccttgaggaacgtcacctgctggaagacctcaaggagcgagccgactgggtcattgacaccagctccctgagcatccaccagctgtccaccaaactctacgagacgatgctcggttccggccccaccaccgtggcggtacacatcttcagcttcggcttcaaatacggcatgcccatcgacgccgatttcgtggccgatgtgcgttttctgcccaacccgttctgggttcccaacctgcgcgagcttaccgggcacgacaagccggtcgccgactacgtgctttccagcaagggagccaaggaatttctcgacgcttatgagaaagctatcgagattgcgttggaaggatacgcccaggaagacaagcactatgtaaccatcgccgtcggctgcaccggtggtcagcaccggtcggtggcgatgagcgaagagctggctcgccgcttacgcgcacatgggctcaacgtaaccgtttccgcgagagaacagcataagcgtcactcatcgtaagcaggcgtcgagcggtcatcgggcaagcgttcggtgaccacactgcgagaaagcaaagcccataatacgtatcaaacgggttcgcttgtccaccagattaggtatcacagaaagccgatggcttccgaccgtatgacagcagataacggcacgaagcgcctgaagcattgagaagaacgggactgtaggaggtagatcttggctcttctggacgatgtcaaaagcgagttggcggcctttgaaggcgattcgccagccgcgatcaaggcccaagctgcggccatgatccgttttggcggcggtcttcgaccggtacagaatacatacgttatccaagccgtattcacctcgcttgacgttgcagaatggctgaagaacacgttgaggaacacgttcgggcatgaagccgaggtcaaccacctcacccgtcagaccccgaacggccctgtcgagacctacgtggtgctcgtcacccgcaacgtagtggccttggctttgcagaccggactggtcgaccgccgcaagcagcaggtccgtggactgccgtctgaagtggtcaacggatccatcgcccaaatcaaagcagcatggcgcggcgccttcatggcccgtggcttcctatccgatcccggtaaggccagcttcctggaaatcgcttgccccacggaagaggccgccatggccctgtgtggcgtggcccgtcgtctcggcatccaggccaagcatcgcacgctgcgcagctccgagcgcgtgaccctcaaggatcccgacgccatcgaacgcatgctcaagctcatgggcgccacccgttcggcccgcgaatggaccggcaagcgctccgacggcgaggcccgcggcaaggccaaccgtctggccaacttcgatgacgccaatatgcgccgttccgccaaggctgccgccgaagccagcgaaaaagtgcagcatgccttcgaagtgctcggcgataacattccggacaacctccgtcaggccggccagctgcgcatcgatcacgtggacaagagcctcgaggagcttggcaagatcgccgaaccgcaaatcaccaaggatgcgattgccggccgaattcgccgactgcttcagcttgccgagaaaacggagaaggctcgcgcagccgaaggcaagtaacccgacaa

SEQ ID NO: 2221 - DNA, 13727 bp, Unknown
  R51_24m  MAG No. k141_33399
cgtcatctaccgaggattcggtcatgcgtgtgcgaaaatggacacggtgtcaatcaggaggtgcacagtggttgtaagcacggattcgagccgcacaatgcccgattgggtgaagtacggggtgttctggcacgtgtatccgctgggcttctgcggtgccgatatcaggcccgccggcccgcgccagttccatggccgcggccttgacgcgatgatcccttggctggagtacgtgcgcgatctaggcgcgtccggcctgctgctgggtccggtgttcgagtcggcgacgcatggatacgacacgctcgaccatatgcacatcgatgtgcgattgggcggggatgccgcgttcgaccagctgattgcggcctgccgggacatgggattgcaggtggtgctggatggcgtgttcaatcatgtgagccgcgatcatccggccgtccgggcggcgcttgacgagaccaccggacgcttgaatccggccgacaacccgtggcatggtctggtccgcgcgcatgtcggtgataatgacgaacccgctttggatgtgttcgaggggcacggggatctggtggcgctggaccattcggctgacgagaccgttgactatgtggcccatgtgatgagccattggctggatcgcggagccgccggctggcgcctcgacgccgcgtatgccgtgccgagcccgttctgggcgcgcgtgttgccgcaggtcaaagccgcacacccgtattcgtggattttcggtgaggtgatccatggcgattacccgcgcatcatcgaggaatccacgatggattcgatcacgcaatacgagctatggaagtcgatccagcatgcgctggagacggagaacttcttcgagctggattggaatctcaagcggcacaacgcgttcctggattccttcgtgccgcagacgttcatcggcaaccatgacgtgacgcgtatcgcatcgcagattggcccggccaaggcggcgttggcattggcggtgctcatgacggtcggcggcgtgccaagcatctattacggcgacgagcagggctatgtgggcgtcaagcaggagcgtttcggcggcgatgacgacgtacgtccgaagttccccgactcccctgccgaactgtccacgctgggagagccgacataccggctgcatcaggcgctgatcgcgctgcgccgtcgcaacccatggctgatggatgcgcgtaccgaggccgtgaagctggaaaacaagcacttcgtctatcgttcgacgagcgccgacgcccagcattccctgaccgtggacctcaacatcgagcaatcccccactttcaccatccgcaacgccgacggcagtacagcgtatcaatactgagctacctcatcagagggagctcaccattcaccgccgaataccacgaatcagcaggtcgagcaggtaaccgtacgaccggtcgacccgttcgcggcctcgtgtgcggggttgggcggaacgcagttcgaattggatgaacccgtgtatggacacccagatggaggatgcaatcaggtgggggtcatcgtcacggaacacggtcgccgcctggccgtatcgaatgatctgcgtgatggcttccaggcaatgctgggccgagtccgacgcctgccccatccagaccagcgtgtaaataccgggggcgtccagcgcgtgttcgcggtagattatgcccgccctgcgcaggcgcagcacaggatcggattcgtcaatggcgatgagctgttcgcgcagatcggtgaagtatgcgtcgatgagcgcatcggacaccgcctgcttgccgccgatgtgctggtagatgctggtgggcgacacgtcggcctgcgcggacagcgtacggatggtcagaccgtccacgccgtcctgttccacgatccgcctcgccgcgtcaagaattcttccgcggatttcaagggttggcgtgcgtctggatcggggctgcgattgcgtcatatccgttattctagggtgcgtacaggccattaccgccgttttggcatggccacgatcgcaacgaccgcggcgataagtgcaatcgtcatggccgccaggcagacgctgtgcagcccgcccatgaacgcggatgcgaccgagtcatccagcaatctgcgcagggtgcccggcagggagccggaaatggattcggcagccatcacggattccttggatgcgccaaggatgccctggggcaggtgggatcctcgcagcgcgtccgtcaggccggtggtgtacgcaccggcctgcagcgaccccatgatgccgacgccgagcgttccaccgagttcgcggatcgtgtcgttgacggcactgcccataccctcctcgccgaccggcacggccgtcatcagcgcgtcggtggcgggaccctggacgagggcgatgcctgcggccatcactgccatgacgaccgcgaacggcagtgtggcaatcgccgtctcgagcgccgaacacccacgcagcgcctggaaccattgggttgtgaggaagatgaaaccgaacgggcacaggaaggcggcgcaaatggccaacatgccgatgacggcgcacacccagaacacgctatcccatgcgaaccgttgcagcaggatgccgccgatgaccgggccgagcactatgcccaccccggatatgccggcccacagtccgacggccagcccacgcataggcgatccgtcgaacaacccgatgatggatgacagcgtggctcccatcaagttgtgtataaatataacatatttatgaaacattgatacacatcatgtcgggaacaggcatccgcatcgcaaacaccggtctacaacacgatcaggcccgacgaccatcaaaggtcgtcgggcctgattcatacgcgctgtcggactaacggcgtccagacttcatacggaatggcgcattattgcgattcttcttggaatggtggcggttcgggccttccgtgttgccgtatttggcgatcatgcggcgttcgtgacgcttggcaccttctgaacgctcgtcgcgtacgatgcggttctcgttcttgcgatggatgcgcttgtcgaattttccgcccttgccgtaccgatcattgcgacggttcttgccgtactcgttgcggccatcgtcctggcgctcgtcgtaacggtttttgccgtatccgccgcgacggccgcccttacggcggtcatcgccatgctcgaacagatagtcgcggcgctcggcctcggggttgctcatgccggcgcggcgttccgcacggttgcggttcttcttcacggccttcttgctggccttgtcgccgtgcttgcgctgcggctcgccttcggcaacaaactcgccgcctgcgttctcgtgctggaatccggtctcggcaacgttctgctcggcgcggtcgcgattgcgattgtgcttgcgcctgccgctgcggccggactcatcgcccgccgcgttcttggcgcccctgttcttgcccttgcgcgggttgcccacgggctgcgacttgtcgaggctccaaccatccacgcgctcggcgcggtcgcccacaagctcaagcacttcgggcgaatcgtgggtcacttcgatcatcttggttttgatgccggcctggttcagtaagcggcgcgtctcgcggcgctgctcgggcagcacgagggtgaccacgtcgcccgccttgccggcgcgggcggtacgaccggagcggtgcacaaaggacttcgggtcagccggcggctcgacctgcaccacaagctccacgccgccgacgtctatgccacgggcggccacgtcagtggccaccatgacgcgcacgtcgccggaatcgaatgcggcgaggttgcgatcacgctggttctggttcaggttgccgtgcagctcggcggccggaatgccgttctgcgtcaggttcttggcgagcttcttggcctggaacttggtgcgggtgaacaggatgcgacggccttcgcccgaggcgagcacgcgcacgagttcgtgcttgtcgccgcgcgtggtctcgaacacgtggtgggtcatcaggtcaggttcggtggtggccgaatcgacctcgtgcaccttgggatcatgcaggaaggtgttcaccacttcatccacgccgtgatcgagcgtggcggagaacagcatgtgctgggcgtcgggcgaaatctgctcaagcagtcgcttgaccggcggcaggaagcccatatcggccatttcatcggcctcatcgatgaccacgacttcgacagacgagagcgtgagcgcctgctggcgcagcaggtcctcaaggcggcccgggcaggcgaccacgatatcggcgccggccttcagatcgcggatctggtggatgtacttgacgccgccgtacaccgtggtggtgttcatgccgaacgtgtgggccagcggcatcagcacgtcgttgatctggttcgcgagctcgcgggtgggggccagcaccaggccgcgcgggtgcggcaggaaatcgtcagcgcggcgctcttccaagctggccttcttgcggcgcttgatttccttgcggaactcctccatcgcgatttcgccaagcgaatcataggagccaagccgggtgaccagcggaatggagaaggcgagggttttgccggagccggtgcgccctcggccgagaatgtcgcggccggccagtgaatcgggcagggtgtcggcctgaatggggaatgcggtcttcttgtcatctgccgcaagtacgcgcaccagcggtccgggtacgccaagttcgccaaaggtaagggggcgggattccgcgctgtcgttcatctggaaatcagcggaatcgtcacgatcatcgaaattattacggggcacagtggcctttcatgtcaaaggttacgcaaattacgcaagctttccgagcttagcgtaagccccctactttgcttgatgctcgccacgctgtcattccactctttacttatgaccccatggggcggtaactcgcccatgaggcggtaactcgcccatgaggcggtttgaagaaattgtgaaaccgcagaataaagccattttcacctaccgccccatgagggttttaccgccccatgggatgtttgccgccccatgggccaattaccgccccatgggttctaccaccacgtaaggcgagcaccgccccatggaacacgcaaatggcccctacccgtgaaggtagaagccattgtgcaaaagggctgagccacaatacggcccagtagccctaaaacacactacaaaatatccggatcgtctttggcgatagtgccggttgccttgccaatggccttcaggccgtggtaggccacaagaatcacgatcgtgccaatggcaatgccgttgaaggaaatgccaccaacagtgaacgcgaattggccgatggcaataatcatggtgatggctgccaccatgatgttcagcggcttgtcgaagttgaccttgttctcaacccagatgcggatgccgatcatgccgatcatgccgtacagcagcgtggtcacgccgccgagcactccggcggggatcgtgttgatcacggcgccgaacttcgggcacaggctcaggatcagggcgaaggcggctgcacaccagtaggcggcggtggagtacaccttggtggcggccatcacgccgatgttctcgccgtaggtggtggtgccggagccgccgccgaagccggcgagcgtggtgcccaggccgtcggccatgagggcggtgccgatctggttgtcgtagtcgcggccggtcatctgggccacggacttgacatggccgacgttctcagccacaagcacgagcacaacagggacgaacatgggaaggatggaaaaatcggcctgcggcaggtggaacttcgggaagccgatccatgcggcgtcaccgatggcggagaagtcgacctggccgcggatgcaggcatatacatagccgatgattacgccgaccaaaatgttgaggcgacccagcaagcccttgaacagcacggccacgagcagcacggccagcagggtaaccagtgcggtgtccggcgcggcttggaagttggtccacacggaaggtgccagattgaaaccgatgatggccacaatcgcgccgttgaccacgggcggcatgatgatgtcgatccatttggagccggcgtaatgcacgagcacgccaatcagggccagcagaataccggtgaccatgatgccgaagctggcgaccgcaatgcccttgttggcggtggtgaccgcggtgatcggtgcgatgaagccgaaggacgagcccaaatagctcggcagcacgttcctgttgataagcaggaacagtgcggtggacatagccgtgaagaacagggtggtggacgggtcgaagcccgtcagaatcggcaccaggaaggtggcaccgaacatggcgatgacgtgctgtgcgccgataccggcggtgcgcacccaagtcagacgttcatcgggctcgacgacctcgccgggcgccagcgtcttgccgtcgccatgcaattgccattggaagatattggacattactactctcctcgctctcgcttggggcacggcattcacaaccagccgcactacgcgccattctagctcacgaagattttgtgaagtctctcttccgggaaaggctatttgccgtaatactccagcaggtgcggatcgacggcctgcaccacatccaccaaatcgccattggacaggtacgggcgcttgaattcgcgccacggctccaccttgacctcccagcggccggtcgtctcgtcgagcacgggccgggcggtctgctcccagcgcacacgcttggaggtgcggccggtttccgggtcgcggcgcgtgtagtgcaggcaggtgcagttggtgatcttccagtcgtccgagtcggcgcgatgcaggaattcctcgtcggccagatcctcgatggtgagcatcagggcgagcatgaagtcgccgtgggtgaccatgaccacggattccgaatcggatttgcggctcagcgaggtcaggatgttgtgcacacggtcctcggccacatcggcaatcgactcgcctgccggcggacgccagtacagcggatcggtattcttgaagttccagttgcgtgcgtagttgtttttgaattcgtccttggtgatggtgttgatttcaccccaagaacgttcgcgcagcacacggttctcctcccatttggccttgggcagggccatggtggctgcggtttcgcgggtgcgcacgtatggcgagaccatgtaacggtcgaacagctgctgctggctgaccagccaacgaccgatgcagtcggcctgcttgcgtccggtggcggtgagtctccaggagcggtcgggtacggtgacgttgtcctgcgtatacagggagttgtcgccctgttcgcccgcctggacgatgacgttcgcttcggattcgccatgccggattacgtatagatcgagcggcatgctcatatggattcctctttcgttattggttacgttgtgttgttttctgctgtttcctacttgacctgcgtaatggtgttccccttgaccatgaacgcatgccgggccatgtcgatcatcggctgatcgaacttggagtcggtgtagaactcgtcgatgacggcgtccggaccgtacagttcgcggaaccgtttggtcttgttggtgttgaagttgaggtacgtgaccttcatcgtctccacatccacctcgctggccacgagattcctcacgccgagtctgcggcaggcctcccccaccgtcagaccgaaggatgcggtgaggatcacatcgtccgactcaggctggtaccaaggcttgatacgtgcgtaatatcggtcccagaaatcgtccacgagctgttcgacgctcgccacccgtttggatcggctcagttccgtgagatagccttcggtcatcttgcccacgccgtattccatttgttcaagcgtggcccggccaagcttgtatttgaccgcgtaccgcagcacgggggcgatatagcggaacattttcgggtcgtggcggacggaatacaggtacaagtcgaacaggctttcgccatcatagatggttccgtcgaaatcgaatacgcgcataccttctgcttctactctgttattccttgtctaaggctaatctcggtaagccggcgaaagcgcaaatacgcagtgaatttcacatgaacactgttttttggattgatttcggtacaggtaacgtacactggtgacagcgtggaaggaggtgcgtaatggcggcgtctgaaatcgaacaatggtggattgataagtttcaggagaacctgggtccgattcgcaaggtagccggatggacgactcagcaactggccgacgagctgggagtcgcgcgacagacggtgtctaacttggagaccggcaaaagcccgatgaccaaactgcagtatctcgctttacgtacggtgttcagcgccgagatcgcacgtcgtgaagaccgcgatctggcacgcatcatcaagactttggtcgacgatcccattgagcaacgcattcgcgaacggcgcgcccaagagcaggacggcgaggccgttgccgacaatgccccagtcaatacggacggtggcaacgctgccgacaatgccattgccgagaaacgcaagcccagtgccgccacattgaaggatgcaaagactgccgcaacgggcaagcccacgctcagcacggcgatgcaggctcttgccgtcatcaccggcgcattggccagtggaaccgccgccggcatcatcacttacttgatgttcccggacggcggcccaaacaagcgctgagtcgccgaaatatcgaatccgttactcgcaggccacgccatcgtgatcgcggtccaacttgccgttgtatccaggctgcccttgatacaacggagcagcaccagccgcacggacttcagagcaattcgcataatgcacattttgctgcgcttgctgttgctgttgtgcctgtcgagcggcctcctcagcttgccgctgggcctcggcctgcgcggcagcctgttcttcagcggcctttcttgcagcctcttcttcagctgccttcttggcggctgcctcttcagctgccttcttggcggctgcctcttcagctgctttcttctcctcagctaccttcttcgcttcttcctcctgcgctatatcgctggctttacgaacattgataacaggcttgtccccatcttccacggattggacaacccagttcgaagctctgagcaccattttgtccgtgtcgcttttcacctcataatcagaggaggaaaaaccggcatccttgagctcgtctttcacatcggccagcgaacgccctttcttggcgatggcgacaattttcgaatatgtggattcctccttgccgtccgcaccgtcagaagaccccgagcatccagcaagcacaagacccagaaccatcataagaatcacggtcaacgcccaaaccgcacgattgacacgcttcatgttcccgaaacgaaccctgttgttcaacattattctctcccttgtagtcgcagatctgcggatggtcggaaccacgtcaatgtgaatccaaccatcctgataattactgcttattcaatgatatattcatccattgttttcgccgatatatcgcaccagcgtttccttcattatcaactatttcgagttgcgtgaatacaccgtttataggccaagaatttcgtgtttttttgcatcaaattcttcttgggagagaatgccaatatcaaccaattccttcaatttcttcatcgcctcgacttgttcttccacagacatggatgtcgtgtgagcggcgggagcagcggcttccggtgccggcgcaggtgccggcgattgaaccggggcggccgtcataggattgatggattgcgccatattcataccaagcaacatgccaccatcgccaaagccgttgtcttgaataccttgcgcaatgcgctgctgggcagccatattgccagcttgctgggaaacgccctcgtatgcggcaacattcatcttattcgaggcgaactgctgcacgagttgacgtgattgctcggtgaactcgatactttcgatgcccacactggacacttcaaagccaaaacgatcattccacgtacccgcattggcccgatcgccacgcacgcatgccgcgatgtcattcgtcttgccgggcaattgcgaaatacgatattcattggacaacgaattgatggccacaataaacgactgtacgaattcagacagaatctgcctacgtggcccttcatcatcgaatgaatacgacacggtagtggcaggcacaaagttacgaacgaatcgaactggatcagtgacctttagcgacatggatccgcgtgcgcgaatttccaaatcgacgccatagaaccggtcgttatacaccagcggcgcagaagtgccgaatttgatgccacgaatctcacgcaggttgacgaaggccacatatttggtgcggccaggctgacctccgaaggtgaatcgatcggcaacctgattgaagaacgatccgatgccgtctccggcgagcacgctctgctccccgttgcgatattcataaccgcccgactcggtgatgacgttttcgatacctgtttcagagaaaatgaacgccgcagtattctctggcacatagatacgcgaaccattggtgattattccctcggaaccgtattcattcgaaccgcgatcgttgttgcttccgcggggaatgcccggcacaacgacggtgtgttccgtgaacggaccagcggtgatgatatcacgccacaggtccgcgaatgtaccgccgagcgcgccggcgaacgccttaataactgccatctgttttttcctcgatatctcatgcatatggccgatcttgcgactatgcaatcgcaagaccggccgttatgctggcatgttggttatagctgcgtttcgcgatcgcagtattcgcatcgaacgacttctttgcgatgaccggaaagcggagcgccacaaccttcgcaattcaccgaaaccacgggttcggtaataccaagcccactacggaatgcgccaaaagtgtccttcagcgccccggccagagcctccgttccggggatggccttgttgaaggccggctcatccattggcgtatactgtctgccgcgtatacccatataccgtcatcgttcctttcttggaaaaccgtcacctcgatacgccagtctgatcactggcccaccgatgcgagcttctgcatgcatcgagtcatgacctcggtgtagtaggccgaatcctcactgctgagggagttttcgtcaatggcgtctaccttctgggagaactcagagtaacgcttcatcatgctggcatagtcggtagccatgctgaccacgttgtcggatttctgatatttgttcatgaaggcaacatactcatcgataaaggcctcgtagctgtccatcgtggccttgaagtcagcactgtcattggtgttctgctgcgccttctgatccgaagactggtcgctctgcttgttggcatcgctggaatcagtgcccgtatcagtgctcttatcatcctgcttcgcggcgtcgccgtccgtagacgtatcttccttcttttccggaacctggatagtgatggacatgatggtctcatcgtcagtgttacgagaaacgctcacactgtatccatcggcgttcttggcattgaaactgtcagcggacttgctatagtccacggtgaaaccgttgtcttgcacggacttgacgtagtcggcatactgcttggcgtcggtatcgcacacctcgatgtggaagtagtccgaagactcacttctaatttcaccctttgtggatttcggctgcggcagcagcgccgcgatatccgactccggccatgaatatgcttcgcacttggtggcgagcgatgcttccaattccgcccgatcagccttggccttcgcatcgtcacgaattacgaacacgccaccgattaccagacccacaacggtgataccgactgccacccaggccagcactcggccttgcaccttgccactcgggcgggtcacgtatacggcgaagcctgaaagcagtgccggaatcaccgtggcgaacagcagtccgccccaggatcggccagaaacatccacaaattgggcgagtacgaacaacactccccaaataatggcgaacacagccagcttggaagtcttcttcaccccttgtgcattcggatcaatcacggcaggcgcagcggcaccagcaaaaccagtggcagcaccggcaccatgtgtggcgggtgcaggagccacaccaatacgcttgtccagagcggcgaggaactcatcaacgcgcttggcgctttcgtttccagtcgcctccagacgaatggcggcccctgccgcaccctgcgggactacggttagcgtgcagttcaccccatcataggagtggaaggaaaacgctccggtctgggtgttttcgttatccaaggtaaacgtggcgccagtagtcagctggtcgtgaataacttggaacagctgttgcggactgaccgcatatacacgatcaaatggcgcgccggcgggccgctgcgatgccgtagccggagtcatcggagtggtggtagcaccatcagacgctacgttcggttggccagccggtacagtattcggcacggtaggcgcattcgcgcgatcttccggtgcgtcattcgtgccttcggacggtggaaccggctgaggttgttgatcaaatggcgttgtcatgatgcccttctttccttaagcagcagcattaccagcacagaagaggcaagcccggcaaccgttacggtcaatccgactgccatggcaagccggtatcgttcgctcatcattgcgtcccttcttattgctcgctttgctctgcgatacatcgaaaccagtgtatggcgttgttattatgtacgcaaattagcattttgtatgcatattagctttattgtcgatgcttgataccgcgcatgaacatcctttccgccaccgcacctacacggatggcatcgaccattgtcggcgacacgcgcgggccatacatcagctgacaactgaatttttcggcgtgtttccgaaaagtcggcgtcctgtacgctgggaatcgagcaaccgcgtacgatggcgcagcacagcacccgcaacacagcgacaaggagcatgggcaatggcagacatccccgaagaacatttgaccgaggaactgttggatcggctgctcgccagcgccagcattgagcagtatctcgatgagggactcgtcagcgcacgcacgctgaccgactatctgttcgaccgtatggaagcccatgacctgagacgagccgacgtggtgcgggcatccggcctcaacgccacagtggtttatgacattttctccggcaaaagccgccccggccgagatcacgccattatgctggcttttggtctcaagtgcacattacgtgaaacccaacggctgcttcgtcttgcaggcgtttccgaactgtggtgcaaacagcgacgcgacgcgattatcatctggtgtatacgcaatggattcgaccgcattgccacggacgacgagttgtatcgtatgggagaggcgacgttgctaccggccgattgacgacattcggcccaacaacactcaccagtgagacgcaagtaagagggcatcaaggagagacatggacgataagcaggcgatgca

SEQ ID NO: 2222 - DNA, 7698 bp, Unknown
  R51_24m  MAG No. k141_34010
ctacgcggacggcgtcatcgtcggctccgcgctcgtgcacaccctgctcgcggacgacaacaagaccgcacgcgacccgaaggaaggcttgaagctgctcgccgccaagagcgaggaactggccgaaggcatccacaacgcccggtgaacacccggtgcgcctcacgcgggttgtgccgtgacacggtagggtagtcacagagcatcaagcacaacccgcgcgtggacacaccatgagcaccagcaagtagaggcacgatgaatctggcttatattccctcgccgaccttctccaagttcgagatcggcccgttcaccatccacatgtacgcgatctgcatcctgatcggcatctgcgtggccgtatggatcctcaccacacgttggaagcggtacggcggcaccttcgaccagattctcgacaccacgctcgtcaccgtgccctgcgcgctggtgggcgcgcgcctctaccactgcatcaccacgccggccgactacttcccgcccaccggcaacttggtcaacatcctcaaggtgtgggaaggcggcatggccatcttcggcggcatctccgtcggcaccttggtggcgttcctgtggtgccgccacaagcactatccgttcgcgatcttcgccgatgccatcgcccccgcgctgcccgtggcccaggccatcggacgactcggcaactggttcaaccaggaactctacggctggcccaccacgttgccgtggggcctgaagctcaacgacgcggacgccatcggcaaatccgaaatctgctattccggcgcgcaatgcccggactacaggaccacgctgttccacccgacgttcctctacgagatgatctggaacctcatcggcgccgcgctcatcatctacctcggccacaagctcgccgaccggctcaaggccggccagcagttcgccatgtacctgatgtggtacggcctgggccgcacctggatcgagaacgtgcgcatcaactactccacggtgatcctgggcctgaggaccaacgtgtggaccgcgatcatcgtcttcgttctcggctgcatcctgttcgtcgtgctctaccagtacggtccggaccccaaggcgcaggcgcgcgggcttgcggcggtcaccgccgacgagctcgaacgccagagcatcgaagaggaacagcttcgccagaagaagcaggccaagcgcactaagtgacaccacaataaacagcgccgaaacagcgcgaaacacgggaccccaagtcccattgcacagataaggtaggaaaccatgagcaatatcgcaatcgcacccagcatcctgtccgctgacttctgcaacctcgaacgtgatctcaaggccatcgccaacgccgacctggtccacgtcgatgtcatggaccatcatttcgtgccgaacctgaccctgggcgagccgatcgtcggccgcatctgtcaggtcaccgatttgccggtcgacgtgcacctcatgatcgaggacccggaccgttgggctcccgaatacgccaagctcggcgccgcctccatctccttccacatgggtgccacccacgctcccgtgcgtctggcccgacagctgcgcgagatgggctgcaaggcctgcttcgccgtgcgtccggccgaaccggtcgagccgatcttcgatatcctcgacgagttcgacatggtcctcatcatgaccgttgagcccggcttcggcggccagaagttcctcgacaaccagatggccaaggtccgccgcctgcgcgatgagatcacccgccgtggcttgaagacccgcatccaggtcgatggcggcgtgagccccaagaccgcgcacatcgtggccgaagccggcgccgacgtgctcgttgccggttccgccgtgtacggcgccgagaatcccgcccaagccatcgacgacatccgcaccaaggccgaggccgcgttcaaggcctgagctccaagcctgaaccgcaatccacctttcatccataaccgcaagaaaagaatctgaatcacatgaagacgtttgaatccctgttcgccgaactgtccgaaaaggcccagacccgccccgaaggctccctgaccgtcgacgagctcgacaagggcacccacttcatcggcaagaagatcatcgaagaggccggcgagacctggatggccgccgaatacgagggtgcggaccgcaccgccgaggaaatgagccagctgctctaccacgtccaggtcatgatgatcaagcacggcctgacgcttgaggacgtctacaagcacctgtgagaggaacgcaaatgctgagaatcgcagtgcccaacaagggcatgctatccgaacccgcgtggaacatgctggccgaggccggctaccgtctgcgcaccaaccctcgccagctggtcgtgcaagatcccgacaatggcatcgagctgttctacctgcgtccgctcgatatcgccgtatacgtgggccgcggcgccatcgacgtcggcatcaccggccaggatctgctcaagaactccggtaccgccgcgctcgagcacatgccgctcggctttggtgcctcgaccttccgtttcgccgcaccgaacgaatccccgatcaccaccctggaggatgttcagggcaagcgcgtggccaccacattcgataagctcgtacacgactatctggtcgagcacggcatccaggccgagaccatccacctggacggtgcggtcgaatcctccgtgcagctgggcgtggccgacctcatcgccgacgtggtctccaccggcaccaccctgcgcaacgccggcctgcgcgtgtttgccgaaccgctcatgcactccgaagcctgcctgattcgctcgccgcgtctgaacgagcaggatccgcgtctggccgtgctgacccgtcgtctgcaaggcgtgctcactgcacatcagtatgtgctcatggactatgacattccgatcagcaaggtcgccgccgccgtggccgtgacccccggctttgaaagcccgacgatctccccgctgcacgacaaacagtggaacgccgtgcgagtcatggttcccaaggccaaggtcaaccagctgatggatgatttgtacgaagtcggcgcacgcggcatcatcgttaccgctctgcaagcctcccgcatgtagactgttagtcgatatgaccaaccagaaagtcaacgccagatacagtccggaagcacgtgacatctatttcaccgtgcccaatttgatcagcgcgctgcgaatcatctcgattcctttcatcagcgtgctgatctccaagcatgaggtgattgcggcgctagccctgatcgccatttcctcggcttcggacggactcgacggcatcatcgcgcgcagattcaaccaagtgagcaagatcggtcagattcttgatccgatcgccgaccgactgctcattttctgctcgattctggccctcagcgtcgccggcatcatcccatggtggatgctgattatcgtgggactgagggatctgtggatggcgattcaggtgctatggcttgcccagtacggttatggtccgctgcccgtgcatttcgtgggcaaggctggtaccgcgctgctgatgatttccatcgtcagtcttattttcgccgatttgggcaccagtacgttcttccacttgctctacatcgccgcgctggccgccggcatctggggcatcgccatgtattggctcgccggatatatctataccaagcagggcgtcggattgctacgcaaggaactgggggagaagtatggcgcttgaggccatggccccggtctcgttccccatacccaaggagaatgagccggtacgacgccgcgccgtgttctcccactcagtccgaggcgcggaatcgcatcatgcgctttccccggatgacgccgccgccatccgcaccagacgtcgccgtaaaaccaacgacgattcgcttcagctcatcgatgatcttgtcaatcgtccgatggatccgatgttctccgactcacgactggtccatgagcatcgttcgaccttctccatctggtttaatcgcatcgtcgtattcatcatctgcgtcggcgttggctttgcctgcagcctattcgtgcaacagttgcaatccgatccgcgtaagcaggtacggcagactttggccacgcaattggagaatcgcaactcgcagatagacgaactcaccacggacgtcaataatttgcgatcccaagttgacgaacagtccaagaaaatctccggcagcgtgaaaagcgacacgcttatccaagacgaaatggtcaatggtgccacggtggtcgaaggcgaaggaatcaccatgacgctggccgatccaatcgcggcaagccagtcggatcaatcctcctcgacgagagtcggcacctccacgaacatccgagtcatcaccgatctggatctgcaacaactggtctccctgatgtttcaaaacggagccgaagccattgccatcaacggtaataggctcggcgcgcaaacctcgatacgcaaggccggcgggcatattctcatcggcatgaccgcgatacaaagcccctataccattgaagccataggcgataagagcgccttggccgaagcgatgggggagaagagacttgcaagtctttacgattccttcaaggaagccggtatctacccgcaggtgagcaaatccaattcgattacacttgaggcagcagtcactggcgaagtgaagtacgcggaaaggaatgaataatggcagccgttctgggactgatcatcggcgtcgtcatcggcgtgttcgtcaagccggacattccgatcatcgtgcagccatatctgccgattatggtggtcgctgctcttgacgccctgctgggtgccgcgcgagcctatttcgagcgcagcttctccgaccgcgtgttcgtgatctccttcctcgccaacgtggtgacggcaacactgctcgtgttcctcggcaaccagctcggcgtcggttcgcagctgcagacggccgtcatcgtcgtactcggcatccgcatcttctccaacgtgtccgcgatcagacgcttcatcttccgaggctgacaagggtactgacgtatgacacgtaaagcacaatcagacaacatgctggagaaaatgcgcgaccagcatgcacaagacaaggtcaacgaccggatggaaaccgggtcgttccccacggtgcgcaagaagccccggaaggatctcaaccgggccagcaacaaatcacggctactatcctcgattctcattgctctgatgtgcgcgctgctgggtttcgcctacatgagccagatcaataacactaaatccacgtacgaaacgatggacgagagcgaactggtaaggctgctgaacgagtcgaatacgcaaatctcgaatctcgagcagcgtaaaacccagttgaacagccagctcaactcactgaaatcggcggctaacgagcaggagcaggcgcgtaagatcgccaagcaaaacgaagagaccagcggcttgatctccggcagactcccggcgaagggccaaggcgtgaccatccggatcggacgaggctcgacgactaaagtggacgcctcaatcatgttcaacctcatcgaggaactccgcaatgccggcgccgaggtaatcgccatcaataacgtgcgcgtcatcacctccacctacattcaggacgccgaggaaggcttgatcgtggatggcaccaccatcaagcccacatacacggtgaaggccatcggcaatccgcaggagctgtccaacgcagtcgatatcgccggcggtgtgggcgctcagctccaggtgaaatacggatccaacgtcaacgtgcagccttctgacagcatcattatcgacgaagtacgcgaagctacgcaaaaccagtatgcaaagacggtagaataggggattatgaccaacccgattcctagcgcaggcgaaaccaccattatcggcctgcccgcgattaatgtactgcccattaccaccaccggcgatcgaccgctgactcaagaggatctggacaccatcaccagattgtccgagggaacggcattgctgatttccgccaggggagcggtctcaggttctcgttacttgcttgacgaggatgaaatcaccgtcggtcgtgatccgcgagctgatattctgctcgacgactccaccgtatcccgtcagcatgccgtgttccgcagggtcaacggtcagttctttgtggttgacgcaggaagtctgaacggcacctacgtgaaccgtcagcgtgttgatcaggcgtcgctgaagaacggcgacgaaatcatgatcggtaaattccgtctcgtgttcttcacgaaatccgccattatttcccaatagtccacacccagcacggggttagactgattgcagaaattacaatcatgtgattacaccagtgtgagtcacatgcgagacacgcatgagttaggggagtgccatgggacagacagggctgcatcttcatgtttcgcttgaggaccgtcagaatctgaacgctgacgcgattcagggggagttgttctccaatgtcgatactgaggagatcaaacgcggctaccgtggcactgtggcctccaaggtggccggcatcacgtaccgacagctcgattattgggcacgcaagcagattgttgagccgtccatcacgccgtctcatggctccggttcacgccgactgtactcgtttaaggatgtggtgattctcgctgtatccaagaagctgcttgatgccggtgtgaatctgcagaacgtgacggcggccatcggattcttgactcaacgcagcaccgatcagctggccaatgtgaccatcatgtgcgatggtcaaaacgtgcacgaatgcactaccagcgaacagatgctcgaactgttgcaaagcggtaaggcagtgttcgccgtgtcggtgggttcgttgtggcaccagattgagacggccttggaacaggaagaatatattgatcttgaggctaagccgctgacgattgccacgggccgtccgattgatgaactgactgccatgaggatgcgcaagaagctcgaggcgcagcgcttgcaacgcgcaaccgcctgatacatgtatggttgttggcgacttgccggctttggtcggcaggtcgctttgttgtatgtgttgcttttgttgcctgccatcttatgttttatatgttgcggtgattattatgactgattggaggaccgggtgaacgggattgttgtcggattgttgccgggcgttctgtggatggtcgccgtcatctttgctgtgtccatcatcactataacggtcagccgaggccatctgttcacgccgaaacgccggcgaccgccggtcgatccggttgactggtcgatggtgaaaacgcatttcatgtcgtttgcggcggcgctgattccgtttcccgtgttgacgttcaccgcagatctgatggatgctcgcatgctcgcgttctacgaccacgcgcaattgcccggagcaatcatcatattcgtgctggtgctgctggaacttgtcgccatgtatctgcaggcacgcaacgcttcagaaaccgaaatggacaagcgtttgggcgttgcttctcaccggaataaggatgatgttgcgaagtagccgattctctgcggcgaggctaatccgcagctagatactactggttcggctaaaatcaccacatactattaa

SEQ ID NO: 2223 - DNA, 3977 bp, Unknown
  R51_24m  MAG No. k141_34594
gccctgtccaccggcgaggactccaacgaccgcgacaccaaagacaagatccgcgccgctcagaagaccgagggctagtgttcgaggtctacatccacgtcccgttctgcttgcggcgctgcggttactgcgacttcaacacctacacggctacggatcttggtgcaggggcctcgcgcggcaactatgccaatatggtcattcgtgaaatggccctgaccaagcagtggcagctcgaccacggcatcgaggagccaccggtctccaccgtgttcttcgggggtggtacacccacgattctcgccgcccgcgatctggtcgccatgctcgatgccatccgcaagatctggagcatcgcgcccgacgccgaaatcaccaccgaagccaacccggacacggtcaacgaatattacatcaatgagctcgctgccggcggcttcacccgcgtttccttcggcatgcaatctgccgtgccgcacgtgctcaaaaccctcgaccgcacgcatacgccggccaacgtggccgcaggcgttaatgccgccaataaggccggcctgcgctccagcgtggatctgatttacggcgcaccgggggagagccttgacgattggcgcacctcggtcacgaccgccatcgacctcggcgtgaaccacatctccgcctacgcactgaccgtggaacccaccacgaaaatgggtcgtcaaatcgcggccggcactctgcccaaacccaatgacgatgacgaagcagccaaatacgaaatcgccgacgacctgttcgccgccgccggcctcgaatggtatgaggtctccaactgggcccgccccggatacgagagccagcacaacctcggctattggcgcaacgtcgattgggccggtctagggccaggtgcccactcccactacaacgcggtgaccgaggctgaccacccccagtcggcttcgctgacagcccccgccagcgggggcaagtccgaagccattgcctctgcctcagctgatggacaggccaacgccgaacttggagaaaccaacgccgaactaggtatgatcaacgcgcatgggaacaactcccaagaaattcatgcccccgctggcgggggctgtccggcggatgccggactgggggtggtttctgtctcacacggtctgcgcagctgggacatcgcgcacccgcgtttgtggggcacggccatcaacgagaaccgtgtgccgtgggccgatagcgagacgatcactcccgaggaaaacctcgaagagctcatcatgctcgggctgcgcctgcacgagggccttggcctcgaccgcatcaaccgcgccatcaacgatgcaggtatgagcagcacgccccagactctccgaaccgtttcggttgaccaactcgcccccatgatcagcgaaggcctgattaccgtatccgataatcatcgagtggtgcccactcgtcgtggccggttgctcaatgactcggtaatcgaacagttcttcgattacgtcggtgtatgagtcggtggtatggtgcgcggcagtcgccattacccgttcgctagttgtggttacaccgtcagagggagcttttttgttttaccggcgggggagggaaccgcgtaggactacgtccggggcgctttgcacgtagatcaggcggttggcagtgccgccggtggcctccgcgtcatcgcggttggacaggatgctgtccacggcggcctggcccatttcggccagcggcagatgcacggtggtcagtggtgggaacacgtcggcggagtaggggatgtcgccgaaaccggtgacgccgatttcctgacccggctcgatgccgttggtgcgcaacgcggtcatcgcaccgatggccatcacgtcgttgagcgcgatgattgaatcgatgcctttgccgtcgtacagtgcgccttcgcccggcttcagcagtccggatcgggccatttgcatgacggccgcatagccgtcggtgcggctgaacttaccgtttgccacggctttcgggtccacggtgatgcctgcctcgtccaacacttccatcacaccggccagtcgttctttggaggagcggtgtgcgtcatcgcccttgagaatcgcagggcgcgtatacccggaatcgacgataagctttgcgatggcacgcgcgccgacgtcgttcgccacgtccacggccgggaagggcaggttgcggttgagtacgaacacggcatgtccgccggacgattcgtactggatgagttccgtctgcaacgcctggcgttccggcgcgtcggtgtattcgctttcggagatgatgatgccgcgcggcctggtggatacggacttacgcaccgcctccaactcctcgtgcggggtggctgccaagccgatggtcacggagatgccgcgttcagccgccgccttgaccacgccttgcgacacggatgcgaagtagggatcggagatatcggagaccagcagcacgatgttcggtgcagtgcctttggccactgcctgagcataggcgttgggacgatagttgagcttggtggctgcttccatcaccttgacatacgattggttgcgtaccttgcgggtgctgccgttgaacacacgggatgcggtggcgatggagacctgggcttctttggcgacgtccatcaatgtcgctggcgattgcgccttatcgttctgtacagccacgatcgaatcggtccttttcttccctgaaacggaaaacatgtctaaacgcttaccgcaatgataccgcagttttgcttgcaatagtagcattgtggattggaaagcctgaattttgaacaaaaataatcacgcgaattacggaaagcgattaccgttccgcgtatcgtgcggtatgctcgaagcatgacgcgatacttatgtgcccctgactccttcaaagagagcctgaccgccatggaggcggcccgggcgatggctcaggggattgagaatgccgaccacgatgccgaggtccgttgcctccccatggccgacggcggtgaaggcaccgcacgtgcgcttgtcgacgccactggcggatcgatgcacgccgtgccggtccacgacccgctcggccgacctgtcgaaggccacttcggcctgctcgccgacggcacgaccgccgtggtcgagacagccgaagccagcggcctcgcactgcttgaagccaaaaaacgcaacccgttgattgcctcctcctacggcaccggcgaactcatactcgccgccgtccgttccggagccaagcgcatcatcgtcgggctcggcggcagcgccaccaacgacgccggtgccggacttctgcaggccctcggcgttcgtcttctggacgggaacggcaacgaccttaagcacgggggagcggccctcgctgatctggccaccatcgacatcagcacgatggacccggctctcaagaacgtctccatcaccgccgcctgcgacgtgaccaacccgctgaccggtcccaccggcgccagcgccgtgttcggaccgcagaaaggtgcctcccaggctgacgtcgccacactggacgccgcgttggcacacttcgcgcaggtcatcgaaagccggctcggcgtcgctgtgaacgacgtgccgggcgcgggcgccgccggcggtatcggcgccgcgctgaaaggcttccttgacgccgaattccgtccgggcatcgccatcgtcatcgaacaatccggacttgatgcggccgcgcaatgggctgacgtggtgttcaccggcgaaggctccatcgacttccagaccaagttcggcaaaaccccggccggcgtggccgaaaccgccaagcgccacggcaagcccgtgatcgccgtcgccggacacatcggcacgggcatcgacgaactgcatgaggtcggcatcgacgcggtattcggcatcgcccccggtgccgccagcctcagcgaactgctggccgacgcggccgccaacgtgacccgcaccaccgaacaa

SEQ ID NO: 2224 - DNA, 4203 bp, Unknown
  R51_24m  MAG No. k141_35816
gccgccaagatggtcgaaggtgtcggcgcgctctacatggccaccgaaacccatcccggtgccatgaaggacgccgtgtgctcgcccggcggcaccaccatcaagggcgtcgcccagctcgaaaaggacggtttccgcggctcggtcatcgacgccgtagacgccatcgtcggctgactgccaatcagagtttgcgtatattcgcatatcacagtcaaagccttcgaaccgtatgctcggaggcttttgcatatggccggttcaccacatgcaggttcaaggtgtccagcttctccctagacttggaatcatgtctcttactatcggaatcgtcggactgcccaacgtcggcaagtccaccatgttcaacgcactgacccgcaacaacgtgctggctgaaaactacccgttcgccaccatcgaaccgaacactggcatcgtaccgttgccggacaagcgtctgccggtactggccaagctggtccacaccgaaaaggtcgtgcccgccacggtgaccttcgtggacatcgccggcatcgtcaagggcgcctccgagggcgaaggcctgggcaacaagttcctggccaacatccgcgaggcggacgcgatttgcgaggttgtgcgcgccttcgaggacgacgacatcgtccacgtcaacggcaaggtggatccggccgacgacatcgacaccatcaacaccgagctgatcctcgccgacctgcagaccatcgaaaacgcgctgcccaagctggagaaggatctgaggggcaagaagatcgagccggcctacatggacgctgtcaagcaggcaaagaccatccttgaagccggcgagacgctcgacaaggccgcacgcgaaggccgcttcgacaaggattccgtctacgacctgcatctgatgaccgccaagccgttcatctacgtgttcaacgtggacgacaacgagctggccaacaaggacctgcaggcaaagctcgccgcatccgtggccccggctccggccgtgttcctcaacgctcagttcgaggcagacctgaccgagctcgacgaggcggacgcccgcgaaatgctggccgacgctggcttgagcgagtccggtctcgaccaactggcccgcgtgggcttcgacatcctcggactgcagaccttcctgaccgcaggcgtcaaggaagtgcgcgcttggcagatccacaagggctggaccgccccgcaggccgccggcgtgattcacaccgacttcgaaaagggcttcatcaaggctgacatcgtctcctacgacgatttcgtggccgccgacggctccatggccaagatcaaggaggaaggcaagctccgtcaggagggccgcgactacgtcatggccgacggagatattgtggagttcaaatttaacgtgtccaagtagttttcctcggctccccttcctgaggggagccgtcgcggaaagcgactgacgggagtgttgcggaaaggtccgagcagtgttggttgcccagacctttcttcatgttacgaacctttatgaacctcgttgagatgagatgtttgcgtctacttttcttaggcttccgcgttctcgtcggctcctgtggcgagaacattcctcaatgatttcgccacctgtattttcagcggacgttttccggtctgtacgaccagccccgcggccaagagctcttccacgtatttccttgcgctctgtttggatagtccgatgtgatgggccacttcgtccaacgacatggatttggacgagtcgaacagttcttcctgaatcacgccatagagcaccgagacggcattgcgcgatagggcatgcctcttttcaagctgtgtacagagtatccgacctttgtcgagctgatcgaccttgatactgagttcgtcaatcagctcatcctgggcttgttggatgaatccgaggatggtgttcacgaagagcgtgagttcgccgcagttcagcttgtcctccgcctccatgaatgctttgtagtaggcgttcttgttctccgcgatggtgcgggacagggatagcacggtgggcatagtcaggtcatggttcaggtacagggccaggagataccggccggttctgccgttgccgtcgtagaacgggtggacgtattcgaacaggaagtgcgacatgatggccgactgcagccggggaatctcgtcggaggtcgcgagatggatcatatcggtgaggagtgcgccgatgttgccttcgcctttgactccgttatggatcgcgaggccgtgcggcccctgtatttccacatcgcctttccggaacaggtcgccgtccggctgatcgctctcatcgatttcgtcgagcacgaccttgtcatagatgtcgcggatgtcggcgatgcccgccggcaacgcggagtccttgtccgtgaggttcaggtacagcttggcaaattcgctgaaccgcgccttggagtcgtcgccgtccctccttgccttgtcggccgcgtccacggcgtcctgggtttccttgcgggtgctgcgcacgccttccatctcgttggtggcgaacagttcctcactgatggaatgccgtatgtagtcccagcgcatgacgccgggaatctggttccagagccgtgatacgcgcctttcggcgagaagtatattttccgtgagcagggtcgtctcgcgtggcgtggcggagaacagctcgcccaatggcgtgatgaccccggtcctgaatgtggaatctgcctcaagccgctgccgtgcgagtgccgcatggttattgaaggaatcgactgacctgtcggcatggaacagccttgccaaacttctatacttcatatccatgagagagactcgcttcccaaagagtatccttgattatagaaagtataagatagagaaggaaatgagtcaataaacaactataaaatcatggataatacaaaaatatagttgtgcgcatgactgcatgtgagtgacatatggtagtgcccgaaatgcgtgtcagtagtgaaatacttcatgatctgttgttctttctgaatatgtgatggtatgcaatgggttttgccgcggtgcattgcgttgcgactatgccaagaacgcatgctcgtacaggtgcgtttatggggcatggtgcgaatgagtcggctcgatatcaccggcaatgattcagctatgcgtcaatgagaggtgtactgatcagatggcgtgttcgttcacgccgttgctgctgaatgcgatgtgttgatcatggttcgcgcaccataaagtcttacgtccgaatccgtcaaatcacgcggtgtgtgaaatgcccgttgtatataaaaaagtccggtgcaacgcacgatgataatgcgttgcaccggacttactgcagaaacaattgttacagactgtagatctgtgcgccgaacggccagagcgcgagcttggccattttgaacgactggaggccgaacgggatgccgatgatagtgatgcagttgagcacgcctgcacccagatagccgagtgccatccaccagccgaccagcaccacccagaggatattgaccagcgtggagccaacgccgccaccgtattgcacggttttgccgaacggcgtcaaggtaaggcccgccattttgaacgcctgaactcctagtggaataccgataatggtgatgcacagaaacagtccgatcagtgcccagctgatggcgattgccagtccgcccagaatgatccacagaatattgccgatgaccctcatcgtaacttcctcacatttgccggcattgcgccggataccgaatcgaatgctggattccattctattaggcgaacgcgggcgatatgtggggaatcggtgacgggacccctgagcatcccctgaatcgtccctgagccgcatgctcaggtgcctactcgggtgagcattctcacattcggctgatttctagcgaaaacccttgtgcgggcgggctgtggactatagcatcacgacacatgaccactacatcgcagccttctcaggcatctcagtccaccgccaccaaacccgccgccaaccgcgagctgctcctgacgcagtccgaccgcgaccccaagagctaccgtggcgtggaccgcgaccagcaggtcgtggacatcatctccaaactcaccagtgagaaggccacgattccggcaagctgcgtgcagcgcgacgccgccgacaccggtctggaatccaacagc

SEQ ID NO: 2225 - DNA, 4412 bp, Unknown
  R51_24m  MAG No. k141_37136
cacagcctcgaacagctgtgcgccacggtagctcatgatggtggagacgcccatcttggacatgatcttgagcacaccggtggaaagcgccttggtgaggttcttcacggcggtgtccgcgtcgaccttgaggtagccgttacgggccaaatcctcaacggattcgaaggccaggtacgggttcacgcaagcggcaccataagcgatcagcagtgcgacgtggtgaatctcgcgcacgtcgccggcctcgacggccatggagatctgcgtacgggtgtggcggcgcagcaggtggtgctgcacggcggaggtcagcagcagggacgggatcgggccccacgtgtggttggattcacggtcggagagcacgatgaagttcttgccgtcggcgatggcctcatcgatttcggcaaagatctcgtcaagtcgctcttcgagggccttgccgccgccggcgacctggtagaggcccttgaccacgtacggacgatagtagccgccgaggatgcgggccttgtcaaggcgcttgagctgggccatctcatcagagttgaccacgggcagcgggatgaggatcttcttggcgtgcagctcggaatcggccagtaggttaggctcggggccgatggcggattcgagcgaggtgacgatctcctcacgctcccagtccagcggcgggttggtgacctgcgcgaacttctgggtgaagtagtcgaacagcatgcggctgcggctggagagtgcgggcataggcgcatcgttacccatggatcccagcggctccttaccggtgttggccatcggagtgagcaacagcttcagatcctcttcggtgtagccgaaggcacgctgacggcgctggacggactgtccggagtggctcacgtgctcgcggcggggcagatcgctcatctcgaccgagttgccttccacccacttgcggtacgggtgctgggaggcgagggtcttcttgatctcttcatcggggatgatgcggccttcggcggtgtcgacaaggaacatcttgccgggctcaagacggcccttggacacgatgtgctcctgcgcgatctccggcagaacgccggcctcggaggccagcacgatgtagccgtcgtcggtgagctgccagcggccggggcggaagccgttgcggtcgagcagggcgccgacctgggtgccgtcggtgaagacgatgtcggccgggccatcccacggctcgataagcgtgttgttgtactcgtagaaggcgcgcacgtccggatcgagatccgggttcttctcccaagccggcggcagcatcatgcagatggcgtgcggcagggaacggccggcgaggtgcagtagttcgaggcactcgtcgaaggtgccagaatcggagtagcccggagtggtgatgggcagcagcggctcgaactcgccgagcagttcgctgctcagacgaccttcacgggcggagagccagttgcggttgccctgaatggtgttgatctcgccattgtgggccagcagacggaacggctgggccagcggccagctcgggaaggtgttggtggagaagcgggagtggacgatggcgatggtggccttcatgcgctcgtcgttcagatcctcgaagaagtgggtgagctgcatggtggtgagcatgcccttgtacgtgatggtacgggcggacagggaagcgaagtagacgcctacctcatgctcgacgcgcttgcggatgcggaaggtcttgcgatccaagtccacgccggccagagcaccgtccggagaggcgaccacgagagtcttgaatcccggcatggcggcaagggcctgcaggccgaggccgtccgggttggtgggcaccacgcgccatgcgagaacttcaaggccctcctcgcgcacgatcttggcaatggcctgttcctgctgaccggaggtttcgatgtcgcggtcgaggaaggcgatgcctgcggcgtagtggccggcttcgggcagttcggcgggcacggtggcacgcatgaactcatccggcatgctcatcagaatgccggcgccgtcacctgtgttctcctcggcacccacggcaccgcggtggtcgagattgaccagtacctcaatggcgtcagtgacgattttgcgttcaggacgcttgttcaaagtggtgaccatacccacaccacaggcgtcatgctcgttggcgggatcatacataccgtccggagcgtggaccgtgagatcgagcggggctttgaatgtcaccggaatcacctcaattgcttgtgggcacgtaagggaatcgtgcctcttcgttcattgctgttgacacagtaccgttgctccatgtcattttcgtttcgcgtgtccatataccgagtcgccataaaagtcaatagtgattctcaagcaattgtttttatggccagttatgggggtatttcgaactttttcgcccgaaatgtctatttgaccacacgaaaatacgatacggaaacgtccgtatcgtgaaatgctgcgttgggtgatgttacggattggcggctgtggaccaccctcagtcatgcttcgcatgacagctcccgccagcgggagcgataaatgcgaactgccagtcaacggtaaggttgactggcagttcgcatttatacaaggcgcaatagtctataagcgtttgttgccccgtctggagggtttctcgccttttgatgctggtgccggactggccggtgaccggagcgatgccggcgtgggcggccaggtgggccgcgcttttgaagttggcgatgtcgccgccgatgccgagcaggatgctgcttgcggtcctgacgcctgtcccgggcgattgtggcatcctgtgcatgtctgacaccatagcgatcggcgcgctccgcgaactcaccgaacatggcatccgcgtgcccgacgacgtacggctcatgggattcgacggcatccccttctccgactgcgccaacccacccattagcactgtggcgatagacgtccccgcaatggctcgtacggttatcgatcgcatggtgacgctgatcgagtcgaacctacggcatgaacggcccgatgacatcacccatgaccatatccagttccaggtggtaccacgcacgtcgactctggccgcctgataccggccggcacccttatgagtgccggccttcatccctgaaaatatgggtctatgccacgtacagcgcggcgggatacgtgagatatgaaatttcatcgagctgatcgaccgtcacatatccggctggcgcgttgagcacgtccggaatgcggttgacgattgtggcgcacgtatgttcgacggtcgccggcttgaccacgtggaactccacgtccggttcaccctcgatcttccaatcgcacatatcgccatcatccggcccgtacaccttgccgatacaggcagtttccaacgtgatgccctgattcgtttcggtggttaccacggcggacatgccgatgcatttgccgaccggaatcgtctcgtccatcgtctcggaatacacgtcgacatcgctgaaatacggcacactggcctgggtctgcgatgcgatggtaagcccaagcttctgggccagcgcttcattggaattccatacatacgagggcaccacggtttcgggatgcgcaagctcggcctcgaactcctcggcggtcagaccgcagccgtgcgctttggccaaagccaggccgtaatcctcgacgttgtagctcaccgcaccggtgatcttcttgatgctgtggcatccggcggcgacggtggagaccatgttcacccagtagatgtcctgcatgccggagccgaccatggtggcaccggcttccttggcgatgatgtcgagacggttcgtggtggccggatcggtggtccacgggtagatgcattcctcgcaggtggtgatcacgctgatgccgcgggccaagcactgctcgcacatggtggcgatttcgttctcgaagctgaatagcgtgactaccgcgatatccgcgtcgcactcgttgagtacagcctcggcatcggcgcgaatcggcacattgatggggccgatgcctgcaaacacaccggcatccatgcccacgacttccggattcacgtcgatggcaccgacgatttgaatgcctttctcgtgcatatagcgaatcgtgtacttcgccattttgccgcagccgtattgaatggctttgattggttgcataccgcatactcctttgcaacagtgcatattggccattggagaagtctcaccgtcgagaccaagccaatagccttaactctaccgacatcaggctgggcattcactgatatcggcggcactggagcgtcgggaagagtcggcgtagcggtaccgctaccgagcagaaggactgggccagtacaggtcctcccgccgaatcacggcatctcg

SEQ ID NO: 2226 - DNA, 2631 bp, Unknown
  R51_24m  MAG No. k141_37148
gtgcctccggtgggactcgaacccacaagccgaagcgatcgattttaagtcgactgcgtataccatttcgccacggaggccaacttttctattataagctatctcctgccctgagcattgcttgcgggttgctgcgcttcgtgcagccgtcgcggcatagccgctcccttcgcctacaaacagcccagtgggctgtttgtagcagccggtagcgatagcgtcgccggcgtcgcatataacgcaaacagcccaccgggctgtttgcttaacggctcagcccgctggaggcacttaccacttacgctattgagccagcaaccggcgaccataatcgagcacaatgccgtccagcagcccgtgttcgctggcgacgaacgaatcgatggcttcaccatgatcggccttggcggcttcgctgacacgcgccagcacacggctccagaccacagcgccgccgccgaccacatcgatacggccggggtggatggtcttgtattcgcggcgctcggcgcgcgtcatcctaaggaacttgtcgtccacggcataggcgtcttcaaggctcaaccgatgcccgtcgaccacggtgtgatcgtattctttcaatcccatagccaaggcggtcatcgtggtcaccgtgccggacacaccgatgatggtacgggccttgcctgcgtccacggtgcggaaggcctcatcgatatgctcgtcgatgtccgcaacggcctcatcgatctgcgcctgggtcggcggatcgttggtcagatgacgttcggtcatgcgcacggaaccgatgttcatggagaatgcgccctgaacctgggtggtggacgcactgacgccgtcgccaccgatgaccagctcggtggacccgccgccgaggtcaaccaccagatagggggcgggcagatcgtcgcgattgaccacggaagtggcgccgaggaagctcaggtcggcttcttcagtgccgggaatgacttcggggcgcacgccgaggatacgttcgatctcatcctcgaactcctcacggttttccgcgtcacgagtggcggaggtggcaacgaaacgcaggccgtcgatgggatgctcggcaatcacaccggcgaattcccgagcagccgcataggcgcgttccaacgcttcgtcggcaaaacgatgggtcttgtccacatcctgaccaaggcggatcacacgcaggatgcgcggcaccacctcatgcatgccatcggcatcgacacgtgcgatcttcagtcgaatggagttcgtgccgcaatcaatgccggcgacggttacggattccttgctcattgccttctcctcgtatcccttagtgcgtatgaatgggctgttcgcggtggctcatctgttgatcaatcatccagcgtgcagcggcagacggtcggatcgaactcgtctttgacacgttccagcaccaaatcgccaatggggttgacgcccggccccataaccaaggactgggccagcagggcatgcaggcacttgacgcgcaccggcatgccaccggccgaagtgccttcaatatgctcctcactgtcgccaagacggcctgccagttcgtgacggaatgccagatacaggttatgggcctgctcatatgcggccttgagctcctcatcagcggccagcatatcgttgtattgctgcatcacgccggcggcctcgacatgggaggcggccttgacggcttccggaccggtcagatagcacgtggtggggaaagggattccgccgggcaacaccgggcgggtgattacggcaagtggcctaccgcagacgcatcgcgctcccacggcgaccatgccgcgcgggtatcggccgagctgacgctgcaccaggtcgatgtcatggtcgttggcgggctcggcaagcatggtgtcgacaagggccttggccttggcggcgatatcgatggtcactgttgggttccctcccctgtgttctgttgggtgttctgatcggatggggtgttctggtctgacttatcggactgcttggatgagtcgttgggtgacgagtcagaggaaccggaagtatcggatttgccggactcgctatcgttcacaggctcatcggcctttttgagcgagtaagacagttcgctgtaccatggcaggacttttttgttgctgctactggaatcttccgttttctgggattcgctatcggagccggtcacggcttcgggatgcagcacacgcacggcctgttcgccggggaatacgaagccgaggcgttcacgggcctgggcggtgatgtaggccttgtcatcccaacgcttgatgtcgttctccaactcctgcttttgggcgatcagcgaggcctcctcacgcttgaggccattgagttcggccagattcagggcataggtgtggaaggtggagaccaactggatggtgccgagtgcgatgatgaacagggagacgaagaacgctatgggccccgctgacctttttctcctgacttgtgctttgccggttttgccaggtttgccggtacgggacgacttgctcatgtcacatgaaaatacccgccgcattcgacttgacgaacacgacgggtatcgagcttcagtggaaactcacgcctttacgggcgtttcagctcacttggcca

SEQ ID NO: 2227 - DNA, 6100 bp, Unknown
  R51_24m  MAG No. k141_37328
caccgagcttgtccagcaccgccgcatgttcggcgaatgcgccttgtacggccaggatgccggtcacgccgtgcttgacgttttcgacgtccgcggactcttctttggaaatatattcaacagctacaaccatgttgtctcactcgccgcgagcggccatgatggtctgaatctcgtcctcgttgatgccgaccatggcttcgccgaggttttcggacagcttggcgagcagatcggcgtcctgccagttggcggtggccttgacgatggcggcggcgcgcttggccgggtcgccggacttgaagatgccggagcccacgaacacgccttcggcaccgagctccatcatcagggcggcgtcggccggggtggccacgccaccggcggcgaagttcacgacgggcagacggccgttgtcgtgcacgtacttggccaggtcgtagggcacggccagctgcttggcggcctcgtagacctcgtcgtcgcgcaaggccacgagctcgcggatctgcttgttcatggtgcgcatgtggcgcacggcctgaatcacgtcgccggtgccgggctcgcccttggtgcgaatcatggcagcaccctcggcgatgcggcgcagcgcctcgcccaggttcttcgcgccgcacacgaacggcacgtcgaactggttcttgtcgatgtggtacacgtcgtcggccggggaaagcacttcggattcgtcgatgtagtcgatgtcgatggcctgcagaatgcgggcttcggcgatgtggccgatgcgcaccttggccatgaccggaatcgagacagcttcctgaatgcccttgatcatggccgggtcgctcatacgggagacgccgccggcggcacgaatgtcagcggggatgcgctccagcgccatcaccgcgcacgcgccggcatcctgcgcgattttcgcctgttcgggcgtggtgacgtccatgatcacgccacccttgagcatctgggccagattacggttgagttccgcacgattctgcgtcatgagtttcccttcgttcgacgctgcttggtatcgcgcttcattattgaacggattggattggcccacccaaaccagtccaatttggatggggccaatccgcaacttctgcacccatccaatccggcaaccggttgtatggccttatgcatccggcacgtattcgaagatgcgcgcaatcagtgggaggtattagccgacggtgttgccgtagatttgggcttggaggtctttacgggcggtttccatgcgggtgatctggccgaggagggttatcttctcttcgccgtcgggcagctgggccatgcggcgtttggccaagccgatctggcgcatgaagcccatgtccagtagccgggtgagcagttcggtggcatagcgctgctcttccggcgtggcagggcgtagctgtactgcggcggcaccgccattcacgccaacacctcctcccgacacgttggcctgcaccggctgcgcaccgctaccgatgtcgtcgccaggcagtggcaacggcatgacggccagctcgttgatcacctgattcagcatcggcccgccggccttggtgaggttgtgcatccacagcccctgcggggtatcgtcggatggcagtccgccggcggccgcgatcgcctggaacagggtgcggaacaccgaagtcatgaaatggtcgatggtcagctgcccgaacatggtgcggtcgatggcgcgcggcacctgaatcagcacggccatgaactgctgttcggcgatgaatacggcgtcgtcgatcttgaaatatgcctgttcggcggcgtcacggcgctccaacgccttgcgcgtggccggattggcgtatgggttggtgccgggttccacacgcggctcgtcacgctcgaatcgacgtttgggcgtgtaggcgtcctcatcgcgtacatgcatctgccggcgcgcgttcatcacctcgcggcgcatcacctcaagatccacgccgatacggcccgcggacttgcgcgcgtaagcgtcccatagggagcggtcgcgaatctgcgccaccagcggggccacggctttcatcgcacccacttggccgggcgtgtaggtcaggtcgaaccggccgatggcggcgtcgatcacgaagtcatacaacggtttggcgcgggcgatcagcgagcgcaccgcctcgttgccccgttcgatgcgcaggtcgcacgggtcgagattgtcgtcggccacggccacgaaggtttgggagaggaaggccgaatcaaggccgaaggcatgcagcgcggctttctggccggcggcgtcaccatcgaacgtgaacacgatgcgcgagctcaacggctggtccttgaccttcaacggcccgaccagctggaccgcgcccagcgaatcgtcggcgatcaggcggcgcacaatcttggcgtgctcggcgccgaacgccgtaccgcacgtggcgatggcggtgtcaatgccggccaagtgcatggccatcacgtccgtatagccttcgacgatcaccacctgtcgcttcttgacgatggcggatttcgccaaatcgatgccgtaaagcacctgggttttgcggtagagctgcgtgtccggcgtgttgatgtatttggcggcgatctgatcgtcttcgtatagtttgcgcgcgccgaagccgagcgtgcggccggtcgaatcgcggataggccacgtcacgcggccgcggaaatagtcatagatgccgcgctggccttggcgggccaagcccgcgtcgaggatttccttctgcgtaaaccccttggaggccaagtggcgcacaagattatcccaaccttggggcgcgtagccgcaaccgaaacgttcgcagtcggcttgggagaagttgcggcctccgagcagcttgcgggcgggcagtgcttccttggtcaggatctgggagacgaagaagcgttgggcttcctcgcaggcttccagcagtcgggtgcgcttggagccggtgttctcgcggttcgggccgttgccgctgttctcgtagtgcagctcgatatggtacttgtcggcgagcagttccacggcttcgcggaagtcgatgttttcggattgttcgacgtatttgaatacgtcgccacccaagccgcagccgaagcagtgccacacgccgagtgaggggcgcacgttgaagctgccggttttctcgtcgtggaacgggcacaggcccacgaaggtgccggtgccggagggcttaagcgttacggtcgcagatacaatgtcatacaggtccgcggcggcgcgcaccttctcgacatcctctttcttaatcattccgaccataagtctctagagtaccgcttcacctgagacacggtaaatttttaccgtcggttatcatttcttccgcgaaactcccttcagtcgcctacagcgacagctcccctcacccgaggggagctggctcgcgcagcgagactgagggaagcacccgtccaacacgccctcagcacaagatggagtgcagggccagagcggagttgtcggtcaggcttgcgacctgatcgatggcgacgcgcaggcgctcgttgtcattggtggattcattccaatcggccaggaactggctttccaaagcgtcggatgggagcggcgaatcggccataagcacatcgaccaaatccgatacgatcttgagctcctcctgatggaatggctcgcgctcgcgaggcgccatgacgaagtacacggcgatgcccttcaacgccacgatctcgtaattcgtgtcctcgggaatcacgatgttcgcggaataccgggtcaacggcccgggcccatacgtgtcgcgcgtggcggtttccaccgaccagcagaagcgaccgatcaaatcggacgtgatgttcttgagctgtgccaacgattcgcgcgaaccattgaaatgtgcagggaacaaatgctctcggcgcaatcgcatgaacgcggccagcagcttgtcggcatcccacttcgccccataccatgcgcgcgtctgctcgatgatgtggtccagcatcttcggatcggcgagcacaatcggatcgaacgcgccggtggcgatggaatcctcgacatcatgcacggagtaggcgacatcatccgaaaggtccatgatctggcattccatgggcttggtggcctggggagcgccgattttgagccagcggaacaccggttcgtcatccgggtagacgcagaacttcttcgaccgctcccccttggggtgtcggtcggcttcggccaaggtccacgggtatttgacggccgcatccaaggccgcacgggtcaggttcacaccggccgaacgcccgtccgggtgaaagatcttgggttcgagccgggtcaggatacgcatggtctgtgcgttgccctcgaagccgccgatattgctggcgatgtcggcgagcgcacgctccccgttgtgcccgaacggcgggtgaccaaggtcgtgggccagacaggcgcagtcgaccacgtccggatcacagccgagcaatgcgccgatttggcgaccgatctgggcgacttccagcgtatgcgtcagtcgggtgcgggcgaaatcgtcggtaccggcaatcagaatctggcttttcgcgcccaaacgccgcaaagcggacgaatgaatcagtcgcgcgcgatcgcgttcgaaagccgtgcgcgacttggatttgggcggctcgggtgcccaccgctcctcgtcgaaggcgctgtagccctcatcgctcagcacctgttccccatccaacgtcgtttccatattccaagcataggcacacatatcggccgcagtaatcccgacttcccgaatatgtgccactgacgtcaactcaacggcacatattcgggagattggggccgatttcccgaatatgtgacgctcagcacatgtcagtggtacatattcgggaagaagggattacggggtgccaccgtatggcggtaatgcaccttatagcagcgtggcggggtcgagcttggcgaggtcggcggcgggcagtacttcggcggcatgctcgtaaaggcgcgggatgcggttgcgcaggcaggtgaagatctcgtagctgatggtgtcggcggcgcgggcccaatcgtcggcggtaggctcaacgtaatcctcgccgcggcccgggccgaacagttcgaccgtgtcgccctcgtgaacgccgagttcggcggcggatccgtgcaggtccacgatgaactggtccatgcacacgcggccgcacacgcggtagagcttcggaccttcagtggtcatgatgcgcaccgggccgcccggcttctccacgtgcttggcaccttccatatcgaaaccggaagcggagcggtggatgccatcggcgtagcccagcggcacaatagcggtcgaggtgttgttcggggtcaggtaggtgcggccataagagatgccatggccggcctccacatccttgaccgtgccgagctgcgcctgcaggcgcatggccggggtcagatgccagtcgcgcggggtgcccatcgcgggatcgggctcgtagccgtacaggccgatgccggggcgggtgagttcgaaatggatctcgggtcggtccagtgtcgccgccgtattggccagatgtcggatctcgggcgggatgccggccagctccatgcgcctggtgaagtccttgaacgttgcgatctgctggtcggtggaggcgacgaattcgggcacatcgggcgaatcggccacggcgagatggctccactgacccacaatatgcaacacgccctctttggcgagcggcacgagtttggcgagcgcggcgtcgaatccggccggcgtgaaaccgttgcgaccgaagccggaatcgaccttgacgtgtacgcgggcgggcttgccgagcttgcgtgcggcggcggccacggcatcgatgccgggcagggagccgaccgatacgtcgatatcggcagcgatcagctcatcgaatggcgcttcggtgccgttgtagacccaagtcagaatgcggcaacggtcggggccgatgccgagtttgcgcagcagcagtgcttcatgcgattgcgcggtgccgagccatgtcgcgccgccggcgagcgcggccagtgcggcgggca

SEQ ID NO: 2228 - DNA, 2983 bp, Unknown
  R51_24m  MAG No. k141_37444
agacgctgttcgggctggacgcacagcatgaccagcgaggcgacagacagcacggcgaacagaatgttccatacgcccttgcccggcaggttcagcttcttgacccacttgatgccctgcagcttgccggcggcgatgagcgagccggtgaaggtcacagaaccaatgagaataccgagaccagcggtgatgagcaccacgatgtccggggtgccttccttggtcaggatgtcgttcagggccacgagtgcggcagcgccaccacccacggtgttgaacacggaaaccagctgcggcatgtcggtcatcttcaccttcttggcggagacgacaccggccacggcaccgatcaggatgccgacgaccagcaccaccacggcgacaatgttcacgaagcccttggcgaaaagcacgatgaacgccatgagcacggccacgaccatgccgaacgcggagatctggttacccttgcgggcggtcttcggagagttcatgaagtgcaggccgaccacgaacaggacggcggagaacaggtagacgaaccatgcgacgatgtcgatggcgccaacggttgcggaggtcattacttcgactcccccttcttctcgttcttgctggacttgaacatctcgagcatgcggtcagtgaccacgtagccgccgacgacgttcatggtgcccagcacggcggccaggaagatgaacacgtaggccagtgggctattggcttcggctgccacgatcacaacgccgacgatgacgatgccgtggatggagttcgcgccggacataagcggcgtgtgcagggtggcgggcaccttgccgatgacctcgataccgatgagcagcgcgaggacgaacagggtaatggaaacgacgagagtaggcatggtattccttcttccttacttctcggacttctcggcatcggcagcagctgccggggcggcggcgcggccggcaaccaccagcgcgtcgtcaagttcttcggtgagatcctggccgagcttgccgtcacgcacgaagtgcacgaggatgtcggccacattgcgcgaaagcaggttggatgcggtggtggcgacgccggaggccaggtagggagcgccgatcagcttgacaccgccctcggtgacctgctcgccgacggcggaaccctcgacgttgccgccgaggtcggatgctgcgcagtccacgatcacggcaccacgcttgagacccttgacgccggctgcggtgagcagcaccgggggcttacggcccgggaccttggcggtggtgatgatgatgtcaaagccggcggccttctcatcgacggcagcctgctgctgagcctgctcttcggcgctcaacgcgcgggcataaccgccctcgccctggcccttggagaagtcaagtcccagatcaaggaacttcgcgccgagggactcgacctcgccctgggaggcgggacgcacgtcgtacgcggtgacgaccgcgcctagacgcttcagcgtaccaatggcctgcaggccggcgatgccggcaccgagcaccagcgccttggccgggcgaatcgtgccggcggcggtggtcatcatcggcaggaaggaaccgtaagcatcggcggcggtgatggctgccttgtagcccatcacggagttctgagaggtcatctcatccatggactgggcgctggaaagcttacggggcagcttttcgatggcgatgcccaccagaccggccttctcgagcgcggccacgtaatcggcatcggtgaaggaaccgagcatgccaatgacccactggccggccttgagcttggctacggtctcggcggacggtcggtccacaaaaccgagcgcgtcggcttcggcgagcacctcgtcacggctggtcaccttcgcaccggccttttcgtaatcctcatcggtgtattcggcggcaatgccggcaccggcctcaataatcgaggagactccgctcctcttcagccgggtgacgatatccggcgtcaacgcgacgcgggattccgtttcggacgtttcattcaaaacgccgaacaccacggtggcttctgggttttgcgccatgagagccctttcttgttctacttcaaaatggacatggttatccgcatagaaagtgtagtcggaaggtaaaggccatgacttgagattccgccaatcgaaacagaaacgaacccgaaattagcgagaaatacgaatgtgtccatgtgtattgcggatgaattgctcggaagtcgtccaacaatcacccggcatcgatcagcaaccaaccgctcagtaattatcgacaatcaccgtttcgtagctcacggttactcaacaatatcgggacctgtgcaatattttgccacgcactcccctaacccgccagaatcctacggttgcgtaaggtgacgagttcggtttgggcgattacaatttgaactttgagaagcgttcgcctcatggctggacgacactgaaaggtttacaggagcaagacttgtcggttatcaattccttcacgcagcacactatcaatctcacccgtaaggcgctcaggttgggatccgacttcgtccacccggtccacgacgacaccccggacgagcccgattacctgtccaatgccgacgtgccggtcgagaccaatatcgctttgcctcacagcgacgattgggacgacggccacctgaccgtcaccgacatcgaccccgccaccggcctgctcaccacctccaccgaaggcaatccgccgctggacgaaggtacgtccatctacgacctgtatgcggaccgcgccgaacgcatgggcgatgagccgctgtacacctacaagtccggcaacgattgggtgaccgtcaccgccaacgagttcttggctgatgtgcgtgccgtggccaagggcctgattcattacggcctgaagaagggcgatgccgtggcattcatgtgccgcacttcctacgactgggacctgaccgacgcggcgatcatggc

SEQ ID NO: 2229 - DNA, 15321 bp, Unknown
  R51_24m  MAG No. k141_38099
acggtggaacacgagctccagcacggtttccagcggaatcacgtcggcgaacgcggacaacgcgttgtattcgccgagcgagtggccggcgaagtaggcgggccagatgtcggcgccggcttcgcgcagacgggcggtctgagcaaaagcaaccgtcgcgagcgccacctgcgtgaactgcgtcaggttgagcaggccttcggggtgacggtaggtcacgccgttggcggtgagttccttcgggttgtcacgcacgaggcccaggatcgagaagccgagcttggagcgggtgagcttgtcggcgcgctcccacacgtcgcgggcggcggcggacttggcgcgctcgtccagaaccatgccctgcttctggatgccctggccggggtagacgaaggcggcgcgcggcgcacggaccagtgcggtgccgcgggagacgagctggccgtcgatacggcaggtgacttcgagggtcatgccgccgtggcgcactttgccgacgcgctcgacggagatttcgacggtgtcgtcaagctggaccatgccgtacatgttgtaggtccagccggcaatctcgtagtgggcacccttctcgtcggtcgcctgcacggcgtgctgggcggtggcggacagccacatgccgtgcacgagcggggcggccaggccggagatgcgagcgccacgagtggaggtgtggatcgggttgaagtcgccggaagtgcgggcgaaggcggtcatgtcgtgtggggcgacgaccttcacgcggcgcagcagacggcgcggagtggcctgcactacttgcaggccgcgcgaggaggcggacagtccagtggactgtccggcgacggagccatccgcttccttattcaggagggcaccaccatactcgggggcgtctgcaggcaaagcatcggagtagacgcggccgcggatcgcgaaacgctcggtttcgcgggcaagcggcgtgccgtcggcggcggtgtgggtcacgtggatggtgaccacgcggccggaggcggactcgaagtaatcctcggcccaagacttcagggtgatggtttcgccggtgtgcttgagcaggtcctcctcgttcacctcaagttcgatgaggtggtcgaggtggacggcgttgagcaggccttcaatcaccgggtagcccttgacgtacacggagccgagcgccgtgtagattgccggccaggcagggccgaccagcgcatcgggggcgatgcggctgggctgcagggtggtcggcagagcggcgccagtggccgcttcgtggtcgaagccgaggttggcggacagggtgtaggttgcggttgcggtaccgaacggacgctcgtcagaggtcttgccgtcaagctgcggcatctcggtgagcttgtcgccggtgatggcggtgttgccaatgcctgcggtggcggcgagcatcgcgtagacgtccggaatcaggcgttcgcggtccacgaccggcacacggccgggctcggtgccttccacgatgagcgggatgacgatatcgcgcacggcgtgcttggaggtgccgccgtccgggtcgttgtcccagtaggtgtcgaggtggatgtccagatcgtacttgccggccgcggcgtcaaacgcgcggatctcgtagtactggtcgcccagggcggtgccgtaggccgggttgtcggtgatgtggccgacccaggagatgttcggggacttgcggatgaagtcttcggcgctggtggcctcgccaagtgcggcgaaatcgtcgttctcagcggcatcggcggcttgctgttcgtcctgcacgcgcttgatggcggcggtttcgaagcggccgaggatgtcggcgatcggctcgtcgatggtggtgatgccggcaacggagatcgggccggggatggcacgcacggaatcggcggagtagcgctggtcttcggactgccagagctggtcctgaccccaccaacgcagcaggtcgttgtcgatgacgggtacgaacggcatgggcttggggtattcgcgcacgagcaccgggaaccaagccacgtcggtcgggaccaccttgagttcggcggtctgcgggtaggccagtgcgagcttttcgagcgcgggggccgggtcggcgagaatgtcgtcgtgggtcagcaggccagcggcagctgcctcttcagcagaaacgccatcagcggcgaacaacttggaggtgaattcgccggagtccgtgtcgttcacacgggcttcgatgcgctgcagcaggtgctggaagcggtcggcgtaagtcgggtcgacccacgggaaggcgagttcggcgaagcgctgcgcccactcaaggtaggtcatggaggccaggtcgccgaagtaaggcttggcggtcttgttcagggcttcgatgatttccttgcggcgggagtcgagctcttcggggtgcttcatgacgcgcacgagcagacggccgcattcggcggagtcgttctcgagctcgtaaatgtcggcgtgcaggtggctcaggccggaggacatgccaccgacggacttgccggacggcacccagtgggcggcctgcggggcgaacacgtcgtcggacttggcgtcggccggaataccgggcgtcttgacgagcagctgcttgacttcggggctggtgtgagcctccttggcggtcatcgcggcggtaccgataagcacgccgtcgaccggcatgtcgggcaggccgtaggcgtgggcccactggccggaaatgtagtcggccgcgcgttcgggggtgccgatgccgccgccggcgaccagcacgaggttgtcgcaggcgcgcacttcggcgtaggtggcggcaagcaggtcgtccagcgcttcccagctgtggtggccgccggcttcaccgccctcgacctgaaccatgatggtggtgggggacacggccttggcgatgcgcacgacctggcgaatctggtccacggtgccgggcttgaaactcacgtacggcagaccgtccgcctgcagcgactcgatcagggccacggcttcgtccagctcggggatgccggcggagacgaccacgccgtcgatcggcgcgccggaagcacgcttcttgggcacgatgcgggaggagccgaactgcaggttccacaggtaacggtccatgaacatcgcgttgaattcgaccgtgcggccttcctccagctcgtcttcgagggcggcgatgtggcggtcgaacacttcggcggtcacctggccgccgccggcgagctcggcccagtagccggcgttggccgcggcggccacgatttccggttccacggtggtgggggtcatgccgggcagcagtaccggcggcttgccggtgagcttggagaacttggtgaccagcttggcgccggccggggtgttgatgacgcgcggggcgaatgccttccagttctgggtgcgctcaggctcgctttccagcgtggagagcgtggagcgttcggacagcgtggtggcttcgaccacgccgatgccggtgccctgcaccacgttgccgatcagcttgccaagcgtgttgccggggccgaggtccacaatccacagcttggccgggtcggcggcgtcgaacagcgccttgacgcgggcattccagtccacatggttgagcagcacttccgcagcgagtgcgcgggtgcgatcctggtcaaagccgcaggcgccggcccaagacacggtccgctcgacggcgtcggccatgagcggagagtggaagggcagggtgacttcgaggtattcgagggtcgggttgaacacagtgccgccgtggagcttctgttcacgcagcttggcctggtgcttgtgctcgcgctcggcttcgagggcgagtgctgccaggtcttccgggtagccggaaagcacgtggtggttgtcggagttggtgacggcgatggagatcgggcctcgggcgttgttcacgcgcttgaccagagcctcaacctgttcgcgggtggcgcccttgacggagagcatcggactggcttcgccatacttggggttcaggtccagttcgcgcacgcggcgagtgccggctgcaccgatcagggcggcgacggccagaatctcgtcgagggtcttgccggcggcctcgatggagccggcggcctcgatggcgcgggccatgtgcacggcgagcacgccctgggagtggccgagcacggcgagcggcttggcctgggccacgctgtagccgaggtgttcgaggtcgagcagggcgccgagctgggtcagtgccacgccttccacggacgcggtggcgtcggctgcggcgccgaggcgggccgggttcggagtgaagccgaacaggtcgaccggacggccggtggtggtcagcaggtcggcggcgaccggggtgagcagtcggttggctgcggcgatatggccgcgcagggcctcgtcaaggctgggatcggtggtctggtctgccagggctaccggccacggggtggactggccggcgaaggcgagcgcatggggctcggtggccaggcgattgaggaagaaggtggtcattgctttccttacttgtgtttggttgatgtcttcagaaatcagaggggctggttgccgtggtgtttggtggtgcgcttgacgcgccgcttggtggcgagcgtggccagcgattcgacgatcacctcacgggtctgttcggggtcgatcatgccgtcgatctgcccgatttccagcgacaggttcgcgttgacggtgctggtctcgtactccttgatgtacttggcccgcagcgcatcgacgtcctgcccggaggctttggccttggccaggtcgtggcggtggatgatgttcaccgcgccggccgcgccgagcaccgcgatctgggaggagggccacgcgaagttcaggtccgcgccgatggctttggagcccatcacgatgtacgcgccgccgaacgccttgcgcaacaccacggtcaccatcggcacctgtgcgttggcgtaggcgtagatcaccttggcgccgcggcggatgatgccggcgtgttcctggtcggagccgggcttgtagccgggcacatccacgagggtgaccacgggcaggttgaacgcgtcgcacaggcgtacgaatcgggcgaccttctcggacgagtcgacgtccaggatgccggcgagcacgttcggctggttcgccacgatgccgaccggcttgccgtcgatgcaggcgaagccgacgagcgcggaggcgccgaacagttcctgcacctgcacgaattcgccgtaatcgacgatgcaacgaatcacttcgagcatgtcgtagggctgacgttcgttggcgggcacgatggtggcgagtcgcttggcggtctcgcgttcggcgcgggtgacggcgtaggcgtagaccggcggcttgctttcgctgttggacggcaggtaggcgagcacggtgcgcgcatagtcgatggcgtcggattcgtcctcgccgaggtagtgggccacgccggacacccggttatgcacttcgccgccgccaaggtcggccatggagatggtctcgccggtcgaggccttgaccacgtccggcccggtgacgaacatgttcgagttctcacgggtcatgatgatgaggtccgtcagggccgggcagtagacggcaccgccggcgcaggggccgagaatcaggctcagctggggcacgaagccgctggcctcgcaagtcttgcggaagatgcggccgtactgggtcagagcggccacgccctcctgtatgcgggcgccgccggagtccacgatggccacgatcggcactttgaggtcgatggccatgtccatcagtcggcagatcttctcgccttcggcggtgccgagggtgccgcccttgacggagaagtcctgggcgtagacggccactttgcggccgtagacctggccgaagccggtgatgacagctgcaccggcgttgccgccggcgatgttgccgccctggaagcggccgatctcctcgaacgtgccggtgtcgaagagcaggtcgaggcgttcgcgcgcggttttcttgcctttagcgtgctgcttgtcgcgggcgcgctcttcggcggcgcgggccagttcggcggccttgaccacggcggtgcgcagcggctggtgggccgagggctgggcggcgttggcggccgaggccgcagccgcggccttcacggccggcgaatccatgatgtcagtcattgccaccctccttcttggcgtcggcggccttggccttgccggcgttcacgtccagcgtgaccagcgtgtcgccggcctccacgccatcggccgggccaacgaaaatcttcttcacttcgccggcggccggcgcgtacacgtagttctccatcttcatggattcgagcaccaccagaaggtcgcccttggccacttgctggccttcggacacgttgatgcgcgtgaccacggcctgcatcggggaggcgatgacgccggatttggcaccgtcgttggccgtggcggcaccggaggccacgttgtgcaagcctgcgccgcgcaacggctgggtggggcgcttggcaccgcgggcgcgggccgagccggtgatgttctccacgatgtcgagtggcacggtgagcttgacgcggcggttgttcatctcgatgacgaacgtctccgacttggacttgtcgggcgcggccggggcagcggcacccggggcggtggccaaggaggccggctggccggaggcggcggaagccggtgtgcggttcaggtacgtgcgctccagccacttggtggacacggcgaacggatggccatgctcggcggtgaagtcgtcgttgcggaagatctccttgaacagcggaatcggcgtgggcacgccttcgatcacgagctcgtcgagcacgcggcgcacacgggccacggcatcgagacggttctgggcagtgacgatgaccttgcccatcatcgaatcgaacttcggggagatggtgtcgccctgttccacaccggtatcgatgcgcacgccggggccggccggccactggatcttctccaaggtgccggagccgggggtcaggttggtggccgggtcttcgctggtgatgcgcagttcgaagctgtggccgcgcggttcgggggcgcgggtgagctcgccaccggcggcgatattgagctgttcgcgcaccaggtcgaggccgctgacctcttcggagacggtgtgctccacctgcagacgcgggttgacttccaggaagtacactttgccgttcggggtcaccatgaattcgcaggtgcccaggcccacgtagccgaccgtggtgaacaggcggcgggagtattcctccagcgtgctgacgatttcctcggacaggaagggcgcgggcgcctcttccacgagtttctggttgcggcgctgcagcgagcagtcacgggtggagtacacggtgaagttgccgtgcgagtcgcgcccggactgggtctcgacgtggcgtgccttgtccacgaacttctcgatgaagtattccttcagatcgccgccttgcagcgcgtcgtggttcatgtagaagcggcgcagctcctcgtcgtcatgcaccacggtgatgccgtggccgccaccgccatcagtgcgcttcatcatgatcgggtagccgtgggtgtgtgcgaagtcgagcagcgttcgcacgtcggtcaccggttcggacaggccaggcaccggcggcactttggcgcgcaaggccactcggcgggcggtgatcttgtcgcccaaatccaccagcgcggtgtggtgcggacccacccagatggcaccggcatcctcgaccttctgcgcgaagctcggcacttcggaaaggaatccgtagccggggtgcacggcgtccgcaccggttttgtgcaggatgtcgatcagcagatcctcgttgaggtacgtgtccttgtaggtgtcgccggagagcaggtatgcctcgtcggccatgtccacatagcggctattgcggtcttgttcggagtagacggccacggtggagatacccatctccttggccgtgcgcaccacgcgcagagcgatctcacctcggttcgcaatcagcagttttttgacagtatgagccatagtgtcaaattgtgctctccatatagaggagagggcaagccgcgttcgcacaaaagctttcacgcccttttgtaggctacgaacaaacgcgcgcgtaggttccggcaacgtaaccgttggcgccggctatcaaaaacgttgcaaatccgccgattgcacatccttgcgcgccggttcaagaagttgacgttacggttgcgttcgtcaacttatgacaaatcgaaatcgacaattttgtaagttggtacgaaaccgcacgaaatcgaacacctctacgatggcaaccgtaagttcgggggaaggctcatctgcgggcgaacggaaggcgaccggaccggcatcggtccatcgccgcacgattcgcccgcacagggccggattcatttgggaccgtccaccatatggacggttcgggctgtcggggataccgcacggcccgccggaacctcccctcatccatcgcataccgcccgccgttcacggcgatatcacacaacataggggttattgatatgcagacttcacacaccaccgcatccgcagcggccaccacgccgctcgcccgtcgtatcgtcgccgcatcctggaagccggtgctgttcgccgtgctgatgtggctgtccgcggccgccggcgagattccgattccgggcacgccggtgccgatcacgctgcagacgttcgtggtgatgctcgccggtctcatgctgccgtggcgtcaggccggtgccgccgtcgccacctatctggcggccggtgcggtcggcctgccggtgttcgccggcggcacctccacgctggccctggtcggcccgagcgccggcttcctcttcggcttcctgccgggtgtggtggtcatcgccctgctgcgcggcaagtccgacacttcgtccttcgcggccgccgcgcgcaccgcgggccgctacctgctggccgcgctggtcggcggcgtcgtggtggtgtacgccttcggcttcatcatccagtccgcgttgaccggtgcgccgctcgccgccgtggccctggcctccatgggcttcgtcgtcggcgacgccatcaaggccgtggtggcctctctggccgccgccggcctgtccaagctcggtcgctgacctgagctactagctagctactggccggctattacagcactcccacatcggcggtgcggaccgtatggtccgtgccgtcttgtgttctcaggatcagtgaggcgtcttcgttgaggccgatggcttcgccggtcagcgtggtgccgtccgtgaaatgcgcctcgacctgacggccgcgcgcccagcacaccgccttcatttcctcgcgcaacgactcggcctggcccttcgggtcggcgatgaacttcgccagtcgttcacggaagccctcgacctgacgttcggccaccgcatcgcgcatctcgccaaacgacggcaagcccgtgacatgcagctgcagcgaagtcgactgcggcgtgggcagccaacaggcacccagcgccagattcaggcctacgccgaacacgatgacgacgtcgtcatcggcatcagcatcagtaccggacgacggcggaatcaccagttccgagagcagcccgcccagcttgagcccgtggcagaacacgtcgttcggccatttgagttccagcaagcagtccggctggttcggcgcggcaccgtattcctcgatcatgccgttcagggcgtccagcgtgaccagtccggcgatcatctgcagccagccattgacggattcgtcggtggcgatcgcgcgcggaatgcgcacggcataggacatcgtcgagcaacggccgggctgactgatccacttgtgaccattgcggccacggccggcggtctgccggtcggcggccaccacggccaccgccagttcgccatcctggtggtcgggcagcgtcaacgacccgtcgccgatcatctgcgcggccagcgcgttggtcgaatcggtttcgtccacggcgaccacatgatccgcgacggctgtagttctgggtagctgcggcgttgcagctttcaatgcaatcatcatggacactacgttacctcggttgcgccgttttttgcccgcgatattccacggaaaagcgcacaaaatcaaccattttgggccggacagcccgtgttagcgttcacaacttcggaaattccgcattcgccgagcccacgcatgcacccggccgtcgtattggcttgcgaacaatggcgatgcccggcagacatcgaatatcaaccgttgacctgtgcggctaccatatattgtcatgacgtcaccagccaccgcgaagcttgccgccgtatccagccgccagtcccacccgcatcttgcgcgcgtgggcgctgccgcgcgctggacactggccgtgctggcctgcctgtggcttgcactgtgctcggcggtcggcccgctgtaccgggacgaggagaacggcaccctcgcccattggaactgggccaataccgcaatattcgtcgtgtcgttcctgatatatctcggaatcatcacgctgatggcgcgattcgcagtaggccagcgcatactgccgaagaccatcggcgagcgcctacgccaccatcagcagaatagcgaaacatcacggcccaccgccgatcagcaggccagccaaccagccaagacccgtcgtaccgttcgcgctatcgtcacgtccaccgtcactgttctggaccgctggatcacacgcggcacgaaccggttctggaagcttatgctggtgttttttgtcggctggctctgggtgccgaccactctgctggccgcattcggcgcggacctccgctcacagatccgcgaattcagctgggcctggaaccagtggaccggcctgaaacagccctatatcggcttcttctccttcgtgccgatggacatctaccccaccgcgcactacatgtggccgtccgatcccacgtatctgaccgaccagcacaatgtggtactcactgtgttctatggcgcgatagtcacgtttgcgaggcatctgaccggctcaaacgatgccggcatcgtgacgttggctgccctgcagacgctgttcgccgtgttctgctgcgctgccgccgccaatcgattcctgaaccggccttggataggaaaaacggcaacggattccgccgttcccccacaggccggaggattggccagattcctgattctgctgttcttcatggtctgcccgctggccgtgttttccactatctccatcaccaaatcgccgctgttcgcgttctcgttcgtctggtggttcagcgtctggtatgaactcgtccagacctggcaccccgccggcacccgcaaacatcctcagacccctgccatcgccacgcccgtccacttgccgtgccacagcttcatcgccttcatcctggccacgtcggtgatgctgatttccgcgaaatatgcgtggtacatcatcgctctgcaaatcgtgctggctctgatcgccgaccgcaaacgctgggcgacttacgtcgtggcgctgctcatccccaccgtactgattcacggcggcatctccttcgccatctcctctggtgcgatcatcggcggcgatccaatcgaaagccgcggcgtacagctgcaaatgatcgcccgcgtggctcagcgcaatccggacggtatttcagacgaagccaaaaagaacctcgcgcccgtcttcaatctcgatcagatggccgacgcttactcccagcaggatgccgacccggtgaaatcctccggtattcaggccaagaaggtcagctacaagtggcgcacggtgacgcccgaggatatgaccaatttcaacaaggcatggttcgaaatcgtcaaggacaatccgatcatcgcgctggatgcgttgctggccaaatgcttcggatacttcaatgtgaacgatcagccgtacgtatcgatggattattacgtggccagcgattacgtgcagaaaaactccacatggatcaaggattacaaccatgactggcgtgagcacatcgccggcttcactcgcgtatggggcagtattcccgtgctcggctggcctacgcacggcaatttctacgtggtgatgacattgctgatcggcgcggccgaggtgattcgccgacgttggctcaccctcatgacccatattccgctgctactgctgatgggcgtgatgattaccgcgccggccaataatttcgagcggcacatgttgccggttgcgtttgtattcggattcgtggtgctgacgtattggcgagagtctttggctgaaaggcaacgccaatcagcgacgctacactagtgactatgtcagattttctcgaacttcttgctgccgacgttgtcgattcgtccggtgcatccggtatgccgggtgcgcccgattcatccgattcggccgcacccggcatcaccgcgaccaaccgcgtacgcaccgtgctgttcgagtgcctgttcaatcatctggccgacgaacgagtggagtccctgttcaccatcctcggtttcgagcatgacttcgattgttacaccatcgccggataccctgcccggtccgccgcacgtacggccaaggaaatcgagaaaatcgtggccgatttcggcggtgtgtgtctgaccgccaagcgcccgatcggcaacagcaccgccgtagtggcgttgattcgtccggtcggtgcggccacgccggaaatcatctgcaataccatcgccccgtcgttcgccgccgatcggccaatcgccttgggtccacagcgcaccggtgccgatggcgcgatgcgttcgattcaggccacgctctactgtcttcaggccgcgccggccctggccgccaccgtgcagccattgccgcgcccgttacgcaccgacgacgccctgcccgaacgtgcgttgatcggcgacgcggacgcccgtgacgaactggtccgcgtggtctacggaagcctgacagcagcaggcccggatgatccgacgctgctcaccgtctccacattcctgaagttcggcggttcgctcgagaccacggccaaggagctcaacgtacatcccaatacgatccgctaccgtttgaagcgcgccgccgaatccaccggctgggatgccaccgacccgcgcgaggcgtacgtgctgatcaccgccatcgcgttgggtcgtgtggccgaagcgtaacggaccgcagcgtagtcgggcagaagcataaccagcagaaccgtagccggcaaaggccatagctgaccggacataaccgtccagcccgacagcctagcgggccgaatcaggctgcctgaatttcgcgtacgccatcgcgcagtaacgcggccaaggattcttgagtggctaacacttcgtccacgaatccaccggcggacaggctggcgatcacgcgaccggactcgttgtccacaatcggtacaccgacggcaccgacacccaacgtcacatcctcatccgacagtgcatatccacgttcgcgagtcaagcgaatatcctcgcgcaactgttccacactgaccagcgtgttctcgttatatgccggaaacggcactcctgcaagatagcgttcgacatcggcatcctcgaaatacgccaaggccacgcggccggccgcgccagcatgcagaggcagcacgcggcccgggcgcaggatcagcgaatcgatggcatgaccttgcgcacattccacgcataccaattcagtgccggagaccacactgaggaatgaggtcatgccggtttgcgcggtgatggcatgcatgaccgcaatcgcaggctgccattcggtacgagacgtgcgagcggcatcagccaatcgcagccagtccagtgataatgagtagttaccatccgtatccgttacggcccaccccacatcgaccagtccatccagcacgcggtatacggaggatcgcgggatatcacaggcgtcggcgatatctgccggcgacaggccattctccgccgccaatgcgtccatcacacgactcgccttgtctaaagcgcgggtcggttcacgtttgtcttccgccatcgtcgacgttccttcccctgacttatccctgactcatcatattcaactgttcaggccaagatgatcaccactgtatccaaggcctcgcgacacctcacggccggcagtccgcaccaatcgcaccatgtcttgaaccgatgccgttgccggttgcccatctaccagacaggccagctcaggttccaaggagcgggaaaggccactcagggcgattgccgcttgaatctctccggcgtgattgaataccggtacgctgatagtcacggagccggccatggtctggccgacgtcataggtgaagccgcattcgcgtatatgacgagcctgtcccattgctgtggcacgcatcgtggagaatgtgccgccgagctcgttggtataggcatagtgttccaacagctgctcgtagcgagccgggggaagccaggccgtcagtacatgagagggagcgctcatgctcagaggcaagctattgcccaccagctgtgcatagctttgcaatgtctcacgggtgcgtgtctcgatgcacaccgtgcgcaatcgcctccgaacgaacagaccccagatgccgaactggccgtgatgggcgcggaaggtacggcgagcgatctgctgaatgtccagtctgctttcgatttggccgccgatacgtacgcaatcgatgccaagccgatactcgccacgattgatgccccgttccacccaaccgactgcgacgagattatccagcaaacgatacgttgagcttacgggttcaccagtacgttcgcttatggtttttgcggtgcttggtcccagttccgccaatacatcaagtactgccttggatttcaccaatgcatctacgctacggtcatcacggcttggcgccaccatgcgcgtcacctcctgacctgtttgttgatacctcagacatcttaccgggtattcagcgggttgccgcccaaaacgcactgggccccgacgggatactcctgccggggcccaaggacgcgagatacccccccccacgcgcaagtgtcctgatatgcgggaagccccggtacctttgaggggtatcggggcttcctgtacgtgtggtgcggcggcgtgctactctcccacaccctgtcgggtgcagtaccatcgccgtgccaggccttagcttccgggttcggaatgggaccgggcgtctctcctgggccatggccgccgcaaatcttctcttgtacggtcagacgctggggtctgccggc

SEQ ID NO: 2230 - DNA, 11293 bp, Unknown
  R51_24m  MAG No. k141_38159
attgccgtcttcagtgccatatcagcctcctattcatcatcatgcatccgatcacgcattcagcaggtcgcgtgaaagccgtgtaacacgttcggacagatcggaattggcgagttccacgccgccggtcgcgtcttcgggtgccagtttgcccagggactccaacaccacgcccaggtggcgtacggttccttcgttgccgtcgatgacggcggcccgttcgggcagcagttcgcggaagtagtcgcggtaaaacacgaaatgcgtgcagcccagcaccaccgagtcgatgtgctccatgtcgtactggtcgaagtagccgtgcagcgtgcgcatcaccaggtcatggtcgccgagccgcccggattccacaatctccaccaagtcggggcaaggctccttgaaaatcgtgttgttggaatcgaatcgatccatcagcttggcgaacttccgctcacgcaaagtcaggggagtggccgccacaatcaccctctggggaatatgatgcgggtcggaaggcacgtcgccccggtcgcacgccactttcagggccggctccatgccgatgatcggaatatcgtagtgttcgcgcaaatcgttcaccgcggcggaagtggcggtgttgcatgcgatgaccacggccttgatgccttgacgcacgaaccgttcgacaatatcgaaactcagggccctcacctgctcaggcgtcttgacgccgtacggggcgttggccgaatcgccaaaatacagcacatgctcggccggcatatccttggcgatttggcgagccacggaaataccgccaagacccgaatcgaatacgccgattggagccgaagagctcatgcctgaatcctccctatagccatgcctgcaaccgtatgttgccgcgaccgatcacaaagccgattgttttgcggtgttgtttcgctccctagagtactctgaaagccatgagtcttccgcaacgagtaaccaagacacacgcaaccggcaatgatttcgtggtgtacctcgacaagtccggcaaattcgagcccaccgccgatgaggtccgattcctgtgcgaccgtcacttcggcattggcggtgacggcctgattcgcctgacacggcctgatttcgtgtctgatttaagcgatgatcagctttcggacgtactggccgggggcgcgaaatggttcatggactatcgcaatgcggatggatcgttggcggagatgtgcggcaacggtacgcgcgccatcaccttgttcgctcagcgcgagggcgtggccgactccaccgagccgttccgcctcggcacccgtgccggcgtcaagattctgacgccacgcggcaatatgaggccgtacggagccaacgtgttccaagtcgaaatgggggagtggaagatcggcgaaaccgacgcctacgaggtcaccatccccggcgctgagggctcggcgcgcggcacgttcgtggatatgggcaacccgcacgtggtcgcggtgatcgaggatgccttcgcgtccctgccagtggttgaatcactggatttggtcaccaaaccagtggtggctccggtcatcgaatccgaccagaatgtggaattcgtgcgggtcgacgacatcgatcagaacaccggcgtgggtgaagccacgatgcgcgtcaacgaacgtggctgcggcgaaaccctgtcctgcggcaccggcctatgcgccacaggcgttgtgctgcgggccaagaccggcatcagccactgggacatcaccgtacgtggcggtaccctgcgcgtggacgtcaccgacagcgacgtgaaactgaccggagcagccacgctggtcgccgatatcgatttgttgtaaaggaatcaggcagcgaacagggccgcgccttcggtgacgatgatgagtaccacgatcgccacgatccacagtatgtcgaccatgaggtcgatgttgaggcggtaatacttattgagtccggccggcaccgccgcgacatcggcctcgctgtcgccatcatcagcagccacagccttacgtgacggcaatccctgcacggccacggtcgcatggctcaacgccatgaactggatggtggtggagaacatcagggtcaggcaccacgggcacagcgcgtgaatcacgaacagtgactgcgtgctcagccagtacgagtaggccaaagcggccagtccgcccagccacgtgcaggtcgcgaaccaacgcggcaccttcacacgcgccaaaccgatcaccgcgatggtaatgaacaccgattcggcggcgatgccgaagaacgcgttcggatagctcagcccgccgaacttcacgatttccgcctgccaggactgggccaccgccgaacaggacaccaccgagttcagatcgcagccgagcgcggactccggatgccgagccaactgcaaagtctcggcggacagaatgagcgaggcccccaatgccactgccgaggcgatcagcatgatgagatatgtccaagtggcactgtggcgccatccaatcaacggtcgcgcctccgccaagccaagcggcgtggtgttcgtggtactggatgatgtgtcggttgcggtgttacgagtcatcatgtccctttcgatagcgctgcgctccagattagcctctgcggttgtcagctgagtgccgaatgtctggtcttggccgttggcagaaggtgacgacctgtctgcgctttgcgtgggaatgctgagatgaggttacgatggaaggtatgactggatatgtgatgcctttggagccgcccgccgtcgggtgggacatccattgccataccgtcttctcggatggcacggaaacgccggccacattggccgaacaatccaaggcattgggactcaagggcgtggccatttccgatcatgacaccaccgccggctggccggaggccgaagccgcatcccatagggtcggtttgccgttgctccgcggcaccgaaatcaccgccacggatgagaacgtctccgtacacatgctcggctaccagtatgatcccacgaatcagcacatcacggacttgttcgccgatactcgagccgcacggttgcaacgcacgcagcgcatggtcgaattgttgtctcgtgattatccgattacctggcaatccgtgctcgcccaagtcaaggagggtgacaaaaccaccattgggcggcctcacatcgctgatgctttggtgagtgccggcgtatatcggactcgttcggaagcgtttgcgaatgcggtcagcgcctcatccaaatactatattcccacgccctcgccgacctctcatgaagtggtggctgccgtcaaaggggcaggtggtgtgattctgatcgcccatgccggtgatgtgagccgtaaccgcagactgctgtccgatgaccagatcgaagcgttgatcagcgagggattggacgggctggaggtatggcaccgaggcaattcaccggagcaacgagaacggctgctcaccatctgccgccggcaccagctactggtcaccggcggatctgactggcatggcaaaggcaaaccgaacaaactgggggagaacctcaccgacgaggccactgtcgaagagatcgttcatcgcggcgtgctcccgttatatcggtgattcgcggcaatacaaagcggccttgagatgatgcccaaggccgcttatgcgcgattcacggtcacagcgtgccgaaaccgacggcgtgcttggtttcggagccgatgatcgcgtaaccgagtgccttggcgggcacgatgatgcgacggcccttgtcatcggtcatatcgatcgtcgcgttgtcggccacggcctgcgcgatggcctggctcacattatcggctgattcgtcggtgctgaagttcaccggtcgtgccacgttctgaatgcccagttcgatatccatataaggctccttgttctgccgtctttgtgacgaacatcatggtaagtggccgtcaccggccgaggttctgtactctattgtgccgcgtgtctgcgtcgtcatgtgtggtgttacgcgctcggcgtggcgcggaacaccgcacacgacattatttggatgatgtggatgattcggccagcggattgccctcgctgtcatacccgtccaacccggcacgggcatcgcgcagagcgcgttcttcccgctccaacagcggaatcaccgtggtttgggcactcgaggctccgtgctgaacgaaactgtccggagtatcgtcattcaccgcatcgtcggtcggggcggcggattgagatgcaggggaagcgtcggttgacgtcgtgccgctatgcccgttcatactgaggagctccttcagcgtgatcgtcaccgaagaatgggaagcgccatgtgagggctgcggtttggtcgatcccgtaccggttgcggtgccggagacactcgcttgcgggtgattggcggtccggtcagcatcgggttcgacttccggggtaagatccacgtcgccagcggccacgatgtcagcggaaccggtgcgatctggatcgggcgtgtcgtccgagacctcggccgccgcggtaccggtttcggactgctgcggttgtgcgggtacctgcgtggcgggtgcctgatgacggtcgtcctgcaacaatgtgccgacggtgattgtggagggggaaccgggctccgtcgacgcggcggcggccgaccctgcggctggggccgatgccggagtgtgcttgatcacgcccaactggtgtgcgagtcgttcgacctgtgccttgaactgcatgatgcgattgttgtccgcacggttcaacgcctgaatgaattcgcccacctgttccatctgcagccacaggttggccctgagcatgatgagatcgtcaagtcgagagcccatcatgcggccgtatgcggaaagcacggcgttgcgatgggattcgtcgagcttgccgaaaatccaggcaaggtctcgtgccggatcgttgacctgcatatcctgccagttggtcaccgtggtgatggtggaaccggagaacaggaagtcgccgtcggagaatccgccgtgaaccgtgcaggtggagaacgaccatagtccctcggtgtccatgatgcgcgcccagctgtcggtgatttcttggggaacatggccggcggagcgtaagcggcgaatccaggcggtcagctgcgaacgaatctgaccggtggtgactaccggatatttggcattggccagaaaagtcgaaggcaggcgatgaatggctccgatggcggtgccgacggccgcgcagtcatccaatgtcaacaggtcgagaggacgtgcctgaccatcacggtggacggcgatcatcacggtcgtctcgcctgtgggaccgggcttgcgcggggtcagcggtgtggactccgcctgggtctgctgccccacggcctgtgcggtggccgtctggccgggttgggaaacgtctcccgggacgaatgcgaccacacggtccatatcgaagccgaggccaccaagctcgcgcgcggctgccagtgtctgcgccgctttcacacggcggatcagacgtgtacgcccttccttgctgtcagtggcgtatacgtcgtacaacttgcccgaggcatcttggatcacggtctgatcgatgcctttggcctcgtcggttgcgctggcctgcacgttctcgcgtacgccggccacccccagattcggcaggacggctgaggcgagtgccgccaacatataatcgctacgtttcatcacccttccacactaatacatccgtggcgattcgcaccgcagaatgacacgcaaaacgcatgattctggcgatgttttgtcgtgagcccgattcagccataggcgtgagtcgtgccgtgagcgcgaatcgtgccacaatggacgcatggaacaggcgcaggggattcttgaggggctcgatgagcggcagcgtaccgccgcgactacgttgcaagggccggtgcgcatcatcgccggcgcaggtgccggtaaaacacgcacggtcacgcggcggatcgcctatgcctgcgccaccggggcatggaagccggagcgggtgcttgccgtcaccttttcggtaaaagcggcggcggaaatgcgcgcacggttgggccagctcggcgtaggggaaggtgccggacgttccggttcgggtgcgggaactgccggagtcacggccgcgaccttccactcagcggcattgcatcagctcaacagcgtctgggcggatatatgcgaggctccattcccgcatgtgatcgaagatcagcgtgacgtcgtctcccgcgcgatcatccgcgccaccgcacgtaccgatgccgatccgctgaccgttcgcgatgtgctcgccgaaatcaattgggccaaaatctcgttggtggcggtggaagattatgcccgggcctgtgccatcgcccataggcagccgcccgccggactcgacaccgctcggttcgccgacgtctacagcgcctacgagcaggaaaagacctcgcgtggcgaaatcgattttgacgatattctgctgctcgtatgccatatcatggatgattttcccgaagccgccgcccaaattcgttccaccatcggctggctcaccgtcgatgagtatcaggacgtctcgcccctgcaacacaggctgctgaccctgtggctgggcgggggagggcctgacggcaagagcgcgatgaaccgcaacgtatgcgtcgtgggcgatccggcccagaccatctactcgtttgccggtgcttccagctgggatctgctgcgtttcgccgatgaattcgggccgctcgccgccgatgtcaatctcaacaccgactatcgttcgacgccggaagtcgtgaatctcgccaaccgggtgcttgcggccgcgccgaaccgtgaggattacctgaaactggtttccgcccgcgaatccggcccgcgcgttacccgaaccgcttatgagagcgatatggaagaggcgcagggcgtggcggcacgcatcgcccggttggtcgccaacggagccaagccgtccgattgcgcgattctcacccgcatcaacgcccaacagccggtattcggtgccgctttgcgcgctgcaagactgaaataccgcgttcgtaaggattcgggatggcaatcatccgcgctcgccgacgatgccgcgtccaaacgtgcgctattggaggcgatgggtttggacgccaccggacttgccgcaaacgacgatcccggcgttacgatttccacgattcacgcatccaagggtctggaattcaagcacgtgtttctgatcggctgttcggaagggctcttgccgtacggttcgccggaaacgggggatgcgctggaagaggaacgccggcttatgtatgtgggcatcacccgagctgaggattcgctgcatctgtcgtatgcgcggaccaaggatggttatggagcgcaacacagacgcccatcacgatttttgtgacgggcgtcgttcatgcatactgaatgctcctgaacattcaggagcgggaattggctgaaggccggttgactatgcctgagtatcctccgagttgccgttgccgccatcttctccgtcttcgccgagaagcttggacagttcggcatcccaatcgatatcgccggtcttgccatctgcggcagggtgggaggcggaaccgttggcatcggaagaggagcctgaaggggcgtcggatgacggagacgcgccatctgcgggcttgtcgctaggcagcgaaggcagcagatcgggatgcgaccacttggcgtcacggccttcagggccttcggcggcggtgatcatctcccacaatccggcggcctcgcgcatgcgcttggggcgcagctgcaaaccgagcagactttcgaacgtacgctcggcggggccacccatcgcgcgctcgcggcgcatcatctcacgcaactgttcgatatgaggcagatgggccataccggcgcgccacaccacgcaatccacccagccctcgaccatcgccagcagcgattccagcgaagccagcgcctcgcgctgttcgggagtgtcggggatgccgaccttggtgagattcaccgcgccggaaatcgactccggatccatcgacgtggcgtcacgcagctgttcctccatcgcatccagatcgatggagatgccgcgtgcgtacttgccgatgagcgcctcgaaacgcggcatcagccacggtaccgaggcatacaggcgggcgtgagccatttcctgcagggccaggaaggaaagcacttcagattcgggaattttctcggtggtctcgaatccggagagcgcagcctcgaacgcggcggcgtcggcggaagcatcggagccggagacttgggcggtaccgtcagttgccggagtatcgctgttgccggccgaagtgaagccaatgggattggcggaagcgtcggtggaggcggagaacggattggtcgcgtccaccgaggtgccggccgtgtcggccttggccgcagaagcctcaccgttcagcatcctcgcgtattcggtggcgttctgggcaatcagtccaccagccggattcttcagcaatgcgatgccctgatcgaaactgccatgcacttcatggctcagattgccggccgcatgccccaactgcatggcaaaggacgtgttgcccagcagcttcatcagctgggctggatctttcatgccgtcgggaatcggaatcggcaccggtccggcgaacatgccggcaatctcgccatcgccgaacgcgccgccaagacgctccgaaatcaccgaagccaaagcgtcgttcatcgactcggccacaggagctgcgaacttcgcccactggtcgatggtgccttccacccagccggcgcgggtcagcacatccggatcgccgggcgcgggattgaactcgcaggcggtatccagccacaggttcgcctcactcatcgcgcggcgagccgcctcgccatccacggcggacacgctggacgcggaaccggaggcgttggcctgctgcaaggcaatcgacttggcgagcttgacgttgatcggcccttcctcgacagtgcgctgcatatcgcccatcgtgttgagtccgccggcgctgaacgcggccatcatctgctggacttcggatggattgggcagtcggctggggtcctgactcatcagctgttcacggatctcctcaggcaactggctgatctgctgccaggccatctcgccctgaatggggccgaagcatttgatcagccactcgtgaatcgcgttgtcgtccatgcgtatccttctttgccgcggtgtgttaccccaagtgtagggtctgcccgggcctgttcgctcgtggccgagcaatattttcggtttatgttcgttttcggctgatttcggccctccgcttacactgtagggtatgtttgcacgccacaggaatcaggaaccagacttcgtccaggagcagaagagcccgactgcggattcggaagcgggggatgggcgcatgccatcgttcgaagtgaagcatgattcgcgcctatctcgtggaatcagccgtgctcgggcctatgcggccgctcgtccgaaacgccatttcgtcggtgcattcgccgtgttgcttggtgtggtgattctgctgctgcccagcccgtacgtcatcgagatgcccggacccacccaagacgtgctgggcaaggtcgaggatggtgcggttatcgacatcaccggtaccggcgtgacgacgtataaggattccggcaagctgctgctgaccacggtgaacgcgtccggcgtgcccgggtacccgatcatcaacgcgcaggccgtctggggttgggccaatccgcaggtggaggtcatgccgcgtgaggccacggtaccggtgggccagagtgcggaccagtatcagaagaaagtcgaacaggacatggccggttcccaggattcggccagtgccgtcggtctggcgtatgccaaagcccatgcggacgaactgggcattgacgccagtacattgcaacacgccaaggtgacgatgcacgtggacagcatcggcggaccgtccgcaggcatgatgtacacgctcggtctcatcgacaaactcacccccgccaacgagagcggcggcaagaccatcgccggcaccggcaccatagacaaggacggcaaagtcggcagaatcggcggcatagagctgaagatgcttggcgccaagcgcgatggcgccacatggttcctggctcccgcatcgaattgttcggatttggccggccgcgtgccggatggtctgcgcgacgtcaaggtcgccacgctggacgaggcgtatcaggcgttggtggccattggcaaggggcaggccgacgatttgcctcattgcgaggcatgacacgcgcggccagtcgttgtttctggtgagacgactcgcatgggtctgcccacaatgcggcgattttcggccgcgttaacgcatttgttcgcgaagacttgctaatgtgtcccctgtgaatcaaacggcatcacagaacgctgaagaatttggtttcgagcccggcgatatcgttcaggagtggctctgggacgacgatgtggacgattccattcgtgcccagattgaagagctcacgggcgaggatctcgtggacgaggactacgactccgctgtggacggcgtcatcgtatggtggcgcgacggcgatgatgaggacgaattgtccgatacgatcgttgacgcctacgcggtactgggcaatgacggcccgctgtggatactgactcccaagcccggccgcccgggtgccgccagctcctccaccgtgcagtccgccgcacagaccgccggtatgaacgccgccaccccgctgaccgtcagctcggactggaacggcatccgcctgcgcgcattcggcaggggccgctgataagcctcaatcaatacgcttgactttaagcgtgttgactggcgtcgcgtgctgcgtagtgctgctgggcgtgactgaatgtcatcgcgattgagcgctacggcacgcgtatgcgacaccacgtgtcgcgcagtgccggccatacgctattgttgtcatttgcgggcaattagctcagttggttagagcgccacctttacacggtggatgtcgggggttcgagtccctcattgcccactttcatttttcatcacttcgtgcaatctcctcattccacagacatgggctgtgacgatattccctgacagtcttcggcaaggggttctgaaatctcagtgagatgcgcgcagaaggaaaccggcagtactgctacaaaatcgtgaatttcggtcttcttggtcagatgc

SEQ ID NO: 2231 - DNA, 7345 bp, Unknown
  R51_24m  MAG No. k141_38477
ccagcgccgatgcgtcgtctgaagactcggccattgccaatacgtcgcagtcgagtaagaagttcgttgccgcaggcctgtatctgccggtgtatcttgcctctcaaggcaacggcaatgcggaaggattggcaaatacgatgatgaccggcatggataatagtgccggcaatcaggctgtcggggcccttggcggatggagtgctgtcaattcatggctgagttcccatgggtacagcggcaccagcttcaaccgtgatttcggtgatgtacaggccagcaatgctggatatgagaattacagtaccgctcgtgacgcggcccgcatgctggttgccgttgatgcggtcggtggcactggtctgatgaacactgatattgcttcggagggcgtggtgattccgagcggcatgaccgtgcatgcacatcgtggcatgggcatccagaacacgtggaattacttcgccatcgtggaggtgaatggcaacaaggccgcggtctctgtggtcacgcaaaaccaaggtcaggatcgtgccgctcagctgatgagccaagtgcttgcctcggtggatagcacgttgcgcaaatagtacaagcagtatttgcacatgcaactgtgtatacggaccacgccttttggttggcggctgagtggggactattccatcgcgttcatttcccagtagaatgaggctatagtgcgtcattcgaccagagagaagagcaatgatgatctgtaagaattgtggtgctgacaatgatgggggaagccggttctgcatgcactgtggtgcgccgctaaccgacgtgagtgctcctgctcctcaggcggcggccggcccgattccagtgccgctgccggacaatactatgacggtgcttgatcacccgccgctgcccggcccaaacgatgggaacgcctatgggcagcccggcgtgccgacatcgagcggtgtggcaggagcgccgaccgcaccgggagcaagtcatactgggtcgatcgcaccgggagcagtgccgcaggccgctccgggtgctcctgtcgctccgggcgcagccacgccgccgagcggcacaacgaccgcaaccgccacattgccgaatctttcgggcaagcgtggcccgaatacgctgattatcgcgctcgtggcggtgctgctggcgttgatcgtagccggtgtggctttattcctgacgtatcgtgccgaggtgtggggtggtaagtcgctgcctgatccggcgtccatcgcctccagcgtcaccgataagaacggcaagaaggcatcggtggtcaaggccaaggatgtgaccgaggcgttgaaggccaagggcctgaacgcgaagacagttccggtgttctccggcgaggatcgcggtgtgttcctcggctacgagggcacgaatcctggcgctcgcgtcaaggccggttccacggtggtggtgcaggagtcggccggtcccggtgtgccgaagggcacggtcggcaaggatgtgaacaaggtgacgaacacgttcgcgaatatgggcgtgccaatccactacaagaaagtcgtcatctcttcagacagcaagactccggaaggccaggtcagcgtcacgtacccggctcccggtgtagggctcaccgatgacgagaaggacaacggcatttacatcggcgtggcctccaagggcgatggtatcccggtggatattcttggcgcggataagaacaaggccgtcagcgatctggaatcgcagggctacagtgtggatttggaaccgcattactcgtcagagaaatacgtgggcaagatttccggctcgtacccggctccgggatccacgttgagttccggccagtcggtgaccttgtattacggcatcgataagtccagcaacatggacgtgctgagcaaaaccaactcgtatgacaacatcaagatggccagcatccacgcgtccgcaatgatcggtatgtactgcaagagcgaggtgacggatgccgccaaggactgcatcacactggagcaatcctcgatgaatccctttggctccacttcatccgaggattatcagtacctgcaaatcaaaggccatgagcctgaagacaaggccgatgtgttgggcctgaccaacttctctcaggacatcagcggcgcgatgctggaagcggattcggaatacggcatggccgcggacaaattgccgatgaaaaaccatctgctgttgaaagactggggtatgttcgagctgtacgcgggcatgggtctgccgaactgcggctcaaaggtgatgtccgcttcgataggcgagtactgcgtgaacggcaactatgaacgggcgtcgttcgacgatggcgaaatgacgccaccggccggggctgagaacgggtcgaccggcatgacctacgacatgaaggacttcctggtctacttcccggccggttccgatgccaagtcattggatgattccggttacttcgacgccgccgaactggcgaaggccaagaagcagaaggccgtggataccagccgcccgtacgttctggttcgtgacaagagcctgtacggcgagatcagtgcgagcgccagccggggcaaggacgtggacccgtttgtgccgaccaacagcagtatcaataactatcagaacgcgctggtgccgatgaggccggctcccagcgattcgaccgtctactatctggtggagcagaacggcgatctcgactgggattccctgccggacgccgaggtcaagggcactggcgataaggccgcttccggtgagacgaccggtgacaagtccaaggacagcggcaaacgagacgccacattcaaagaggccatgaaacaggcggcaggtaactatagtttcggttccggtgtcggcgcatggggaaccgtaatgaaagtcaataaggatggcaccttctcaggctcctaccatgactcggatatgggggccacgggagacggctatctcataggaaacgacgtcgatacgctgaacggcaaggcattgctcaacgtgacgagcggagcggataagggatacacgttctacgatttctcgtagtgattcagctgccgtgcggagcggcggggaacgtgaaggaccggcgcgtatgctgtgcgaaacagcattacgtccctagactggtgaggcatgacgaacctgcgattccgcgaagacggcagcttccgcgtgctgcaaatggccgacatccaagacggccccaacgtgctccccgataccatccgccttatccgtgaagccattcgcaaagccgacccggatctggtggtgttcaccggcgaccagatccgcggttacgatcctgcctacatcgacactttcctgcgccgccgtggcgaggaaccgggcgctcgcgtgcgtgcggtcaccgaggtcgaggccaagctgcgcggaatcaagcggcgggccagagaccgcgtgaacaatcgtctgctggccatgaagtccgacggcagcgattccgacgcccaacaaaccgcgtccacgctggtctactccacaacatccgatccacaggatgtgccgacgactttggacgagctcatggacgagacccgtgacaaagtccgccgcacgtttgccggcttccttggcccggtcatcgaagcggaagtgccgttcgctgccacctacggcaatcacgatttccagtgcggcatcctggccgacgagcaggacggcatctaccgcgaattccccggctgcctgaacccagtcgacagccttgagccaggcacttttgccctgcccattgaggcttccgacggatccgggcgcgtagctatgtccgtcatgatggtgaattccggcgattacgccggcaagcccgaagagaacgacgcccaatacccggcctatgtggtcaatccgcgtggtcttgatttggctgattccgatgggtatggcacgccaagccccgaggcgatcgattggctgggagccgtacagtccgaacttggcgaacgcaacggcgacggtaagccggtgcctgccatcgccttccagcacattccgccgcaggaattctacgattgcctcaaagaggttcccgcatggacgccgaacgcggtggaaggcgcacgtacccacgccggtcattgctacgtgctcaaccatgagatctgccggccgggatcgcggctgggtgaggcgattggctgtgcagacgagaacgtcggtgaagtggacgccttgcgtgaggcaggcggctacttcgcgctgttctgtggtcacgatcacaagaacgccttcgtgggccacacgcatggcattgatttgggctacgcacccacctgcggattcgaatgctatggccccaagtcgcgctatcgaggcatccgcctgtttgaattccatgaaagcaacccggccggctacgtgacccgcatgctcacctggggtgatctggtgggccgatactccagcaacgaggtgcgcgtctggttcgaggaccactgcgtgaccggtgccatcagcatgcgtaacgaattgcgccgcccgcaggtattcgcagtgctggccggtgccatgagcctcggttttatggccgtcatccgctcgttggtgaagaagcgctaaaaacacgtgaggccggtatgaactggcctcactgagtattaagcgttggatccgcctgaaccctgcttaactgttatttatttctgggtgcggataaaaacaccagagccttcggtgttaatcagcatccaatcggatgatccatccggcgttccacgcttgacgagcatggcctgtgcttcagatggcaacgcatcgctggaggttccagatggatatccggtgaaggtgccacacgggctgaatcctgacttgtcggatttggacttgtcgtcaattttgaaagccgacgcatcacacttcagcgttaccgtgccatctgaattggatgtggcggatgcaaacttaccgctgaacttggtctggatacgtggcgcattcgctgcggaatcgccactgctcatatctgcctcgtccacagtgccggagaagttgccccgatcatccaacgaaatggtggtgaaggcgctgccatcgccagcaatcgtgtaagcgtattgggcaccggccaaatcagaaaacaccttcagtgaggccgcatccggtgtgccggatttcttactgctcttgttggaatccttggaatccttggaatccttggagtcgcccttgtccttggtgctgggcgccttcacgtccgcgtccggcagggaatcccaatcgggttcggacgcttcgaccagatagtaggcgtcggcgtcgcttggggccggcttcatcttgacgatgtcggacttactgccgttgtatccgttgtagggcaggaacggattggcgccgttcccggcaccgttgtatggagcggtggtagtgtcgtagagcttcggatcgcggtacagaatgaacggtcgattggtgtccaccgccttctgcttcttggctgcggcaagcgcgtctttgtcgaagtagcccttatcttccaacccctgcaagtcggagccggtaggcactacgaggaacagatcctgcatgtggtattcgccggatgtgggccaagaatcacccatatgcacgccattgccgtcatacattttgccgttggcccaaaagttggtcaggctgatatgcggcatgagctcgaaggcgccataatcttgtgtgactaggtagtcggctttcggactgttgcagtacgcctgctgaatggcgtcgcaggcaatcagagtaccgtcgtaatcgctggtatagtcagcattatcactgccgccttcagtcaccttgtaattgtcgatggtgatgcacttcccatcattagtgcaccactggccgtcggctgcgcgtgtggtaccgagcagcgcgtcaccgcctgtttcggccaaatcatggcctgtaaaggcttctttggtgtcgctggcatcgatgccctgatacagggtcacgtcttcgccggaagacagggacgatcccggagcggggctggcgccggaaaccttacccacgtaatccttggaagagaaacgctgttcaacggtaactgtgtggccctcagactcgagctgggatttgacggtatccacatcctgacccatcacgtcgatgggcagagcggtgtcgtcacccttggcggccacgccaatgtagatgcccttgtctttctcgtcgtccttgaccccagtgccggcggcaggataggtggccacaaccgaaccttcggggttcttcttggcgtcagagacaaacaccttcttatagtggaccggaacgcccatatcggcgaacgtctcagtcaccttattgacctgtgcgcccagagtgtctttcggcacgccggggccggcggattcctgcaccacgaccgtggagccggccttgacacgagcgcccggagcggcgttcttatagccgatgaactcacccgaatccttgcctgagaacaccttctccgttttcgcgttgagtcccttggccttcagcgcggccgtgacatccttggccttgacggccgacgccttcttgccgttcttatcggtgacgctggaggcgatggatgccgggtcaggcagcgacttgccgccccacacctcggaacgatatgtcaggaacaaagcgacacccgcgatgatcagggccgccagcaccgccaccagcatgatgatgagtttgtttgggccgggcttggtcgcggcggttgtggttgccgttgccggggccgtctgcgtggccgtggcaacggtcgcagtgggctgcgtagccgccggtgcggagacgaccgccggagccgacatgccagcagcaccctgcggcataggaatcggcggcactgccgcaccgccggggccggggactgaagcggcagccggagcgggagtcgctcccgctggcgtgggcgcaaccggcgcgtcctgcggtgtcatggaagcactcgacgctgcagtattcgcttcggtggcggtgagcggcgtgccgcatgtttcgcagaacttgctaccttccgcgttatcggtatggcaattggggcaaagcataaatggaatctcctatgaatcaacgagactgcggagccgaacaataatggtctgactggtgcggccatcggcaagcgcagtaaaaacactgccccggcaaatatgtcggcaagtgtagaaggacgggattgtttcagccgcgcgcgttgtagtcggcggacagatcgttcatcgcatgcagcagcttgtagaagtagaccagcggtcccacgatgatgaaaattcccaagacgtcccacagccagaaggtggctgcggtaacggtgggagtcatgccgcgggcc

SEQ ID NO: 2232 - DNA, 6264 bp, Unknown
  R51_24m  MAG No. k141_39284
ggaaccggactcgaaccagcagtcgagcacatcggaaatacggtgcatgtgcgacttgccggtcgggtcgtccgggttgacgcggaccaggttgtcgatccacggacggtgcatgttgatgttgccgtccttgtcgcgcggatagtcgccgaagtcggccttgagctcttcgagcgaaccgtagacgtccacacgcgggtacttcggatcgtcgctcacccacaccgggatcggggaaccccagaagcggttgcgggagatggaccagtcgcgcgcgttggcgagccacttgccgaactgaccgtccttgacattgcccgggatccagttgatctgctggttcaattccagtagacgcggcttgatcttggtcacggacacgaaccaggaggagaccggcttgtagatcagcggggtggcgcagcgccagcagtgcgggtaggagtgcacgtagctcttctcctggaagaggatcgcgcggcgctcttccggaatctcggcgagcgggccgtcgccggcgcgcaggttgcgcaggatcggcaggttggcgtcgaacacgaaatcgccctcgtagtcagggcactgcgcggtgaagcggcagccatcgtcgagcacgtcggtgctcttgatgtcgtgcgcgttcagcgtattcatatcgtcctcaccgtagggagcctggtgaaccaggccggtaccttcgacggtgtcgacgtagtcggcggtgaagatcgtgtagccgttcgggccgggcacgtggccttcggattcggcctcgtcacccgcgaagtacgggaagaccgggtagtagcgtcggcctgccagctcgttgcccttgagttcgcgcacgacctcgtaattctcgccgagttccttctcatagtgcggcagcaaatccttgccgaggtaaaacttcttgccagcgaacttgccttcggtcgggcggacctcgacgtagtcgatgtcggcgccgaccacgatggcgaagttggtgggcacggtccacggggtggtggtccagaagacggcgtaggcgtcgtcctcatcgcgcatcttgacggccacggatacggtggtgtcctggcggtcctggtacacgtcggcgtccatgcgcagctcgtgcgcactcaacggcgtgcggtccttcgggcagtacggcagcacgcggtagccctggtaggccaggcccttgtcgtagagctgcttgaaggcccacatcacggattccatgtacgggatgttcagggtcttgtagccgtgctcgaagtccacccaacgggcctgacgatgcacgtagttctgccattcgttggtgtacttcagcacagaagcgcggcaggcgtcgttgaacttgtcgatgcccatcttctcgatctggtcgaccgagtcgatgccgagctccttctgcgcctcaagctcggcgggcaggccgtgggtgtcccagccgaacacgcggttgaccttgcggcccttcatggtctggtagcgcgggatcacgtccttggcgtagccggtcagcaggtggccgtagtgcggcaggccattggcgaacggcgggccatcgaagaacacgaattcgttctggctgtggtcgccggaagggttgcgttcaacggactgctggaaggtgtcgtccttgtcccagtagtcgagaacggtctcctccatgtcggggaagctggggttcggcgcgacgtgcgcggtctcgccgccctcgctcgccttgggatatacgttttcgctcaccgtaaatctcctgttagtactgtgcactggtcctacaggagcgtcattgatggcgattgccgggcgccgacgtgtgccggctggtttcacgaatgtcacgtaccgaaccgtgggccgattagtcaatcgcctcgcagccggaaccgactgtgttccgcccggaacagccatgtctgccgttcctgcctacgaggacgatgacgagcgctggtatgcgctccgcaccgcggtaccacctcgcttatcgcaccggttgcgccgctccgaactgttgcactcggagccgcgagcctgcgcgaccgcttgtgttcggctgtctcgggccgatcccgtcggttctactgggcgattgccgccgttcttccgaagactccccgctgataacggatcactgcctcacaacggtgcatatcctaacacgccacgcggtcaaatcgccgcccacggccacggcaccgtcaggagcccgatttagattgggaccggccaccacggaccgagaaaggattgtcggacaatgacgtatgatttcacgtccatcatgaacaggcatggcatggattcgatcgcggtcgacgggctgggcaccgacccgggattcgcgccggacccgccacgcgagggtttcgacgtcatccccatgtgggtggcggacatgaacttcccgaccgtgcccacgatcccgcaggccatcatcgaacgggcgaagcatcccgcctacgggtacttctcccccaccgacgactattacagctccatcatcgactggcagtccacgcgcaacggggtcaccggattgacccgggaggcgatcggctacgagaacggggtcctgggcggtgtgatcagtgcgctgaccgcgttcgccgcccccggcgacggcgtgctgctgcacagcccgacctacatcgggttcacccggagcatcgaaaacaacggctaccgcatcgtccacagtccgctcacgctggacgagcgcggcgtatggcgcatggattacgaggatatggacaggaagctcaaggagcatcacatccacgtggccgtgttctgcagccctcacaatccttgcgggcgcgtgtgggaacgttgggaaatcgagaaggccatggaagtgtacaaggccaacgattgcgtggtcatttccgacgagatttggtccgatttgactctggggaaccaccagcacatccccacccaatcggtcagcgaggacgcacgcaacaggaccgtggcgttctacgcgcccagcaagaccttcaatctcgccggactggtgggaagctaccacatcatctacaatcccacactccgggaccgcatcgtggccaaaagctcgaaatgccactacaacgacatgaacgtgctttccatgcacgcgctgatcggcgcctaccggcccgaaggccatgagtggctcgacgaactgaaggcggtgctcaccggcaacgtcgattacgcctacgactacatcaccaagcatttccaaggagtgagtttggccaaaccggaaggcacctacatgctgctgctcgactgcgagcagtggtgcgaacgccacggcccgagcctgcccgagttggagaaacgcggctgggatgtgggcgtcgcatggcaggacggcagcatgttccaggctccctacagcatccgcgtcaatctcgcattgcccttgagccgcgtcaaggaggccatgcgccgccttgaccaatacgtattcaacgcgtaaacggcatgcatccgcgattgcggtgtcctggaaagacgaatgccgtcaacgaggttggtgcccgttggcggcattcgtcatacgttggccgaaccgggcgaaacccaagttgccgtgcgctatgaggtggatgccgccagcggacgtgtacatctgaccgcccgatatgccggtgccaccgatgcgccgacgctgccggcaatcggattggaatggacacttcccaagcagtacgagaacctgcgcttctacggccttggccccgaggaaacctatcacgaccgtctgcacggtggcaagctcggcattttcgagcgcaccgcggccgaagacaatgcaccgtatctggtgccgcaggagaccggcaaccatgaagacttgcgttgggccgaagtgcttgacgcccaaggacacggcatgcgtatcagccaggccggcagcgaacatttcgtggcgagcctgttgccgtacagctcgctcatgctggaagaggcgacccaccagaacgagttgccgccggtccgtcacacgttcctgcgcctgttggccgcgcaaatgggcgtgggcggagacgattcatggggcgcgcccgtccatgagcagtaccagctgcccgccgatcgcgcctacacgctcgacgtgaatctggaactgttctaacagcgataaagaagctccctctgacgagggagcttctttatcgcacagagggagcttctttatcgtgctggtacgaaactgtcacgcaccactagggtggtggagatgaaggtatggtggtgcagcgtgcgccgactggagatggcctcggcaagcatcgtaatcgcagtatcggccagctcattctggtcgatatcgtaactggtcaatgtcggcgaagtgtactgggcgatggcctggttattgatactgatcacactggtatcgcgaggcaccagcactcccgcagcggtaaacgcctgcagtacgccgactgcaatcgagtccgcagccacgatgaacgcatccggcatgtcatctcgatgatcgttaaccgcttcctcccctagagtgcgcccggtgtccacagtgaacgcgccttgcgcgtaaatcaggccttccgcatccagccccaaacgctcggtccaattgcggaatgcggttaatcggccgtcttccggatattcgtgcaaacccatcgtgaagccagtaccgccgatatagccgatgcgtcgtttgcccgaggacaccaacatatccaatgcgtccaaaatggtttggcttaaatccggttgtaccgaatcgaacaggctgggcgcaggattggtgtcgatgaatacgccatagggcaataccagatggagcttcaacagtctatccgaagagagtacggacggtccgatggagatgaagccgtcgaaatcaccggcgtcggcaatcagatcgtcgatatgggaaaacgacgtgagttccatgtgctgggctctggcattgtcgccgagcacggaccgtagttcatcgaaataggcgtccgccagttcttcctcgcggatggcgttgtcgagtacggccacacggcgtggcaatgcgatacggcgtgatccggtagcgtagccaagctgctcgctgacctcgatgatgcgacgtcgcgtctcctctttgacagacaatgtcgggtccccattgagcagccgggataccgtggcctgcgagaagcctgatttctgtgcgatttccttcatcgtgaccatagttgagccttccacgcctcagtacgtaacaatacgcagtatttcagtaaataactttactacatagtgtaactcacgtcatgcgggtatgacgccgtatggttgcagcatcgtcgacccgcagcgctgatgagaacgtgcatgtttcaggccctccgataattatcgggcaggcgggaatccccagaccgtggagtcaatgcgctggattttcccggacttgtcaaagacaacggtgatgtccggcgcagtaaaactgccggtcgaatccccgaatcggtacggatcactccagtcgataacggcatgcatcgtcacggtccgagttttcgcgtcataggactcattcgagtactcgatactgttatgcgtggccgtagtcccgcccagaccgccgccattgccttgatgcatttgctgacaatacttcgtaaaatccgcgccgagaacattcgacactgcatagcgcctaaatgaacgtgttaggtctgcaccaattcacggctggcaatactccacacttctcagtaatcaattcgcaccaaaccgctcacgaatccgagcagcagtaccataagaggcttgcgcaccgatcccagtcgcggcgtacgcggaaacgtatgaggccaactgcgcactgtccgccaacgcatgacccgaggcaagtccggccagaaccgtgcccataaaggcatctccgcacccggtagtgtcgatggcctcaaccgcaactggcgcaatacgatagatatcatcaccatcgatgactaccgacccatccccgccaagcgtaattaccgcctgattaaagccgaagtcatgcatctgccgcgccacatcagaccagtccagtccatcccaatcgtcatcgtcaggctcggcaatgcccaacagctgtgccatttcatgttcattgaccaacagaatgtccgaagcctcgataagttcagcgggtagttcagcaacgaatggcgaatcgttgagcaataccttgagcccggcatcatgacagaggcgagcacatgcggtgaccgtttccatcggactctccaaacacagtcc

SEQ ID NO: 2233 - DNA, 17303 bp, Unknown
  R51_24m  MAG No. k141_40067
ggcttgatcagcaccagaatcgtatcggttctgaagcctgagatattgtccacgccgccgtaatcggtggaaccgtctcgctcgtcggagccaagaatcagccaggtcgaggccggcgtgttgggggtgtcggtcagccagtcgctccggttcagtttgctgtccacccattgccaggcaccgaaaacagaaagaatcaacgccgccaccagtaccgcaatcgcgcataagatgatgcgcaaggcgcgcggccggtgtgccgttaccgttttcgccgttgccgccgccggccggccaagatggctgaacttcgtggacacgtttgctgctggcgatgagggccgggaaaccgacatatccgacggattgcgcacggcgttgcgggataagccggaagacatccgcgctcgcgacggcggaatgctgcgcggtgcggcggcatccggagccgtgctgcgggtggcacgtccggttttcggagaaaaactgggcggagtccgcctgccgttgtccgtgacgttggcgcttgccgtgacgttggcgcttgccgtggcgttggcgttcgccgtggcgttggcgttcgccgtggcgttggcgttcggttgaggctcttcgatgtcatttcccgtgacggacggacgggccgatggagcctgacctgactgacgtgaggcgcgggcaggggcgaaggagcgtggcacctgcccggaaggtcgggtgcgtcgatttcccgcaggaatgaagcttggcgggttgatatgcggatccgccccacctgattcctgcgtcataacccctcctgaaactgtcgattgtctgaatgacactttgacacagcatccgccgggtgttcctgcgctatggtgttcctgcgcaggaacggcacaatatcatgtgcaacggcatcagggcatcgtgtccgcgccatagcacacagttccataaaaatgatgtaatgacacgagaaagaatttgacaaaaacgaaattgcatgtgtgtaatttagtccgtatgaaaagctcaataggcaaggagaatcgcatgtggggtgtggtcgacgattcagccgaagagccatggcatgaattgtggggactattccgacctgatggcgatgtatcttggcagcacaaggcgttgtgcgcgcaaaccgatccggaggcgttcttcccggaaaagggaggctcgacccgtgatgccaaacgtgtgtgcgccaaatgcgaagtgcgtgaacaatgcctgaaatgggccatcgaccatgatgagcgattcggtatttggggcggcatgagcgagcgcgaacgccgtcgatataagcgagagcaccgggagcaggcgtagttccacacacacccccttcaagtctggtgcgtacactgggagtttatgagtccgacaggtaatagcgatattcatgaggcgttggccgacgccatgtcttctcgaccgtatacgcataggcaggatgtggataccggcattacggctgtgatcaccgttgaggaggatatgcgtttcctccggtctacattgcgttcggtattgacgcagaatgttcttccgggagtcgtcatcatcgccgacgcgaccgggcgcgccggttcgaggataaccacttcgttcgaggtcattccctcgccatcggggccggtaatggaggtgccgcagtccaagcatgtgaccattcacatcgtttcggccaagggcgcgcgttccttcggcgatgcggtcagccgggcgttggatcgggccgatttggatgacgctccccgcgcattgtggttgctccatgatgattcccgcccctcggatgcctcatgccttgaacgattgcttgaggcgtggcgcaatacgccgggtgccagcgtgctcgggtgcaaacagtgtgattgggaaggatcccacctgcatgatgtcggtatgtatgcaggccgacacgccgtgcattccctggtggtcgatggagaacccgatcaggagcagtatgacgggcgacaggatgtgttcgcggtgtcgctggcgggcgcgctggtgtccatgtcgcaattcacgcgactgcggggcatcaatgcctggctgaccacctacagcgaatcggtcgatttctgccgccgtgtctgcctgagcggcggacgcgtggtggtagtcccgcaagcggagatatcacatcgtcgcgcacggtatgagggcattcgtacgcgaggcggggagccgcttaaggaagatcacacggtcaatcatgcgatgacggtgcatcgctcccaacagcgctatctgtacactgacctggccatgtcgtcctggattatcgtctggctgtggaggctgattcgcagttttggcatggccatagccatgatgttcggcaagaagccgtatgaagcatgggtgcaattgtgcctgccatggttggctttggccgatatcgcgggaaacatgaaatcgcgcaggctggtggccagacagtcgaaggtcgccgcatcgtccctgcaggttttgttcgccgacagtcggcagatcaagcagttccatgatcgtcgggatgcattccaatcccagcagggcagagtgctgctcagtccgctggaacgtgcccatctgcggacacgcaccatatatcgctggagcgcagccgtggtgatggcgctggtgtgctttgcggccatcgtggtgatgtattggccggtgttccgttcgatattctccggtggatcgttgtattccgatgtgttgctttccaccggtgccagcttcactcaactggtgcagtccgccaccacgccatgggtgtttggcagcggcaccggcattcctgcgccgcccacgccgtggctgctggtgctgatgctggcctcgctggtcacgctcggccatgtgaccgccgctctggcgatgatactgtttgtggccgcgccgctgagcgcattgtcgttctgggcgctggcgggcgtattcacccgctcggacgtggttcgtgtgctgggaggactgttgtgggcatccaccggcattatgttcggctggtatgcgcaggccaatatgccgatgctcaccgtaatggtgttcctgccggccgcgttcgcattcgtgttccgtgccgtgggcatgtaccataccgaagacccgctcaagccgcgcacatccgttcaggccgcggccatcgccgcactgtgcttcatccctgtggtggccgccgaaccgcagctgctgttcgcgctgatcgtcgtgttcctgatgttcctgctgttcgtgcgccgcaagcgcgccatgctgttgcttattccggttcctgccgcctttgcggtggcccctacgctcgtcaatgcggtgcgttacgccgatttgggcatgtggcgtcaactgttcggcgacatcacagtgccaacgtcatccgccaacgggtcgccggcgtcgctgagcctgcttgaggccgcacagcgtgcgctgggatggcaaatgggatcgactgagcatgccgatttggcggtcactgtgctgttcggcgtcatcacgctgctcgctcttgcttcgctggtgctgccgttcgcgttgcggacctcgcggctgatgtgggtggtaatcgtttgcggaggcgcgctcgccctgatttccagccgtgtggccatagccgtggatgctgatggtgtcgtggccggttccgcgcagcctggcatcgcgatgatgatattgggcttccttgcctgcgtgtgtctcgtcgccggtggggcggtgaagcgattccaaccgttgcatgcgtccggcagcgatcccgcaccgaaaagggaccgtctgcatgtgctcatcgtgtctggccgtgtggtgcttgctctgatactggtgtgctgcattggcatccaatgcatgtatggcatcgaacgtcataaggatgcgggactgggcgtgtccgaaaacggcctgcccatggtcaccaccgattatctggaggccagtgccgatcatcgtgtgcttgccgtgagcgcggagacccgcaacatcgtcaactatgcggtgatgcgcacctcgcgcggcgatctgatcgacagttccccggtccagcgggcgcgcctgttgtccggcaagcatgatgcggttgacgaacaactggcccaggcctgtgcctcgctgctgtccaatcccgacgaagaggccatcgcggccatcagcgcgcttggattcggcggcatctacgtggttcccgagaccggcgattcctcgaacgacatgccgtatgaacagttgagcgcgaatatcgccgcatcgaacggcacccagtccctggtctccacggatagcggcagctactatcgtctgacgctgcgtagcagcacctcacagcaggtggatacctcatggcagcaacgtgcacagcatagtgtctggagacacgtctggctgatatgcctaggtgtgatcacggcgttgtactgcttggtcgccatgcctcgcagacgaccgtcctacggattggaggagcaggcatgagcaacaaaacttctggtttcaaacgtgcgatcggcatcgtgctcggtgtgatcaccatgctggtgttgattgcgctgttcgtcgttctcgtcatggcccccatccccaatatctgggtggacaaggtggccgcttccgataatgccatcgaccagacagttagtccgacccagtccgaaacctactgcccggcacctataggattggccgataccggcacgtacggcgacagcgccttccaggccactgtcggcaatctgagcacacaggcgcgctatgcggcgttcggctccgtctacagcgccactgtctcggcgatcgggcaaaagtccagttcagatgacgtgactttgaaagacgccgatccgaccgacgattcctcggtgaaaaccggtgctcagaagatcgatcagggagctcgcctgatcaatacccgtatgttgcaggccgcagctggcaccggcaccgtcggcaccatcgcatcatgggccgatgacggcgatgtgagaggcgtatcggcggcatcctgcgtatcgacctcgctcagccagtcgttcctgctctccggcggcacgaccggtaccacacagcagctcatcgtctcgaatccctccaccaagccgaccaccgtcgacattgccgtctggggttccgagacagccgggaaaatggcattgtccacacaatccacgctgtctgtgccggccgagggggagtcctcgatggaactgtccgccgcggtcgatgggcagcatggtctgttcgtgaccgtttccagcaaggagactcctatcgcgtccgtggtacgtacggtgaccatggatggtctgacaccgaaaggttctgatttcgcgctgccgctgccgaccgcatccaatgcgtcggtggcgacgtccatcactgccggcgatgcggtcaccgcttatctgttcgccaaggcagacaccagcaccgggctgtcatggattaccgacaaaggattggttcccgccaaagatgccaccgtcactgccgataaggtgacggcgatcgacttgggagaggctcctgatggggcgttgggcgtgatgtccaccgcagaggatgccgtgtcgttctccgtcaaggccacacgctccggtgactccggccaagccgatttcgcattggtcaatgccggcgagccatccgaattctcggggctggcccttcccgacggagtaaaggcctccatcacgctggccaacacatccaatgcgcgcaggacggtcaccttgcgcgcctacgatgatgccggtgcttcggtgacctccgaggaaatcacgctggatgcgaacgcggcgcaaacgattgagaccggcaaactttccggcgatcatggcaccgcggtcgtgctgatgttggaggactcatccaagaaagtgagctggggagcgcgtttcagtcacgattcgttgcaagacaaggacatcgccggattgtccgccatcgacgcttcaacgctgatgcccgccacggtccatgtctgggctcggaacgattcctccatcgtcaagtagagcgcgctcgccgaagcatcggtctgatgatgtttcggcgccgatatagctgcgggggccgtgccactgtcttacttgaagtggcacggcccccgcaatactgtcacaggccccaatcggggtcgatttcctcgggcctgcgcccatacaattccgctatgcgggccaccagctcatccctgacggccaactgcaattcgagcttggtaggtgcctcggtctgcaacggcatacggtagagcacgactcgtgcgggaatgccgtggctggcggggaagcactgggacgtcatattcggctcggtccgccaaggcgtcggatccgaaggcggcacatcctccaccgcgaactggagcggacgtatcagttccggccacgcttggccgagcctgcgaacctgggccgccaccatatcgtcgaacatgccggtgcgagtgcggtaacggggcagacgggtgccgaacatcggggttcgtgtgccgcgaccgtggcggttgcggtagattcgtgcgttccaaggtggctgaagcatggttcccaccataggacatggcggaggcaacatgcgttaggattggttcattggctgtgaacattcgtcaacgagggaggcgcgacaaatggtggtacgttcgtggtccgaacttgatttcgataatgtctgctccaacgccaaggtgttcggtttcgatttggacaacacgctggccagctcaaaacagccgatgaggcccgcgatgatcgaacggttctgtgcgctgctcgaccatacagtggtggccctgatctcagggggcggcatggcggtggtcacctcacaggtgctggatgtactcaccccgaatgccaggcgcggcaatctgcatgtcatgcctgcctccggctcccggtattaccggtgggatggcacgcaatgggctttggtgtatgcgcatgatctgtccgaagccaccgtggccgctgtctcggaaagtcttgagcgacatgcccgggaactgggattgtgggaacagcaggtatgggggcctcgaatcgagaacaggggcagccagatcaccttctccgctctgggacagttcgcacccgtagcggccaaacaggcatgggatcgcgataacacgaagaaacaggcgctggtcgaagcggtcaaggccgatctgccgcacatgcgggtcagggccggcggctacaccagtgtggatgtcagcgaatgcggcatcgataaggcttatgccgtgcgcaagctgacgcagacacttggcatacgggccgatgaaatggtgttcgtgggcgatcgcatgacgcctacgggtaatgactatcctgcggttgaggccggtgcgatcggtgttcgtgtggagaatccgcaagacacggtacaactgctggatgcactgcttgcgcgattcgatactccagcttgatggtgacgcgttatggacgggccgagcgtatacaagtggtggcatgcgatgtgggcgcaggcctgcaatctgctgtttccacgcggctgcgctgggtgtgacgcgccggatgaggtattgtgtgcggcatgctgggccctgttcgcgcaatgccgggagcgggatacagacggtggtggcggagcccgtatatggtccgcgtcaatctatcagggagcggcgcgtcgtgccattctcgactggaaggaccacgacgataccgagcttgacggcccgttcggccgcatcatggtgtcgctgctgaacaagacgccaataccatcatcatgcttgggtcatcgcgtattggtggttccagtgccgtcatcgcgggcatcaatgcgccgaagagggcgtgcccatacggcaccgttggccaaatcggtggcaggggcattgcgtgggtacggcgtcgatgcgcgaccatgcaatgccctgagctcctccaccaaggcacgctccgtgcagcagacctcttcggcacagcgtgcccgccgtatcaccggtcatgtcagggtgaagcgtgatctcataggccatggcgacgcggtgcttctcattgatgacatcgtcaccacaggtgccaccgtgcggcaatgcgttcagacatttcagcaggccggtactaaagtggtgggcgtgctggtattggcggatgccgtggcgcgacggtccgatgacgatatcaacgggtgaatgacatcggtgacgatgccccagatagcaggcgaagcgccgttgctcggcatgtaatcgggatatcgaggattctcggcgtgcaatatggtgatgccggcccgtgaaaccagccgcttgatggcgatttcgtcatccatgacagccgcaaccacatctccggggactggtgccaacgaacgatcgacaatcagcagatcgccgttatgaatacccgcattgatcatggaatcgccggccatctgcatgacaaacagcgtggtgtcgcgcggcatggttcgtgactcggattgctgtgtcatgcggtgcctcccaccctgtattcgaacatctgttcgaatacagtatacggtaggacggcggacaatatcagcgttcggcgacgtgatatttaggcaggatgatttcgaaatcggcgcctcgcgtgtcatcgaccactttgacggtgccgccgtgcaattgggccgcccaacgtgcgatggacaggccaaggccggtgccgcccgactcggtgccgggacccgtcttgcctttgacaaagcgccggaagatatccgaacggtcggacggtgcaatctgggagccgaaattcaccacattggtcacgatggtgccttggctgtcatcctcatgggcatcgaccagcacggtggtgccgtcggccgaatgcttcagcgcgttggcgatgatgttggtgaacagctggcgcaggcggtcctgatcgccttccatcgagatgtcggccggcacggtgacatggatgtcgtgggcgtggccgccatcggcgatttccaacggctcgatggtctcgtcaagaaagtcggcgaagttgaacttctcgatattcagactcgccgcaccggcctccatacggctcaaatctaacaggaaggcgatgaggtcggagagacgctgcgtttgggtgaggatgctctccagattggcgggagtgggctcggtgacgccgtcggccatgttctcgaccatcgcctgcaaagcggaaacgggcgtacgtagctcatggctcacattggcgatcatatcgcggcgcattttatcggcatgttcgagttcgccggccatctcgttgaacgagcgagccagctggccgacctcgtcatgacgatcctgatcgatatccacgcggaccgtgtaatcgccatccgccatggcttcggccacatcgcgcatctggcgtaagggagcggtgatgccgcgggagaagaaataggtgatgcccaaggccaccaccaaagtcagcggcatggcgatccaaccggaccagccgaatttcaggaggaaccagcacatggcaaacgcgatggcagtggcgataacgatcagtacgctgagttccagcttcagagaggagaacaaatcaaccggcttgacgcgaggtttcatcgcatcaagccgggattgctgttgttttttggatgccatcacgcggtcggcggctcgaaagcgtagcctacgccgtgcacggtgcggatggtatcggcgccgagcttatggcgcagcgccttgacgtggctgtcgacggtgcgggtgccggatgcgtcgacccagtcccagacctcttcgagcagcttttcgcgggtgagcaccgacttcgggcggcgggccagtgtggccagcagatcgaactcggtgggggtcagatgcacctgctcgccgttcacggtgacgatgcgctgggccgggtctatgaccatcgaaccgaagtcgagcagcttctcgttctccgaattcttggcgatgaccttcgcacgctccacgcggcgtagcagcgccttgcagcgggcgatgagctcgcgcatggagaacggtttggtcatgtaatcatcggcgcccgctcccagaccgatgaccttgtcggcctcgtcatcacgtgcggtgaggatcagcaccggcaccggacgttcggcgacgatgcgtttggtggcctcaagaccatccatgaccggcagcatgatgtccatgattaccagatcggggcgtagctgggacgcggcctggacggcggaagcgccgtccccggccacgcgagcagtccatccttcagcggtgatgcgctgggcaatggccgtggcgagtgtgggctcgtcctcgaccaccagcaccatgcgcggtgtcgtattctgacgcgctgtggtattgagcataaataaaccggttacctttcagcctgttgaccagttcagtcttccggcttcaagaatacaactcccagagccggaacggtgatcttcgccgagaacggacgcgaatgatattcgccctcgaccgcttcgaaggtgccgttgtggatgtcggagccgccgtacttggcgtcatcggtggtgaacacttcggtccacttgccgccggtgggcagcgccacctggtaatcggaccaggcttcaccggagaagttgaccaccacggccaaggtctcgcccttggtgccgatgcgcaggaagctcagcgtgttgtggtcggcatcgtcgctggtcagccactggaagccggccggatcgaagtcctggctccatagtgccggatgcgccttgtagaaggcgttgaggtcggcgaccatggtctggacctgacggtgctcctgccagttcaggcaatcccaatcgatggaggcgtcgtgatcccactcgccccactgggccagctcgttgcccatgaaggagagcttcttgcccgggtgagcccactgataggcgaacatcgaacgcacgccggctagcttctgccagccatcgcccggcatcttgccgtacagggagcccttgccgtacacgacttcgtcgtggctgatgggcaatacgtagtgttcggagtaggcgtacaccatggagaaggtgatttcgttgtggtgccacttgcgattgatgggctcctcgtgcagatactcgagggtgtcgtgcatccatcccatgttccacttcataccgaagccgatgccgccggcggaggtgggggcggtgatgcccggccatgcggtggactcctcggcgatcatcatgacgccggggttgttcttgtacgcggtggcggtggcttccttgaggaagtcgatggcctccaggttttcgcgtccgccgtagatgttcggacgccaatggccgggttcgcggctgtagtcgaggtagagcatggagctgacggcatccacgcgcagcgcatcgacatgcaggtcctcgagccagaacagggcgttggccaccaggaagttgcgtacttcgcggcgtccgaagttgaacacataggtgccccattcggggtgttcgccgcgcagcgggtccgggtcctcgtacagcggggtgccgtcgaagcggccgagtgcgaaggcatccttcgggaagtgggcgggcacccagtccatgatcacgccgatgccggcctgatggaactgatcgaccaggtaacggaagtcgtcgggggagccgaggcgggaatccaccgcatagtagccggtgacctgatagccccaggagccggagaacgggtgctgtgccagtggcatgaactccacgtgggtgaagccttcctgcttgacatagtccacgagctgcttggccaggtcgcggtaggtcagtccctgcttccagctgccggcgtgcacctcatagatggagaccgggccatcatgcgggttggtggtgcggcggtgctgcatccaggcgtcatcgttccactcgtaggtggattcggtgacgatggaggcggtgtgcggcggaacctcgtgctgacgctccatcgggtcagccttcatctcccacgtgtaattggcgttcaggatctggaacttgtaggtctcgcccgcgccgatgccggggatgaagatctcccacacgccggaggagccgagctcgcgcatggcatgacgacggccatcccaggcgttgaagttaccgaccacgcgcacggcatgggcgttcggggcccacacggagaacgcggtgcctaccacctgttcgccaggcgtgccgtccacgccgcccatcggatcgtcatagcgcagcacgtgcgcgccaagcgcctcccagagcttctcgtgacggccctcgccgaacagataggtgtccatgtcgccgactgtgggcatataacggtatgggtcgtcctcaatgagcactgcgccgctttcccactcggtcctgacgcggtagtcgggaatcgtgggctgcttcttggtgccggaggccggcacggtagccacgaacacgccgttgtattcgtgggtcatcgggtattcgccatcctgggtgaggatggtcacggacttggcaagcggacgcagcacacggattgtggcggtgtcggcatgcttgccgatgccgagatgcccgccgagaactccgtgggggttgtagaattcagcattgctcaccgcatcgaggtcgccttgggcgacaggcacggtgacggtatcttccttgatcttcgtttctttagccatgacccaaagtctacgtgcgttggagtcgaaaacgctacattggcgcgtcgaaaatggcgaattcttgcccttttcggtgtgtctccgtggttgtgagcgctctcataggggcggtccagaccgcatggcataattattcgagtttttgtgtgtaagccgtcagttctcggagggtacatgtcttacaaagtcggcgatatggtcgtctatccgcgtcatggtgcagcgaaggtggaggccattaccgagcggacggtcaagggagtgacgcgcgaatatctgcagctgtccgtactctcttccgatggtttggtcatcaacgttcccgtggacaatgccaggaaggtcggcgtgcgtgacatcgtctccgcatccgaagtggccaaggtgttcggcatcctgcggaccccgatcatcgagaaagagatgaactggtctcgccgttacaagctgaacgtcgaaaagatcgccaccggtgacgtcaacaagatcgccgaagtggttcgcgatctcgcccagcgcgatgtcgacgagcacggcctgtccgcaggcgagaagcgtatgctcaccaaggcccgcgccattctgacttctgagatcgccttgtccgagaagatcgacgaggcggaagcccagcgtctgctcgacgtgaacctgggctacgagcccgctcaacccggtgacgacaagcatcacaccgccgagcccgaagaggccgcggccgatactttggctcgtgtcgaagccgagaagaagtccaagaagaagtgatttgattgttgaggccccggtcgtgtccttatgcgatacgccggggcttcgtgattcataatcgtttgctgccgttcgtctgggtagcgccatcgaaggggactgcatggggtctgcaggagtgttgatagggcagggttttgacgctcaccgttttgcgcctgccggttcaggccgtgaactgtggattgccgggctctactggccggtgcctgattcatgcagcgaggccgatgccgccaaatacgagggtatcgaaggcgattccgatggcgatgtggccgcgcacgccctgattgacgcgttgcttgccgccgcccgattgggagacattggttcactgttcggtgtcggtgcggacgcgcatggtgccggaaggcatggcatcgatatgctgcaagaagttgtggcgcatctggcatccaacgggtatacgccggcatcggcctcggtggtgatcatcggcaaccgcccgaaaatcggcacacgccgtgctgaagccgaagccgccctgtctgcggcggttggttgcccggtatcggttaccgccaccaccaccgaccatatgggattcactggccgcggcgaaggcatcgccgccatcgccaatgccttggtggagaagatataacaaagcccccgctgtgaatttgccagcgggggcaagaaaaatgaatgagattacttccgcactgtctccacggccttggcgatagcccagaacagggtggaaagcgtcacgataatgaagctcgggggggcggggaacatcgccgacagcacgagtccggcccaaatcgacaccaggcacagcacgctggcgatcaccatcgccttgaatggggagccggccagaatattggcggtggccgcaggcgtgatcaccagcgcgaaaatcagcaaggtgcccactgccggcacggcaatggtgattacaccggccataatcgccataaacgccacgttcatcagcccgatcggcacacccttggcctgtgccacctgctcatccaacgagctgaacagcagcgggcggtagatgatggccaacaatgccagcagcaatacgtcgaacacggcgaagccgatgatctggccggtggtgatggtcaggatcgagccgaagaggatcgactgcatctgctgggaggcggaactcgacaatcgcgcgaagaacagacccaagccggtggcgaaggccagtacggtgccggttgcgatttcacgctcggaaacgcgcttgcccaaagcaccgatcaccagtgcgccgcccagtgcgaacacgcccatgcccagtgatacgggcaggccgagcaacaccgcgccggtcgcgcccggcagaccgatatgggccagcgcatgggccgcgaaggtggaacgacgggcgatggtgaagtatcccatgacaccggcggccagggcaatgcacaggccggcgatgaaggcgttggtcatgaatggagcggacagtgtgtccagccattcgggatcatacgaaaagttgatggtgctcatgtccctgtattttctccatgcctgagctgcagcccgttgacgggctgtggatcggctagcttgatgttatcgattctcggcgctgttggcggcactgccattggtggcgttgccgtgctcgtgatggtgcaattgcgccacttcggctgccgtgtgcatatcctgcggctggtcctggggctcatccggcgtcggggtcacgaacatgtcaccctgcggagtggtgaccacctgcacctgtgtgccgtagaggtgggtgagtaggtcggagtcgagcactttgtgcatatcggcgtagtgcgggtgcccgtcgagcaagtagacggcaccggtcagaatcggcaagagcatattgagatcgtgcgcaaccacttggatggtcatgttcagttcacggttcagcttggccagcacgtgtacggtggcgcgttgactggccagatcgaggttggccaacggctcgtcaagcatcagcagttgtggatcgcacaccaacgcctgggcgatggccacacgctggcgcaaaccgccggatagttcggacagacggtactgcgccttgtcggcgatgccggtgaactccatcgcctcgagcgctttggctttctggaccttggtgatggggtggatgccgaatcgggtgccggtcaggcccagcaacacggattgttcggcggtgagattggaatcgacattcgccacatagctctgcggcacatatccgatgcgtttgttcatctcgcccgcaggcttgcccagtacggtcaggctgccatggcaaagcggcaaaagtcccagctcggccctcatcatcgtggttttgccggtgccgttggtgccgacgatggccgtgaccgaaccggtgggaatggcaaaggtgccatgttgccagatgatatggtcaccacgcttgatggcggcatcgctgaacacgatgcaatcggaagtttcactcataacgcccgattgtggcaaacgatgctgacaatcgttctcaatatcgtgtacggatggtgacaaccaaagaaaagggttgtgcggccatctcgacaatggtcgcacaacccttctcgtgcaaggcgtctatcggcattgcatgaatccgatgccgctgtcctttgcttctaactatttgccggagtcggtctggtcgttgccggaggcatcgccggaatcgccattggaggcatcggcctttgccgaatcctgagacgaatcactggatgtggccgccttgcactgacggatgtacttgggctccgtgctggaaccggtgctggccttggaatcgtgcgcattggcatcatccgtggcggcgccgtcggcgctggaatcatcggaattcgcgttgccgtccgtggcgtcttcgcagccatagctcggatccaccgcgtcgatgatggtgttgatgagctggttgatccaggcgttcagcgtgtcggtatccttgggcatttgttcggagacgtcgactaccggcacatcggcacgaccggcagcgccagtgatcatattggtcgcgtcactggcttcctgcgtgttgttgaccagcacatccacgcccttgtcttcgatgagtttccggaaagactgcaggtccgcgggggccggttcgccgccggaagcggtcgattgcgtataccccttgggcgtctgattcttgaacccgagatcggccatcagataatagaccacgggttcggtggctgcataggtgaggtcggagtgggatctggtgaactcggacgcccatgtttccagcgatttctcatccgcctgccatgccttgagccgcttctggaaggccttcttcttgctggggagtgcctttacatatgcatcggtgatggccgtggccatgctggatcgagcgtctttggagaaccacagatgcgggttatcgccttccatggcacccatgacggaagcggcggatacgatattcgtggtcttggtcatcgatttggtggcccaggaatcgtaacccgcgccgttggccacgatgatctgggccttggacagcttggcgacgtccgaggtctttggctcgaaatcgtgggcatccacattggtggagttcacgatggacgtgacttccacgtcatcgccgcccagctcggcggccagcgagccccattgattgagggaggcgaccacattgatcggcccggtcggtgcgggaacactggtcttgttgtccggctcggtttcagtgggggaggtggctgcgcatgcggcggtcgcgaacaacaggacggcgctcaggccggctgcggcgagtcgcgtaagtcgtgtgatttgagtccccatggcacgccttcttcgtgagagcgaacgatatataatcctgacttgttccaacgatagcctatcgtttcgatagaa

SEQ ID NO: 2234 - DNA, 12773 bp, Unknown
  R51_24m  MAG No. k141_40407
acgtcgtgtccggtgccggccacggccagtgccgcggacagtccggcgacgcctgcgcccacgacgacgatttcagtgttgctcattgtgttgctttcctctgtttttgcgtcatctgctccccctcagtcacctacggtgacagctcccctcagggaggggagctagaagcatgtcacgggtgaacgcgcagcatgcgctccagtgccaccttggcttcgcgggcggtgtcttcgtccacggtgatgcgattgaccacgttgccggcttcgaggttctccaaagcccaagccaggtaagccgggtggatgcggtacatcgtggagcacgggcagaccaccgggtccaggcagaacacggtcttgtccgggtactgcgcggccagacggttcaccaggttgatttcggtgcccacggcgatggcggatccagcgggtgcgttggcgatctccttgacgatgtacgcggtggagccagtgccgtcggcggcgtcgaccacctgcatcgagcactcggggtgcacgatcaccttgacgcccgggtatgccttgcgggcgcgttcgacctgttcgacggtgaagcgctggtgcacggagcagaagcccttccacagaatcatcttggcgcgggcgtagtcggccggatcggcggcgccgccctgtgccttgaacggatcccacagcggcatctcgttcagcggaatgcccatcgcgcgggcggtattgcggcccagatgctggtccgggaagaacagcacgcgcttgccgcgggcgaacgcccattccagcacggcgtgcgcattggacgaggtgcatacgatgccgccgttgcgtccgcagaacgccttcagcgcggcggatgagttcatgtaggtgaccgggatgatctgctgcaagccatcggcgtccggctgggtgccgcagatctcgccgagctggtcccagcattcctggacctggtcgatgttggccatgtcggccatcgagcatcctgcggacaggttgggcagggtcacgctctgttcgggggtggagaggatgtcggcggtttcggccatgaagtgcacgccgcagaacacgatgtgatcggcgtccgggcgctcggtggcgttcttggccagctggaaggagtcgcccacgaaatcggcgtgcttgatgatctcgtcacgctggtagaagtggcccagaatcaacagtttggagccaagacgctgcttggcgtcggagatgcgctgctgcagttcctcgtcggaggccttgcggtattcgtctggcagcacctgctggcgcggcgcgttggctggcagacggtcgagcatcgaggcaccgggaccgtagctgggtgtggtggtgtcgaagtgccatgggtcctgggtcagtcctgcatcgcaggtgctttgcgcgcccagcttggcgatgatctcgtcaacggacggcgcagtggatagtgcggtcatagtggttcctttccctatatacgtctgtgatgccggcccgaagcgggtcggcgggaaaaatcagatgcgcgcggatgggatcagcgcgtcgagagcgtcttcacgctcgccttgtctggacagttccacgatgtcgtcgccatcggattcgtggggcatgccattctcgacaagtcgtttggggatgtagcggtagacggtggccggtcgttggcggccttcgcgcaccttctccccggtgtcttcaagatcgcccgaggcaagcattttgcggcggaagttcgccaagtcgagggtttcgccgccaatcgcctcatagacgccgtgcagttggcgcagggtgaacgtggggccgagcagtcgggtggccacgtcggagtattcgattttggagcgcaggcggagcagcgcgtagtcgatgatctggcgatggtcgaacgccagctcgggcagttcgtcttcggggaaccatcgtacgttgtcaccgtcctcgaaacccgcggcctcggtctggccgacgagcgcccaatacacgacggataccatgggcaatccgccatgagaccgggtcgggcctccaaaggtgtacagctgttcgaggtatcgcgggtgcaggtctgtggtcgattcgagggccgcgtaggcggactgttccaacgaccgatcggagcgcaggtcgccgccgggcaacgcccagcagcccaggaacggctgacggacgcgcttgaccaggggcagccagagacgggaatgggccgagttcgcggcgttgccggaatcggcggcactgttgccggtatcgcctttcgggccgagtgccagaatcaccactgacacgccgacctgtggcggtgcgctgcggcgctcggacacattgccgaatcccatgccatgcctctttccataccggttgttctccctgcattgagagcatagcactacttatagtcacaatgaccataaatcacatattggatggtctagcgcacgaatattggtcaggtagcgggccccaatcgctacgaaatcacgtccgtgtcttccgatttcgactgtgtcatttcggcgacggacgggaggaacggcgctagggagggtagttcgtcgagactcttcaggcccatttggtcgaggaaggattcggaggtgaccaaaagggctgcgcgggattcggggtccacgccgtcttccttgataaggccgcgtaccgtgagcgagcgaatcacgccatcggagttgacaccgcggatcgcggccacttgggctcgggtgacgggctggcgataggccacgatggcaagcgcctccagtgcggcctgactgagtctcgcagtctggccgtcggtgacgaatgatgagacgaccggctcgaacgcggcgcgactggcgaactgccagccacgagcggtgcggcgtagttcgaagccgcgcgggcggatgccacgggattcatcgccctcatagtcatcgtgcagggcttgcaatgcctcttcgactgtgttgcggtccaatgccaaaatgcgggccagctcggtggcggtctgcggctggtcggcgaccatcagaatcgcttccagacatgcgggcagcccgccgggaaaatcgtctaccgtgaaatccacgtattcggggcgcgtctcctccactcccctcacctcggcctttgcggattcagccgtcgattcggcatccgccatgtgctcggttgcattcgttgcgtcaatccgttcagtcaccagtcgccgtccttacgcaaaatcgccttcggaaatgttcacgtcgttcatcgtttcgtctacgccggatacccacctcaggtgcagttcggcaaacggaccatcttgctgatactgcagcacaccttgtttgaagaacacgagcacggccatgaaccgagccaccacctcaatacgagaagtgcagtcccgggtcaattcgctgaacgacatcgactggtcgcccttggattccagtgctgcaatcagccggtcgcgcaccaccagcgattgggcccgcagatcgaccagcggcacgtgcagctggtggatcgatacttcggaggcgggcgcgttggcgatgacctgggcggccagttgggcgagttcgagcggggtcagcgtccataccagctcaggcaacatggcggcaatgccctcgtccatggccgccggatgcgggaatcggccggcattggcggcgatacgcgcccggaagtcacctgcggcctgcttgtaggcgcggtattggaggagtcgggcgaacagcaaatcgcgttcgcgcagcgcctcgagactttgctcgtcgtactggttgtcttcgccgccgggcagaatcgccacgcttttggcctcgaccaaaatagaggcgatgtcgagaaaggcgctggcctcatccatgtttttcgtgaagtcgagcccgcgcacgtatgtcaggaattcctcggtgatcgaggagagggaaacttcggtcagctcgagtttgttgttggcgatcatgccgagcaaggcatcgaacggaccggaatagacctcgaggttgacccggaagccggaagtggcggattcctccgtgctgatttcggcttccgcggagctcccctcagtctcgctacgcgagccagcttccctcagagaggggagccgagaaagggaagtctcattcatcgtttatcgaaacaatcgttacgccacgatgccgcgagcaatgagctcacgtgccacctcacggtattcctttgatgtcttgtgctcaggggcataaaccaccacgggcgcggcggcaaccgtggaatcgggcagtttgatggagcgggagatgaacgtgtggaacaccttttcgctgaacgcctcgtaaatgcgctggcagacctcttcgcagtgcagtgtcttggtgtacatggtgatgagcacgccatccacttccaatgcgggattgatgcgggactgcactttttcgatggactgcataagtagggccacgccacgcaaggcgaagaattcggcggccacgggaatgatcacgccatcagctgcggcaagcgcgttcacggtgagcaggccgagcgatggctggcagtcgacgatgatgagatcgtattccgacttgagcttgcgcagcacactgttcaggatctgctcccggcccacttctgtgaccagttggacctcggcggcggacaaatcgatgttcgctggaatcacatcgatgttctcgaatgcggtgtgctgcaccacatcatgtgggtccacggaaatatcgaacagcgcggtgtaaatcgtgttctccacggtattcgcgttgacgcccagtcccacagtggcggcgccctgcggatcgaaatcgacgataagcacgcggcggccatactgggccaacgcaccggcgatattgatggagctggtggtcttacctacgccgcccttctggttgcacatggcaatgacacgcgccggaccgtgctgttgcagcggttcgggtgcggggaaggtttcgtattcacgtccaagcaaatcggtaggcatactgtctaccttatcaacatccgggttcgctgggggtgcaacgacatacgttcccgccataggcagcgttccttgacggaatgcgctgtctttatcgcgggtgtctcgccagtcgtccatcgttgccctcgccccctttgccggcaatacctgctcgcctatcctaatgtactcgccgggctcgcctcggaacaccgttttgcagcgggcattccagtgttccgaggtttatggatctcgtctcgtactatgtcgatgcgcttactcggtgcgcagtgcggtggccgggtcttgcttggctgccttgcgcgagggaatcaggccgccgatcagcgtgagcaccacgcttaggatcaccagcaccacgccgccggtcaccggcagggcggcattgacgtccgcattgccgatgaagtgatgcaacacggcgttgatcggaatatcgagcagcacggtcaagcccacgcccaacaggccggagcataggccgatgatgccggtctccgcattgaacacctgggacacgttgtgcttcgaggcacccattgcgcgtaggatgccgatttccttggtgcgctccagcaccgaaatgtaggtgatgatgccgatcatgatcgaggaaacaatcaacgagacggacacgaacgcgataagcacgtaggaaatcacgttgacgatggtggtcaccgagctcatcatgagccccacataatccgtgtaggtgatcttgtctttcttcgagacggtgttgttgtagtcggtaatcgcgtcggcgatgtggtccttgtcttcgaagctgtcggcgtagacgttgatcgagctgggcgcgtcacgactcaccacaccgaatgcggcgaggttgtcgtcgtaggtgccggtcgacacgtactggtcgtagatcgcgacaagcacgtcgttcgaagccgtggcgatatacgagtcgaaactgtcggcgagctgctgttcgctcatcgcggccatcgcgtcggcctgatcgccggcacccgccgcgccagcaccagcaccagcaccagcaccagcggcatccgatgcgcccgtaccggaccgctgcccggcactcatcatcgacttggccatgttcgccttctgcgtcacgcccagcgaaaccacgtaggtgcgcgcgtcggccgccttggtggcgtcgtccgagggcgagaacgtcatgccgttgagcacgttcgtgttcgggttggccttctgatcggtgacgatggcgctggaggccgcacggtcgatcagatcattggtcagagcgcgcgtgtatcccacgccagcggccaacggtgtggccgaagcatccttcttcgccttgacgacgcccaccaccttgagtttggtggccgtttcgaggcgctgttcgattacatccttgtcgttgccgatgaatcggtagtggccgtcatcgcccttgacgtactggtcggatgccggaatcatgtacagcgtctggtcgagcgccttagcatagtcgatcttgtcttgtggagtgctgaccttgtcgccggcgttgagcttggacatcatctcgtggtagtcggaggcgggcagcaggccgagctcgtacagcgtggtcagcggcacgctgttgttgtcgtcgagcaccagcaccacctcgtccttggacttcggccatgaaccgttgaccacttggtagttgtcggtgatgaccttgcctacgagcttgctgtcgtccgctccaggcatgatctcattgaacgagtcgggcgcggcgttctcatcggttttgccggtcagcatcgacatctgctgcgaggtgatcgacgaggtgccggacatgccggacgagcttgtggacgccatctgcgaggccattgaagtggagtcgctggcaccgatcgtcacgccgtccgcattgaccagcgtgccatcggggtcgtggtcgaacacggagaatttcacgtcatacgtgtactggataccggcggaacccacatactggtgaatctcgctcttggaattatccaggtatttcttgaagcgggtcaggttgttttcggtaatcgaactggtcaggctggatgcctgcttgacgctgcggtcgtccgggtagatgccgtcggttctgtgcgtcttgccgccgtatccgtcatcgccgcccatctggccgcccatcatgctgctcaggtcgaaggtctgggagtcgatggtgatcgggtaggcggtcatcgtgtcacgctggatgtcgctgatgtatgcgttcacgccagtcgacaccgatagaatcagcgcaatgccgatgatgccgattgagccggcgaacgaggtcagcagggtacgcgccttcttggttttcagattgttgaagctcaacgccagcgacgtgacgaacgacatcgacgcgcggcccatcgtcttgtgcacggccggctgttcggccgtctcatccacgacaaacgggtcggagtcggagcggatcacgccgtcgcgcaggttgacgatgcgcgtggcatattgttccgcaagttcggggttgtgggtgaccatgaccacgaggcggtccttggccacgtccttgagcaggttcatgatctgcacggacgtgtccgaatcgagcgcgccggtcggctcgtcggccaggacgatgtccgggtcgttgaccagtgcgcgggcgatcgccacgcgctgcatctggccgccggacagctggttcggctttttattgatgtgttcgtcgagtccgaccttctccagcgccttgcgcgcacgttcgcgacggtcggccttgccgatgccggaaatcgtcagcgcgagttcgacgttcgacagaatcgtctgatgaggaatcagattgtagctctggaacacgaagccgatggtgtggttgcggtacgaatcccaatcgcgatccttgtattggcgcgtcgagatgccgttgatcaccaaatcgccgtcgtcataccggtcgaggccgccgatgatgttgagcaaggtggtcttgccggaacccgagggacccagaatcgcgacgaattcgctgtcgcgtaggttcaggctgactttgtcaagcgcctgttgaacgaaatcaccggttttatagcgcttcgagatcgatttgatctgcagcatgaatacctcttcctggctgacggttcgctgttatgtactgtattgtcgcgccttgaatttccggccgactttggtgctccccccgccgcgattccgctatgggcggacgcgtcgcaaaatggtgtgtctcaccgcgctctggggtgtgaggtcagatacgtttcgatcagggtttcggggcttacgtgcgtgtagatctgcgtggtggtcacgctggcgtgcccaagcagttcctgcacggtgcgcacgtccgcgccgccttggatcaggtgcgtggcgaaggaatggcgcaaggtgtgcggatggagtggtttggtgatgccggcccgctccccggttgctttgacgatttcccataccgattgccgcgagatgcgcttgccgcgtttgttgagaaacagtgcgcgtctctcgggaatcttggcgctggagcgccgttccagctcgccacgccccgcattgaggtatgcggtgatggcccggcatgcgtagctgcccaatggcacaagccgctgcttggagcccttgcccatgagtcgcgcgatgtgctcgtccaggtcgatgtcgtccagattcacaccggtggcttccgagacgcggcagccggtggcgtacatgaattcgagcagggccttgtcccgcaataccaccggatcggttgagccgccggctgccgccgcgtcgagcagacgggttacctcgtccacggtgagtacgtcaggcagggtgctggcacctttgggtgccttgactgcggcagaaacgtcggcagtcaccgcgtgctgaccgagcgcgaagcgatggaattcgtggatcgaggccagtcttcgggctttggagcgggcggactcccccgcctggtcaagtgcggcgatgtagtcttcgacgtcttgtttggttatggcgtccggttcgtggatgccgcgggtttcgagccaatcaatgtatttggcgatgtcggattcgtaggcggtgacggtggccgtggcgagtcctcgctccacaccgatgtggacgaggaactgctcggtgagtctggtgaatccgttggtcatgagtttgttctctcccccacccgctgcgcgggagccccctcgtcagagggggctaataataggaaaccccgctcggaagcggggtttctagtgtgaagtcacgacttcaagcaatcaggcctcaaccggagcgttgacgtcctcaggcagggcggccttggcggcgtccacgatggtcttgaaggtgttcgggtcggagacggcgatctcagccagagcgcgacgatccagctcgatgccggcgagacgcaggccctggatgaagcggttgtaggtgatgccctcagcgcggacggcagcgttgatgcgctggatccacagcttacggaaatcacccttgcgagccttgcggtcgcggaagttgtagttaaaggagtgcagcagctgttccttggccttgcggtacaggcgggagcgctggccacggtagccggaagccctctcgagaacaacgcgacgcttcttgtgggcgttcactgcgcgcttgacacgtgccataatctattcctcagctttctaaagtcttattatttccgggtaagccctatgctcacttctgcagaagctggtgcagcttcttggcctggccgccgcgcagcacatcgtcggcggacagttcacgacgcttgcgagcggacttgtgctcgaggttgtgacgcatggcggaaccgacatgcttcaccttgccggtgccggtgatcttggcgcgcttggaagcggcggaattagttttcatcttcggcattgctgccctccttgctggtttgcttcttgtcggaagtcttctgagaaatcgcggactgcgcgtcggccgcggcctgagcctgagactcctgcttggccgcgagacgagccgcctggcgagcctgacgctcggcgcgggactcggcgccacgacgacgctgctcggactgggtgtggaccttcttgcccttcggcgcaagggtcatgatgatgttgcggccctcctgcttcggcttggactcgacggtgccgtattcctcgacatcgtcggccagacgctgcagcagttccacgccaccaatcgggcgggagatctcacgaccgcgcaacatgatggtgaccttgaccttgtcgcctccgttaaggaagcgggtcacatggcccttcttcacgtcgaaatcgtggtcgtcgatcttcaggcggaaacgaatctccttgatttccgcggtgctctggttgcggcgagcttcacgagccttgatcttctcgttgtacttgaacttgccgtaatcaatgagcttggcgaccggaggcttcgcgttcggggccacctcgacgagatcgaggtttgcctccttggccaggttcagcgcgacggaagtcgcgatgacgcccacctgctcgcccttcgggccgatcaggcgtacctgcgggacgcgaatctcgtcgttaatacgtggttcgtcgctgatgatgactccaatcctctacttcaattccgtggcggggcctttgctggagtcctgttcaatgctttgggttcatggcaagccaaaaccagcgccaatatgcgctcagcttctgcagacgcatatcagttctttgcgtcattcctgattgcgcgttgtatatcgcaatcgctaggctgtttgccttgaacccgaggccttgaaaggcttccaggtggggttgccccgctttcttgatttctcaagccaaataggaatcttaccacatgcccggacattcgcggaccgtgtgtcgatgggtggataccggctacagtaggcataatgactcaggtatgcgtgatttttggtgcgggcgaatactatgcgggcacgcccgtggttcccaccggtgcgtatgtgattgcggccgatggcggactcgaccatacgcgcgagttgggcatcgtgcccgatgtggtggtgggcgacttcgattcgctggagggccggccgccccgcaccgatgtgcgcaccatcgcgctgcccgcgttgaaggacgacccggacatgctttccgcgctgaaggtcggctggtcggcgggttgccgcgagtttcacgtgtacggcgggcttggcggccgtattgaccatacgatttccggcattcaactgatggcgctgctggcccgacacggggcaagcgggtatctgtatggcgacgggctcatcgtcacggccatcaccgatggtaggctttcgttccccgcgcatccggtgcccgaggacggccgcatggtgtcggcgttctcccactccgatgtttcgcttggcgtgaacgaaccggggctgaaatatgagcttaaagacggcacgctgaccaatacggtggtgcagggggtcagcaacgagttccgcgacggcgtggacgcggccatcagcgtgaaacgcggcacactgatcgtcaccttccccatcgaagtggcgttgccacaggtgagcagattccatgaattcggcggcgatatcggcgagctggacaccgcagtgtccaagctgctggttcgctgacttgcatgccgcgcgcttgctcgtgatgattcgagacatttctccaaaggagaggaaaatcacatgtcggttgcgggcaatccaaattgtgagcgctcacaaaaaatacggcatttttacccaaaacgcacgctgaaacgttgccatgtgtacagagtcggcattacagtagcaactgttggtaaacaatggcccggtgtgccaaagcgcgccaaggccaccctacaagggagaattacatgacagttaagattggtatcaacggcttcggtcgcattggtcgtctcgccttccgtcgcatcttcgagctgcaggctcgcggcggccaggctggtgacattgaagttgccgccatcaacgatctgaccaccccggctaccctggcttacctgctgaagtacgacagcacccacggcaccttccgtcatgacgatggcactccggttgacgtcaaggccaccgaagactccatcatcgtcgacggcaaggaatacaaggtctacgccgagaaggacgccaacaacattccgtgggtcaagaacgacggtgtcgagtacgtgctcgagtgcaccggcttctacacctccgccgagaagtcccaggctcacatcaacgctggcgccaagaaggtcctgatctccgccccggccaaggatgacaccaccccgaccgttgtgttcggcgtgaaccacgacatcctcaaggcttccgacgtgatcgtctccgccggttcctgcaccaccaactccatggccgccatggtcaagctgctggacgagaagttcggcatcaaggccggcttcatgaccaccatccacgcctacaccggcacccagatgctgctcgatggcccgcgtggcaccaagaccggccgcaacctgcgcgccgccgccatcaacaccatcgcccactccaccggcgctgccaaggccatcggcaaggtcgttccgtccgtgaacggcaagctgcagggccacgcccagcgcgtccaggttccggacggctccgtcaccgagctgaccaccgttctgaacaccgagaccaccgccgacgagatcaacgaagccttcaaggctgccttctccgacaccgattactacggctacaacgatgagggcatcgtctcctccgacatcctcggcgacaccca

SEQ ID NO: 2235 - DNA, 2880 bp, Unknown
  R51_24m  MAG No. k141_40640
ccgtgttgagcagccaatccacgaatgcggcggaatcgccatgccaccgcgccagccggccaccatatacattttggacagcgagccaagttccagcgccacgtccagcgcgcccggagtctccagcaggctcagcgagcgtacgtcgccgaattcgagccccgcataggcggaatcgttaagtacttcgactattgccagcgtgccggcttgtagcctgaaatgccggaaccggcacgccgctattcgctatatgtcgcatcccaaaatgttggcccgaccgccccatacttcatcggccggtaattgctaaggtacgacggctctgttacacacgcaatggcgtgtctatacgcagtatttatggcgggttacgggcatctgaatcttcatggggcggtaacctgcccatggggcggtatttcccccatggggcggtgaaattcccatggggcggtaaggcaaaacggcttaattccaaggtttcacaaaaccaacaaaccgccccatggactcattgccgccccatggggaatttaccgccccatgaagccggatattccgcccgtaattttgccgcgtgaggcactccgctcacgcgacataccgaaatcatcgcgtcatggcagaatgtgggtatgactgagaacgccgtgaatactgccgtgacttccgcctcctctcccgcaattcccgccgagacttccgccgtcccccccgcaactcgcgcagccaaccacccgctgggcacaccgctgggcaagcaccccacccgtgtgctgtttttgggcgctggcgagctgggcaaggaggtcacacttgaactcatgcgactgggcgcatgggtgtgtgctgctgactcctatgccggcgctccggcccagcaggtggcgcatgaataccgcgcgttggatatggcgaatgccgccgaattgcaggcattgttcgatgaaatcaagccggacatcatcgtgcccgaggtagaggccatcgccaccgatgtgctggccggtgctgcggccgcgggcgcccaggtggtgccgagcgccgaaatcgccgcgatttgcatggaccgcgagcgcctgcgcgtactggcccacgaagaattgggcttgccgactacaccgtatcgttttgccggctcgctggaagagctgcgcgccggagcttcggaagtcggctatccgtgcgtggtcaagccggtgatgagctcgtctggtcacggccagtcggtggtgcgttccgccgacgccatcgatgccgcttggaccgaagcgcaggagggccgccgcgccgccgatgagggcgatgtgtcgcgcgtgatcgttgaggcgcttgccccgctggagcgtgagctgacggtactgaccatttcttcgtccgccggcattgtgacgtgcgcgccgatcggccaacgtcaggagtccggcgattaccgcgagtcctggcagccggctaccgagcccgatggtgaggccgagcgggcgcgcgacatcgcacgtaccgccgttgaaggcttggtggccaaggctcaggcgaccggcgaaaccggttggggcgtattcggcgtggagctgttcgtgctcaccgacggctcgattctgttcaacgaggtctccccccgtccgcacgataccggtatggtgacgatgacctcccagcgtctgagcgagttcgcgctgcacgcccgcgcgattctcggcctgccgatcacccccgagcatgtggcgctcacgattccggccggctcggtggcggcaagccatgcgattgtggtggccggcgacggtgaggccgagttcaccgatatggccgctgctctggccgaacccggcacggatctgcgcatttttgccaagcccgaagtgcatggccaccgccgcatggccgtggcactggccgtcggcgagtccgaagccgacgcccgtgccaaggccggccgtgtggccgatgcgttgacgattaccgtggagtagtccacggcctgatcagctcagcatggcctcaatattgttgccgtccgggtcgtggatgaacgcggcgtaatacgtggggccatagttcgggcgcgggcccggagcgccgttgtcggtaccgccagaggcgagaccggcctcatggaacgccttgacggcggcctcatccttggcgcggaacgccacatgggacggcaccaccgggttgccgtccttcggagactccagccaaacgctgtcgccatcctcgtcattggcaaagcacacggcggtcgggtacgccactttcttgacgtagcccagcggggccagcagcttctcgtagaaatccgcgtactgtgcggcgtcggaaacaaacaaaccaatatgatcgatcatgacgaacctccttgcaccatttcgtcactcccattatcgtgcgtgcgcggccgtacactcacgttttgtctattgacgaacatctgagtgtccgcgtgcttgcgtagatactgttactccgaacgactatgcgaccggcaataagtcgattgtcggaccaataccgtccgcctccgccatcccaacagcgtatggccgttcgatgaggcgacatatgatgcgctggccgcatcgtagcgtcatgccgagtgttgttgtagccctcgattggtacccttttaccgttagttcacccagaaattccactcctgaaaggtgagtcatggagaagctggaaaagctctacgagggcaaggccaagcaactgtacgcaaccgacgatccagaggttctgtgggtcgaatacaagaacaccgccaccgctggcgatggtgaaaagaaggaagacttcaccggcaagggccgcctgaacaacctcatcaccaccatcatcttcgacctgctcaagaagcgcggcatcgacagc

SEQ ID NO: 2236 - DNA, 4010 bp, Unknown
  R51_24m  MAG No. k141_40899
accgccaatattcgcaatcctgcgccaacacacggctctcaacatagaaaaccgcgcccccaactaccggataagaattacttcaacccgataatcgaggtgcggtttttgcaggcgtaccgactactccagctccaccgcgccggtgtagagctgatagtactcgcccttttgcgcgatcagctcgtcatgcgagccacgctcgatgatgttgccgtggtcgagcaccatgatcacgtcggagttgcgtacggtggacagacgatgggcgatgacgaagaccgtacggcccttcatcaggttatccatgccggcctgcacgacttcctcggtacgggtatcgatggaagacgtggcctcatcgagaatcagcgcgggcggatcggccaccgcggcgcgggcgatggaaatcagctggcgctgaccttgggacaggccggatccatcaccctcaagcaccgtgttgtatccctcgggcagcatacggatgaagctgtccgcattgaccagacgcgcggcctcaatgcattcctcatcagtggcgttcagacggccataacgaatgttgtccatcacggtaccggtgaacaggttcacgtcctgcaacacaatgcccaaagacctgcgcaaatcaggcttcttgatgccggccacggagatgccatcatacagaatctgaccttgctggatatcgtagaaccggttgatgaggttggtcacggtggtcttgccggcaccggtggcgccgacgagcgcgatcttctggccgggcttggcgaaccaggtgatgtcgtgcagcaccggcttgtccgggttgtagccgaaggtcacgttggtgaagcgcacgtcgccgcgcagcagcgtataacgcccatcaggcgaggtgatcgcctgctccttggccttcatcgccacctcgcaggcggaaccgcgcagcttttcggcggccttcagagacctcgtaccatcgtcgccgatctcacgcttccacgcccagtggccggtctcatggtcgacttcggtcatggtgcggccgtccggcccaagttccacgttcacgagcgtcacggtgcccttgtcttcctcgatgggttcgtccatcaacttgaagatgcgggaggcgccggctagcgccatcatcaccatggtcagctgctgggagacctggccgatcgggttgatgaacgagcgggatagggtcagcagggagacgagcgtgccgagggtgagcggcttgacaccggtcagaccgatgtcattgacgccggccagcgaaacggcggcaccgacgatggcgagcagaatgtagagcagatagcccatattgccgacgaccggcatggtcacattgccccaggtgttcgcctcggcggacgcctcaaagagttcctcgttcttctcatcgaaggtcttctgagtggcgtcctcatggttgaagaccttgatgaccttctggccgttgacggattcctccacgaaggcgttcacgtcgccgatccactgctgctgcttgacgaagtagcggccggaacggctcacgatcttgcgcacgatgaaatacagcagaacggtgaacacgattacgaacgcggtgaatggaatggacagccacagcatggacagcaatgccgcaatcgcggagataatcgaggagaacatctgcgggaacgactgcgagatggcctggcgcagcgtatcggtgtcgttggtgtagtggctcatgatgtcgccgtgctcgtggctgtcgaagtagcgaatcggcagcttctgttggtgggcgaacatatcgtcacgaatcttcttgagcgtgccctgttcaacggtgatgatcagccactgccaagcccaggatgccacgataccggccacatacaggcagcccatcagactgatggcgcgcagcaacggagcccagtcggggttcgattcccccaccatcggcaggatgtaggtgtcaatcagcgattggaggaacagcgcggatccggcctgcgcggcggcaccgatcaggatgcacaccacgatggcgataacgcgcaatttgtattggaagatgtagctgaagatgcgcttgatggttccggggtcggctttgcccatgtcaggctcgcgattcttgaaactctggtcgttgctcatcgtgcttctccttccttggtatcggctgcattggtatcagctgcgctggtatcggccgtgggcatggtcactgtcaccgtcacggtttcggacggctcagcggtagatgactcagcagcctgtccggcagcggccagttctccggtcttagcctggttcttggtctgggattcgtaaatggaacggtattcgtcgcaagtggtgagcagttcctcgtgcgtgccggaggccatgatacggccggaatccatgacaagaatcatgtcggattcctgcacggaggccacgcgctgggcaatgatgattttcgtggtgtccgggatctcgttgtggaatgcggcgcggatcagcttgtccgtcttggtatcgacggcgctggtcgaatcgtcgagaatcagaatcttcggcttcttcagcagcgcacgggcgatgcacaggcgctggcgctgtccaccggacacattggtgccgccctgctcgatgtacgtgtcgtacttatcggggaattcctgaacgaatccatcggcctgcgcgagctgcgcggcatggcgaatctcctcatcggtggcgttcgggttgccccacctgaggttttcggcaatagtgccggagaacagcacgttcttctgcaacaccatggccacctgatcgcgcagcgcctcgatgtcatagtcgcgcacgtccacgccgccgaccttgagcgagccagagctcacgtcgtacagtcgcggcaccagctgcaccaaagacgactttgccgaaccagtaccgccgacgatgccgatggtcatgccggaacgaatcttcaggttgatgtcgtcaagcacgggcttttcggaactgtcggagtagcggaaggtgacgtggtcgaattcgatggagccgtcggccatgtcagtcaccgggtgagccgggttctgcaccgtgctttcctcctgcagcacctggcagatacgctcggcagaagcctgagaaataatcaccatgacgaaaatcatggacagcatcatcatggccataagaatctgcatggcataggtgaccagcgaagtcagctcgccggtggacaggcccaacgccgcattattgccggaagcgacgatctgctgcgcgcccatccatgcgatgagaatcatcgaggcgtagacgcacaccatcatgatcggcatgttgaagctcatgatgcgttcggccttggtgaagtccttgaagatgcgttgggagatgcggccgaacttggagacctcgaaggattcgcggttataggacttgaccacgcggatgccctgcaggttctcgtcgaccacgttgttcaacgcatcgtaggtgtgaaacacgcgctcgaacacggggtgcacgagcacgaccagaccgcacaggccgatggccagaatcgggatgcaggccaggaacaccatggaaatcgacggggagatacggaacgagaacagccaggccacgaccaccatgatcggggcacgcacacccagacgaatgatcatcatgtaggcgttctgcaggttcgtcacgtcggtggtcagtcgggtcacgatcgaaccggtggagaaccggtcgatgttggtgaagctgaagccctgcaccttctcgaactggtccttgcgcaggttcttggcgaagcccgcgccggccacggccgcgtactttccggacaggaagccggcacccagcgaaaccatcgcgcacaccagcagaatcacgccgaacttgacggtggccggcatgctgccaccggtgataccctcatcgatcagcgaagccatgatggtcggaatcaggatttccagaataccttcgaccgccacgaacaccggagccaggatgctggctttcttgtattcacgaatcgaatg

SEQ ID NO: 2237 - DNA, 3015 bp, Unknown
  R51_24m  MAG No. k141_40987
cttatgaagctatttcagatggaacggagacggtaggtgccgttgcggttggaggcgatgatcatctggtcgttctccagcacgttccagccttcctgctcatagccggaagaggagaccaccacaccggcggagtcgccgttgtcgtcgcgcagctcacggtagcgcatcacacggtagtcggcggcctgcgcgccacggccgtactcatcgtagatttccacgatgcgcgggctggtcttctcacgaccagcggcgcacagggcgatgagctggtcctcggactgaatcatgcagttgtagctggacttcgggtaggcttggcgcagttcgcgcacggcctgggccacggcctcgtcgagcgggaagccgaaaccgatgtattccagaatcaccgcgaagaagatagcggagtcggaacggccgccggtggagaggagcacgctgtggttcaccgggtatgagcggttggtgacgatgttgcggccattggcgtccgagatatcgccgttgtggatgaagctcaggccgttcgcatagaacgggtgctggttctccatgatgagcggcagattggaacttgccaagcgcaggtgccagatggcaccgcgagacggttcgtcggccagcgtctcaaacgtgctgtcatgacgggccgcgatggtcgacttgtagattcgggtgccggtttccggggtgggtgcgccaccgtcgcgtacgtgcggcgcttcggcgggatcggaaagctgggctacaccccagccatcattgtggatttcagacagttcacggaaatcctcgacattgtcttgccccaacacggcgttgagactcaggttgaaacctgccgtcgcgtatcccagtaatctgcacatggtatttcaacttaccgaaaccgtgcggcgacgtgcggcgaccgttatagccattctttatagagcgcatcagcgccgctgcaaactggtatgttatcgcttctgtttggaggagcgctgaggcttggcggcgggtttgccgttcttggccttgcccttatcgccctgctcagcgaccgcagcggcggcagcggtctcagcgatcttccgctcctcggccgatacggcggcatcgagctcctgtaccaatcgcccaagcccggacgtggtgtccatcgggtcggggacggcggccgggtcggccactgcacgagtcggcgtgggcgtcgtgatggtcttggccgtatcggtgcgcttcagacgcggtgggcggcgggtggagacgaacagcggctgcacctcgaccagcgggttgtaaggtgccagaccgaaccacttaaccggcgagccggccatgcggcggattgcgtacttggcttgcaacgacagggcaccgcgtgcggaaaccttggattccggcatcagggccttgtgaatcagcacgtaacggatggtgccgatgtccggatcggcgtcgaccttggggtaaatcgacttctgcttaggcagttcgccggttttggacaggtcgtgcatgatctggtggatgtacgccgggatggactgcgaaaccttgaagcccaaacggaagcgcacgcggtagatgtagttcgtgccgaagtcctccaccgagtattcacgggtgaacggctcgtcggtggtttccacgctgactgcccaccaagcacgggcacgcttggggtggtcggcgaagatggagaagaagatgtccgtgtcgagtcgcttggtttccgagtcggaggtcaggtacacgatgttgtccgcaaaatacgggatgcggaaatcactgtgcagcttgtcgagcgcgggtaggaagtcgttgggccgcatgtgacggcgttgcgcacgttcgagcttggtgccctcattccacgtgtacatgacgaacagaatcgcggcggtcagcaacatggtgaaccaaccaccatgcaggaatttggccatagacgcgatgaagaacatagcctgaatcgccaagaacagcacggtgaacacgatggcaccgacccgcttgccggaatgccagatgtgcacgccgagcagcacggtggtggtgatcatcgtgatggtcagcgccaggccgtacgcggcggagatatgctcggaatccttgaagatggcgagcacggcgagcgtggccacgcacaacacgccgttgaccaccggaatgtacagctggccgcgcgtgcgggccgggtaacgcacctgcagatggggcatccagttgaggcgggtggcctcggaaaccatggtgaacgcgcccgtgatcagggcctgggaggcgatcacgccggccgtgacggacaggatcacggccaggtaccgcacgttcggggtcatcatctggaagaacgggttgagcgacttcatcgcggtgtattgctggttatcgctattggccagcatccacgcgccttggccgaagtagttgagcaccagcgcaaccttgatgaatggccaggtgaagtagatgttgccgcgccccacatggcccatgtcggagtacagcgcctcggcaccggtggtcgagaggaacacagtgcccataagggcgatgccggcagcattgtccggactgaacaggaatttgatgccgtacaccgggttcagggccgcgaacacagaccagtcgttagagagattcgtgacgcccacgatggcgaggaagctgaaccagaccagcaccatcgagccgaatactttgccgatgcgttcggtgccgcgcgactgcacggagaagagaatcacgatgatcacgacggtaatcatcagggtcaggcttgggttttcgtcgaacaacccttccaatggtggcagggtctgcaagccttcgactgcggaactgatggaaaccgccggagtaagtaccgaatccgcgaggaatgccgcgccgccgagcatggcgggaatcgcgagccatgcgccgtacttgcgaatcaacgagtacagtgcgaagatgccgccttcgccattgttgtcgatgcgcatggcgatgagcacatatttgacggtggtgatc

SEQ ID NO: 2238 - DNA, 5463 bp, Unknown
  R51_24m  MAG No. k141_42179
atcggcccgattctggcctacttcttccgtaacgccccgtatttcgagggcgagacgaacccatggccgctgctgcgccagcgtatgtgggattatctggacttccagcgcaccaatgtgctgcccggtctgttcgatgctcgctatggttgggaggattacgccatcgacgtgttgtccacgccgcttatgttcgctgacctgacccatacccctgaagctgtggcttctggagcaagccccaaggaactgcatcgcccggccttccgtgagaacgcgggggaggtgtacccggaccgcgaactcaacccgtacgagatcaaccacatcatctccacgcacttcaatgacgtacgtctgaagaacttcatcgagcttcgccactgggattccttgcctatcgagcgtgccgaacgtctgacggagattgtgtcctctctgttctacgtgcctgagcaccgtgaacgtctggaaagctacttcgagggcatcagcgaggaagaggtgttcgaagccaaggccaacatccaggcccacggccacgaagccacgccgtacggccagccgctcgacttctggaaggaattcctggggctggagggccttctgtccgacatccccggcgacctgaagcaccccgacgtgttccaggagtaagcgaagaagcatatacagaaaaatctattgcgcgatatcggtgtcgaaggcatgacagaatgttttgttttggcaccgttttgcatatccggccaaggatattggatgtggttgcgcatgggagtggggagaatgcggatagactggcggatatgacatctgggaattcattgcagcataagcgtgttcgcaagtcgccgggggaacgccggcaggaaattctcgatgccgccgtgcgactgatttccgagcgtggctacaacggtacttctgtgcaggatgtggccgatgcggtcggtgttaccaagcagggagttttgcgatattttcctagcaaagataacctgcttgccgcgatgtatcacgagaattacaacacgtttggcagtgtggaagacttcatggcctccggcctgcctggttcagtgcccgatgatttcagattacccgcgtatctgaggttcttggtacattgcaattccacgcgccccatgcttgttcagctgttctcgatattgcaggtcgaatcgttcaatcctgcgcatccgttacatgacgagtttgccaatcgtcgggattcaatatggcgatactattcgacatacaactggaacctgccttccgaattcacctcgtttgaggaggtccggcccacgttgcgccatgctctggagatcatggatggtgtgcaactgaggtggttacgggggccggccattgacttatgcgatgaatgggccgatctggagccggcgatatttccttcgccgatatgggacgggtatcgctgattcgctgtgtgccttgaactgaggcttgtgcttgatggcggcagtaagtatgcgggcgaacgaaggggtcgcatacatacggtcgttttggtgtatgtgatgcgcgcggcataagcgtgttgtatgctgtcaatagataaactaccaattggtaattaaaaagctgttcgatttcactgaggaaagcgacttcgtatgaccgacaacaccacgcctgccgcaactgctgaaaccttaccgtacaagaatcctgatttgcccgctggtgagcgaatcgccgacttgctctcccgtatgacacttgaggagaaggtcggccagatgatgcagcttgacgcccgcggcggcgatcttgagaatctcatcgtgaataagcatgtcggatccattctgcataccagccccgaggatttatctcgtgccgccaagaccgtcaatgagaagacgcgtctgggcatcccgttgattatcggagatgactgcatccacggcgattccttctggcccggcgccacgatcttcccctcccagctcggcatggccgtcagctgggacgccgccaaagtcgaagccgctggccgcgccaccgccgaagaggtctcctgcaccggcgtgcactggacgttctccccggtgctgtgcatcgcccgcgacacccgttggggccgcgtggacgagactttcggcgaggacccgatgctgatcggcgaactcgcctccgccatggtcaagggctaccagggcggcgccaaggccggcgaggccctgccgaagaacgcgatcctggcctgcgccaagcatttcgccggttactccgagacccagggcggccgtgacgcctccgaagccgacctctcccaccgcaagctcgaatcctggttcctgccgccgttcgaacgcgtggccaaggaaggctgcggcacgttcatgctcggctacgagtccatcgaaggcgtgccggtcacgttcaacaaatggctgctgaccgacaagctgcgcggcgcatggcaatacaatggcacgctgatcaccgactgggacaacgtcggccgctcggtatgggaacagcatgtcaagcccgattacgtgcacgccgcagccgatgcggtcaaggccggcaacgacctggtcatgaccaccccacagttctatgagggagccatcgaagccgtaaaaaccggtctgctcgacgaatccctgattgacgatgcggtagcccgcatcctggccctgaaattccgcctcggcctgttcgaagacccgcgcctgccggatgccgaacgcatcaaggcggtcatcggctccgccgaacaccagcagaccaacctggaactcgcccgcgaatccgtcgccctgctgcgcaacgacggcgccctgccgttcgccgcagacaaggccaagcgcatcgctgtggtaggcccgcttgccgacgacgcccagaaccagctcggcgactggaccggcaactccggtcaggtctcttggatgccggatggccagcctcgaggcatgattaccaccgtgctcgacggcctgacccagctcacctccgacgattgcgaagtggtctactcgcgcggcgcgaacgtcatcgacctcgtgcctgaccctgccggcgagttctacccggacggccagcctcgcccgaaaatcggcgtttccgccgccgtcgatcgagcgatgatcgacgaagccgtggccaacgcccgccagtccgatctgatcgtggccgtggtcggcgacgtggtccagctggtcggcgaaacctgctccaccgccacgctcgaactgctcggtggccagaacgccctgctcgacgcgctcgccgccgtctcgcgcgaaaccggcaagccgatggtcaccgtgctcatcagctccaagccgcaggtgttgcccgcctccatcgtgggggagtacggcgtgttcgccaagcgcgtcagcgaccctgaaaccggcaccggctccatcctgtgggcgccgaacccgggcatgcgcggcggtcaggccatcgccgaaataatcctgggcctgaccagcccgtcgggccgactgccgatcaccttcccgcgccacgcgggccagctgccagtctactacaaccagattcgcggccagcacggcgaccggtacgccgacctcacccaggatccggcgttcgcgttcggcgaaggcctgagctacacgacgttcgcatacggcgaaccgaccattacgggcggcgcaagcaacgccgacggcacattcgccgaaaccgacaccgtacgtgccgaaatcaccctcaccaacaccggcgagcgcgccggcgtggagatcgtgcaggcctacatcggcgacatcgtgacctcctacagctggaccgaccgcgaattgaaggcgttccagcgcgtcgcactggaacccggcgagaccaagaccgtcaccttcgagatcccggtggcgaactgcacgatcgtggacccggacgccaaccgcatcgtcgagcccggcgaattcgaactgctcatcggccactcctcgcgccgtgaggacctgaagcgcaccacgttcaccgtggcgtgagtgagtctgacaatcgccggataataacaaagtgggatgaggctcgatgccccatcccacttgttggcttgttgtactgttgcgatgttgctggtcagcgtcagtcggacgtttcagtcggacgtggtgatgtgctccacatcccagcgcacgccgagcacttcgggcgcgcaactggcgttcgagccctatcagcgcgcccaatgccgtgccgagcacaatgcgtacggtgcagtcgagaatgatggccagagaaaacgtggtgaacatgaggattcacctcctgaaaagtagacgtcaggaacttcccgcacgccctacagcgccagcccgcctcccgcaactacgtcgccgcgttcgggtggttcgggctccgtgcggtgagtgggacgcggccgtatgatggaagcgcgggtggtccgggattggtccgggactgttggatgcggcgggaggtgtcatggttcctatcgagcacgtgtacgaccagattcgcgcgtttgccgctgatgccggcgctcgcaaggtcgtgctgttcggttctcgcgcaaagggcgtgaaccggcctaaaagcgatatcgatcttgccgtggccggttgtcccgatttcaatcgcttggagcagaaccttcaggacaatctgtggtcactgcttaaagttgatgtcatcaatctggatgagccgatttcttcatcgctgagggcggagattgagcgtagcggaaaggtgctgtatgaaaaagtattagcagtgactaatacccccccccgttgcccccgttgagggggtgattttgtctgttaacggattacactggaataccgtaaggcaggaacaatggagggtttgtgggcagaactatgccataaccccgtttaagggagtattcactggggcggcagcatggaagtgcttttggtcggtaataccgatttcattaccaaacagtggattcagcatgcttttccccgagaccatgtggtgatagcggaacgagaaggcaccgtagacggcaatgaccgtctcagaatcgtcaacatgtctgacgccaacacccttgtcgacaccatcaccacatacgaatttgatcgcatcgtattcttttccgaaaatctgaccccacgcagcgatagagacggcgatctgggagcattgcgaagacttctgcatgccattcgcaacaggcaaacgcaaatactgatggtcagcggccccgaatccgaatttacctatccggaaaacgccgacgtacgtgataccagcaaaagtctgatgtctcgagcgtcggaagaactctgcctgtactacgcacgcacctaccgtctggaagcgaaaatcattcgaagcccgtacctgtatgcgtcggatcgcaacggcgtcaccgcatatttcaatcatctatttgaacaggcggaatcgggcacattgtcgttctgcgagcaaaagaaccagcag

SEQ ID NO: 2239 - DNA, 3410 bp, Unknown
  R51_24m  MAG No. k141_42959
aagccgaccacgaaacaggacgcccagccctctacgacaacgctatcgacaccgactacacccactcaatcggcattcaaaaaggccaaatctaacccccgcgacacgccgagccagacacacattttgacccttaacccgccgacatgatggagaagatcggcagatcacggccgcgcgacttataggcgctttcgaattcgtcctgatgatcggagttggagcggccgtcggtcatgagcacgatggcggtggtgtattgcgaggcttccgactcgctgggcagctcgtcgagcgcgctcagcaggccttcatagatatcggtgccgccgctggcatcggtggcatcggcctcatgcagcaggtcgctggtgcttgtgccagtggccttgaccgggcggtgggcctcggtttcaaacgggatgagaatgttcacgtcgccgctggcgggctcgatgtacgacttcttggcctggtccgggtcgagcgccgcgttcaggcctttgaccacgccgttcttgccctctccagacatcgaaccggagtaatcgaccacccaaatggtccagctgggtttcctgagcgcggtctggtagacgttgagcgcgctgtcgatcaccgtggcggaggtcatggagaacgtgagtttgccgtcgctgaccgcggcgaggatgtccgcggtggagacgggcttggtggcgccggagtcgtcagcccagccgagtttgacggccttggatttggcgatgccgaacacgatcggcgtggtggaggtgctggccgcgtctttgacgatgtgcttggtgtctcccatcgaaatccacatcgaggaggcaggccagacggcgtcgtgatcctggccgccggccttgagcgcgttcataatctccagcgaacccatgtagtgcatcgtcacggctacgttggattggtcggccgctttctggatggcagtggcgacttccttgttctcggagccggaggcaatgctcagggtggcggtcggtttgccgccggacggctggaaggtctgcgtggtggcggacgtgccgttgccgtccgctgtgccgtcatcggaattattgaacgccgtgcaaccggtcaacgcgagcacgccggcacatgccgcggccgcaaccgcggcggcgcggcggcggagagaagacattatgcccataattccatggctctcccgccatctaaagcgggccgggccacaaggtgaccgcacggtgaacaatgggtgaagagctacatcagtacgcggcgcaggcaatcatggggtcgtcgtagaagccgaggatcttttcgaggtagggcttgtaagtgctgttgggcatggagaagatttcgtggcgcgattcggggaagcgcacgatgttcgcctcgccgccgccgtccttgaccagttggacgaagtgattctgcggcttattgagtacccagatgtcgcgtccggactggaagagcagcaccggcgtctccacttcggcgcaggcggacggattcagtatggcccggttgagcttcaacgcctggcgcacccattcgaacgccgcgcagtaggtctggtattcgctattctcgcaacgcagcttgaagtaccagcgttcacgcgcctcggaagcgccctcgttgccttccatcgagaactccggcgtgaagtccgactgcccgaacacacgcttcttgccgaagccgagtccgcacagcgcgccgaccagcacacgggccacgcccagcggcatgccggtggcgggggcgaccatcggggcggagagcaccgctttgtcgaacagggtggggtatcgctccaacacggccgcgccgatgccgccgcccatcgaatggcagaacaggttcagcggcatgccggccgcgtactgctggccgatggtttcggcgaagccggccagatcggccacgtagcgctgccagtcatcaatccacaccatgcagcggttgtccacgtcgcgcgcggacttgccgtggccgcgatgctcgagtacacacaccgagtagccggcgagcagaaaataccagacgagctcgtcgtatttctcggcgaactcggtgaagccgtggctgatgacgatggccccgcggaaggtggcggtggcgccttgctcgcgaatcgcgtcgaatttggcggagtcgtagcacaggtagtgcagctggcccgagcggccgccggtgtccataatgccggacagcggctcgatcccggccgaacgttcggcggcggacggatcgaaccagccctcctcgcagcattgttcgagcgcgggcagcaccacgtcggtcatcgtttcggcgtacttgttttcgtcgatcatcgtcacctgcatggctcccatcttaggacaagcctcacgcccacacctcgcacccacaccacgacacattcccgggaatgcgtcgcaagcctgcgcgccactgaccgcacaggcgcgtaggttgtgaggtatgagcgaaaccaatgatgtcaatgacgcaatcaagcatttcccacgcctccgggcgcgcacgctgcgcttcggctgcggcgcaccgcgctccgcacagaccgtgggcgacggctcgcgggccctgttcctgcgctccgacggccccgaggatctggtgaccgcactgtggctgagctggttcgacgagtccggcgaacaccatgagaccaagctggccgacccgcgcgaactgctgggcgcaaccgccgacagcgaggacgtgccggccgaggagaaggcccgccgcgagcgtgcgcgcgaaggcggcaccggcatcgtcggatactccgcagatgacgacggcaatcgcatcgtgttcaccatcaacggccgcctgttcctgaccgacatcgattggaatgacgagaccggcgcacccgagccgcacacccgtgaactggccggcgaatggctcgatgaggacccggcgatgtacacgccggtgctgaacccgcgcatcgccccggatggcgaacatgtgctgtacaccacgggcagctacctgatgctggtcgatatcggcggcgaactaggtgaccgcatcaccgccgtctacggcgtgagcgtggaggatgaggacggcaatccggccgaaaacacgtggaaaatcggtctggccgagttcgtggccggcgaagaaatggaccggtacgacggtttctggtgggccccggattcgcagcatgtgctgttcgagtctttcgacaccgccgacgagccgacctggtacatcagcgatccggccgaccccgagaagccggacgccggccgccgctacccgcgcgcgctgacccgcaacgccgacgtgtacctgaccgtgatcacgctggcgttcgatgagaacgaccggtacgcgggcatcaccggcaacgccgatgtggattgggatcgcgaggcgtacga

SEQ ID NO: 2240 - DNA, 4762 bp, Unknown
  R51_24m  MAG No. k141_43028
cgaggcgggggtgttcttgtcggtgggtgtggtgttctcggtcatcttgttctccttatatatacggtatatatgcgtgaatgcatatggtgcattacgcggttgcggttgcggatgtggcggtggcggtaatgacgccctgtttcagggtgacggtgatgtcatccccggtactgacccgcgaagcgtcatccagcacatggccatcggcggactgcaccaccgcatagcctcggttcagcgtggattgggggctgagtgcggtcagtgaggcatgggcgcgttcgacggtgagctgggcatcatccacgatacgccgcaggccgatgtcaagccgctgcagggaatcgtcgattagccgctgatgcggttcgagcatggtatgcggttgggtcaggcttggccggttcgcatatccctcgataagtcgaatctcgttctccacgcgcgaacggacccgcagtcgcatacggtcgatggcaccttcgatgagctgcgactgctcacgcacatccggcaccacgcgcttggccgcatcggtgggggtggaggctctaagatcggcgaccagatccagcaacgtccagtcatcctcatgcccgatggaggagattaatggtgtggtgcaggcatacgccgcacgaaccacacgctcatccgagaaaccgatgagatcctcaaacgagccgccgccacgggccacgatgatcacatccacgctcgggtcggcatcgagttgtgcaatggcctgaaccacttcggccgggcattgctcgccctgaacatgcacatggaccaccttgaaggttacggaaggccaacgaaggttcacattggtgatcacatcgccttccgcacgtgcctgaggtgcgcaaatcaggccaatagtcttcggaaactccgggagaggcagtttgtgatcggcatcgaacaggccctcgcccttaagctgcttgcgcaattcgtcgatcatggccttgaggctgccaccggctccgaccttgagaatcgtgtccccgcgcaacgacagcgaagtgcgcttcatccacaggttcggtttgccatgaatcaccacgcggtcgccctgaacgaactggctggccgcggccgcgaacctgccgaagccattgacttccatggcgatatcctcgaagtcgtcgcgcagcgtgatgtaggccgagccggcgcgacgggtattgatctgcgtgatctggccggtgacccacgcggacggccatcgttccacggcaccgtagaacttctggctcagcacacttaccggccacggattttgcgcgctggtttcagcggcgcgtgcaggcagctgatcgatagggcgaggctcattcggcagattgatggtgccctgatcaggcgcgaaagtgccttgacccggctcaaagccagccgagaccagtgaagcggcggtcggtggacggccggtagatgggtagcccattgcagtagtcatgcactccactataagtgcgttggttgatgacggtaaatatttaccgtcgcctgaaaacggtgtgatgatgaatgcgagaaccgtacgaagcgatgtatcagccgatgatggagatggtctggtgcatcagaagaaaggagtcattatggcgaagaaacgggtgctatgaagaggagtgagatatgcgttgcgctgacgattgagagtcgttagtgagctcgctgtgcgacacgcgagcagaaaacagttacgctaatcacacacttgtggttttggcggaaaatagccgaaaaccctataaatagttcgacacaccactgttgagcactagatatagtggtggagatgccgtattcttctagaggttcaaaaaacgacatcaatgtaatttcgtgtggcccacgtcgagtgcggccaaaatgcggaactcaggagagtgttcgccttataggaaaggggtgcccgatgggcgcacaggtgttggaggaaatcgtcaccgataacgagaccaaggtggccgccaaggcctccaccgtgctcgttgagaagcgtgatggtcgtgtggtcgacttcgaccccattaacatcatctctgcggtcaagtctgctttcggtgacctgaacaaggaagtcggccccgaagaagatgccatgatccgtggtttcgccaaccaagtcgaaggcgaaatcaaggggcgttacgccggccccgccaagatcgaggacatccagaacctcgtggagcacgccctcattgacgcccacctgtacgatgtggctcgcgcctacaccaactaccgtctcgacaaggacattcagcgtgccaaggccactgatgtcaacgaggccgtttcccgcttcatcaaccacgacccgaccctgattcacgagaacgcgaacaaggattccaacgtctactccacccagcgtgatctgctggccggtgccgtgtccaaggccgccgcgttcaacatgctgccgccggcggtgtccaacgcccacatgaagggcgacattcacttccacgatgccgactactcgccgttcactgcccagtccaactgctccttgccgaacttctgggacatgttggccaatggcttcactcttggcaacgctccgatggcttccccgaagtccatcgccattgcggccacccagattacccagatcatgaaggacgtggcctccagccagtatggtggccagaccgccaaccgtgccgacgagcatcttgcccagtatgccaagaaggattacgagaagttcctcgaggaagctcgtgagaccatccccgacggcatgccagttgaattcgcccgtcgtcaggtcgagagcgccaagaggaacgagcccgccaagctgcatttcggttcccgcgaaccgctgccgatggacaccccgttccacaccgacgttgacgaacttgagcaggagcgtgaaatcctcgccaagattcgtacccgcaaggccatctatgatgccatgcagaccatggaataccagatcaactccaaccgtgtgtccaacggccagaccccgttcgtgactgtcggctttggtctcggcaccgactggttctcccgcgaggtgcagcgcgcgatcctgctgaaccgtattcgtggcctcggcaaggaacaccacaccgccatcttcccgaagctcgtctttactgtgaagcacggcgtgaacgccgacccgggtgacccgaactacgatctgaagcagctcgccctcgagtccgccaccaagcgcatgtacccggatgtggtgttctacgagaacatcgtcaagatcacaggctccttcaaggctccgatgggttgccgctccttcctgcagggttggatcaacccggagaccggcaaggacgaggaggatggccgtatgaacctcggcgtggtcaccgtcaatgtgccgcgtatcgccatcgaatcccacggtgacaaggctcgcttctggaagctgttcgaggagcgtatggaagtcgcccatcaggccctccagttccgcatcatgcgctgcaaggaagccaccccggtcaacgccccgaccctgttccgcttcggtgcgttcggtcgtctcggtgccaacgacaacgtggaccagctgttcaagaacgagcgtgccaccgtgtcgctcggctacatcggccttgccgagaccaccgcggtcttctacggcaagaactggattcgcgaccacggctgggatccggaaggcaaggagttcgcgctgtccatcgtcaagcgcatgaacgagctgtgcaagcagtggagcaaagcggagggctaccactattccgtgtactccactccggctgaatccctgaccgaccgcttcaaccgcatggaccgtgaaaagttcggccgtatcgaaggcgtgactgaccacgacttctacaccaactccttccactacccggtgtggttgcagcccaccccgatggagaagctcagctacgagaaggacttcccgtactacgcttccggcggcttcatcaactactgcgagtacccgtgcctgcaggacaacccgaaggcgctcgaagccgtgtgggattacgcctacaacatcggcatcggctacctgggcaccaacaccccgatcgaccactgcttcgtgtgcggcttccagggcgacttcgagccgaccgaggaaggcttcaagtgcccggagtgcggtaactccaacccggacaagtgcaacgtcaccaagcgcacctgcggctacctcggcagcccggtccagcgcccgatggtgcacggccgtcacgaggagattgcccaccgagtcaagcacatgagcggcgaaaccggtcgtgtgacgctggacgacggcaccactcgcgagtggttcgaagaggccaagtagggttattcgtgagtaggctcccctctctgaggggagctgtcagcaaagctgactgaggggagtccgaggagctattccgaagctcccctcagtcgcctacgacgacagctccccctcaaagaggggaactaatgctttccgcaaggagggaatcatgccggagttgcatacgaccaagcccgaacccaagcgccatgactttgcggccggcgagaccgggcgtggcccctccgtaccctccaacggtcttgccaacgatccgaaagccggtcaatgggatggccggcgcatgtccaagcggatgatcgccgactacaaaaccttcatcgtcaccgacggagaaggcgtgcgcaactccctttacgtctccgggtgccccttccactgcgtcgactgcttcaacgcctccatctggga

SEQ ID NO: 2241 - DNA, 9078 bp, Unknown
  R51_24m  MAG No. k141_43159
accgccccatgaggagccgtttggatatagcagtgggccgggccctgaataccagagcccggcccactgctatatgcccacaatcagggctattgcgatggcttaacgcttggctatcgcgcgtagcacaatcttgcgtagctcggaggcaatcagcacgattgcggccaggcagatgcattccacccaagccatcgggctcaatgccacggtgccgaacggaccgttaaggaacggcacgtaaatcaccacgagctgcagcgccacggacaaaccaatcgcaccccatagccacttgttggagaacagacccacgaatgcggactgcagatgcgaacgggaggccagcgcgttgaacagctgggcaaacaccagaatcgtgaagcccatcgtacgggcctcggtcatctgcgcttcatggccgatggcatccaccgagcggtcggtgaacaagccgccggataggtgcatgtccataccaatcagcgtgacgatggccataatgacgccgacgaagatgatgtcgccccacatggaggcgtcaatcacgcggtccgtcaccttacgcggtttacgacccatcacatcgtcggtctgcgggtccacgcccatagccaacgccggcgcggcatcggtcagcaggttgatccacagcaactgtgtggcgagcagcggcacggtgacgcccacggtttccggctggcggatgccgaggaagccagcaaacaccacaccgaggaacacggtgaacacctcacccacattggaactcagcaggtagcgcaggaacttgcggatgttgtcgaagatcacgcgaccctcgcgtacggcggccacaatggtggagaagttgtcgtccgccagaatcatcttggcgctctgcttggtcacttcggtgccggtgatgcccatggccacgccgatgtccgcggacttgactgccggggcgtcgttcacaccgtcgccggtcatggccacgatgttgccttgacgctgcaaggattcgacgatcttgagcttgtgctcgggggccacgcgcgcgtacacggacacttcggacgtggccttgtcgagtgcggcctcatcgggcagctggtcgagctggtcgccggtcagggccttgccgtccttggcgatgatgccaagatcggaggctatgcgggcggcggtcagcgggtggtcgccggtgatcatcaccgtgcggatgccggcacgatgggcctcggtcacggagtcgcgcacctcagtacgcggcggatcgataatgccgaccatgccattccagatgagatcggtttcgatggcttcggcctgatcggcgatgtcggacacctggcctgcggcgttgacgcttacaccgggcacatcagccaaagaactggtttccagcggacggcaggcctcgccaagcgtacggtaggcctcggaggagagacgttcgacggtggcgagaatcgactggcgatcgccttcggtgagcttacggacctgaccacccacgcggatgcgcgtgcagtagctcaacagcacgtcgggcgcgcccttggcgaacacggtgagcttgtctgaatcggtgctgtccttggcgatgatggacatgcgcttgcgttcggaggtgaacggaatctcgccaacgcgcgtgtagcgcttgatcttgcgatcggccttgaccttgcgtgcggccacgatcagcgagacttcggtggggtcgcccacgatctcccaacggccgttctcctcgcgtagttcgccgtcgttcgcgagcgtgccggccacaagcgtggcgacgacttcatcggccacaatctgggcctgctcggattcaggactgacgccaccggtcataaccatgcggccttccggcgcgtaaccggtgccggtgatctgcactgcgccggacggggtgaccacgcgctccacggtcatctcgttgcgggtcagcgtaccggtcttatccgagcagatcacggaagcggagcccaaggtctccaccgaatgcagtttcttgacgatggcgttgtgcgcggccatacgctgcacaccaagcgccagcaccacggtcaggatggcggccaagccttccggcacggcggccacagccagcgagacggccaacagcaaggaatcaatcacgtcatggacgtcgtcgaagccttccagtacggcgagcgccaccagcaccacgacagcgatgacgcacaccgcgatgccgaggatcttggagacgtaatccatctccttttgcagcggggttttctcatcttcggtggcggagagcatgtcggcgatcttgccgacctgcgtgttcataccggtgccggtcacgattgcgcggccggtgccttgcgtcacggaagtgccgttgaagatcatgttggcacggtcgcccagcgccttggcttcggtgagtgtgtccggcttcttaccgaccggcacggattcgccggtcagggaagcctcggcgatgcgcaggctggccgcgttgaccagtcggccatcggcggagactgagtcgccttccgcaaggacgatgatgtcgccggggaccacgtcggcggtgttgatgcgcatgactttgccgccgcgcagcaccgaggtctgcggggccgtcatttgggcgagcgcctcgaccgcggcctccgccttggcctcctgcatgtagccgagcacggcattgacgatcagaatcaaaatgatcacgatggcgtcgaacggcagcacttcaccgccttccgcgccgggctgcgcattggccttttcgatgaaccatgcgatcaccgagatgatggtggccgcgatcagcaggtagaccagcgggtcctggaactgggccaggaatttcttccatttcggtacgggcggggcggtggcgagctcattcgggccgaatttggccagtcgacgcttggcttcttcctcgctcaggccctgggatgggtcgacattcagggctttggccacgtcgtcggcactggtcagacttggatcagcttcccccaatagcgcttcctgcgcgcgcacttcttccgattccacgacctcgttcgttgcggtcgcggacactgcggattgatctttgagatcatccataatgttctccttggtattgccgcggagtagtcagccttgcggccgctgccgggttttctctcccggctggacgcacaggactgcgcggttatggacaccggcgcaactgctgccgatgcatacgattgctattattccataactgcgtggcgcacttggcgcacagcgtaatagcgttttgcctagaacaggcgacgcaaccaggcttcagccaaatcaggccaacactgcacgcattcgacgatgtgcgcatagaagccgttgccagcggtttccgcattggccagggacaggccgtggctgccttcggggaacaggtgtgcttcgatgctcacgccggcggcccggcaggcctggatgagcattagcgtattctccacgggctcggcttcgcggtcggaggtcatggcgtagccgccaccaggcaaaatcaggatggccgggcgtatgcggtccggttccatctcctcgctgttgtcggccacatagccaaagaatcgcgcctcgttatataacttaagaatcgtgagaatcaaagcaactcataacctaggaatagtgagttttacggcattatataacttaggaatcgtgatataatagctcataaatccttgaaaatactaggaatatgagcttaacatgtataagagaaaagtatacgaccatctacggcgatggaaagcagcgagcaagggtactactgcgttaatgattgaaggagcccgccgcgtcggcaaaagcaccgtcgccgaggaattcgcgaagaacgaataccgctcatacatccttatcgactggcagaaggctccgcaggcggtacgagactcgttccgcaacaatctggatcatttggacacgctgttcatggacctttccgtctattacggcgtacgcctgcatgagcgtgacaccctctttattttcgacgaagtacagctcttcccctttgcccgcagcgcggttaaacaactcgttgcggatggtcgatatgacttcatggagactggctccctgatctccattaagaagaatgtcgaaaacatcttgattccctccgaggaagaatcggtgagcatgtttcccatggattttgaggaatttctatgggccagaggagaagaactactcgccgatgcgatacggcaatcttttgcggacaggcgagcaatgtctccgctgctggacaacaaggcggaacgcctgttccgtgaatacatgctggtgggaggtatgccgcaggccgtagagcgttatctgggaacatccgatatgggcaatgtcgatcgagtgaaacgccaaattttgcacctgtacgctcaggacataaagaaatacggcggagattcgaaagaacgggtcaaacgtatcttcgatgaaattccagggcaactttccaagcatgaaaagaagttcacactgtcgtctttaggcgaaaacgcacgcgaacgtgaatatggcgatgctttcttctggttggatgaatcgttcctgatcaaccgctgcatgaatgccacggatccgcatgtgggcctgcgcctacaccaagaggactccacgatgaaatgctatatgggagacaccggcttgttagtaacgcaagtgtttgccgaccgcgcatacacgtcgaatgagttgtaccgcgatatcctgttcggcaagctggaagtgaatgaaggcatgctggtggagaatgtcgttgcgcagcagctccgggcctcaggccatcgcctgttcttctattcccgatattcccgtcaggcgaaggaccgcatggaaattgattttctccttatcggggagtattcaaatgccgccatgaaggccagggtctgccccgtggaggtcaaatcgacaaagagatacaaaacctcatcgctcgataagttcaagaataaattcgacagccgggtcggcatgcaatatgtgctgcatcctagaccaatgcgcgttgaaggagaccgcctatatctgccgttgtatatggcgcattgcttgtgatgattctagaacgtatcgcagagaatgattctcaataagaaaagcgtgaggattacgatgcctcaatcgcacatgcagagcgtcatatcagtgagatcccgccgttgcggaccatgtttgattgtgcggaaaagttcggatgcctcacacttttcttgacgggaattatttactgtgaggcattgcgcaggttggcggccatggcgcggtcgcgcaagcctttggtgagcttgagaccgagggttacggcgatcaggactatcgtgcaggcgatccacagcgttcgaccgccgaagttgctgatggtccagccaccaatcagcggcgccagcgcaatcgataccgaccacactacgttgtagacgccctggtacgtgccgcgtgccgacgcgggtgccatggcggcaaccgtagtggtggcgatagggaatgtgcccagctcacccagcgtccacagcactacggcaagcgcgaatccgccccaggaatgggccgcggcctgcaccgcatagccgatgacggttacggcgaggcccatcaccagcacgcgtgaattgcccatgcgcgagaacagtttcatcgcgggaatctgcagcaggcacaacataccgccattgatggtgagcagcaccgaatactcgcccagccctagaccaaggtccgtcatggcaatgggcaggccggaggtgctttggaagtacacaaggaagtagccgaacatcagcagggagaagccgaggaatggcgtatcagtgagcacgcgccgccaattgcgagacatggagcccttggcactggcagccggtgcggcatccgagtgattcggcccctcgacgccggcgaattccgcatgcgtaacactgcgttcgtcttcatggcgcaccgcacttggcaccgatacagtaattcccaaatgccgcacctcgcggaagaacgcaatcagcaatatcgtgacggctatcatcaccgccgcttcaacgtagaacatcagcgaatacgagatcttgaccagctggttggccacaatcggcccaatcgcgtacccaaaattaatcgcccacgattgcagtacgtacgcacgttgctgacgttcggcgggcaccacatccgcgatatacgcggcgatgaccgggctgggcagtgaggcgaacgcaccatagacaaacagggccgcgcctaaagccacggggtcagtgagcacggaaacgaccagcagggcagccgctgcgccgatttcgccgatgataatcatggattggcggccgaatctgtcggacaaggtaccgccgaacaggcagccgatgattgcgccgaagccgtacatggccacgactgtgcccaccacaccctcatcgaggcgcagcgcggaaaccaaatatatcgacaagaatgaggtcacgaagcgacccatccacagaatcagaatcgccaaccataatccccaatacagcagggacagtccgaatatcatgcgctgcttcttcactctcaataccttaccggctaccgacggcggaatagccgcgttttggcgcggggtgctgggacaatagcacctatggctatcaaaaaaggaccgaccaaggggtcgggtggcaagcatcgcaacaaactgaagggttacggccccactcccaaagccgaggaccgcgtctatcacaaggcgtataaggccaagaaagcggccgaacgtcggcagatggccgacccgcgtctggcagcccgccgtcgagtggacaagttcgcttcggcggatacttcggatctggtgtacggccgtaattccgtgctggaagcactgcgcgtaggcgtaccttcttccacgctgtacatcatgtctcgtattgaacatgacgatcgtactcgcgaaatcgtgaaaatcgctggtatgaacggcctgcacatgctggaggccgatcgtctggagatggatcgtatcgcccgctccggcaaccatcagggcgtgattctgaaggtcgatccgttccagtactcctcgctgaacgagctggccgatcgtgctgagaagaaggccaaggcaatggaggccgcgaattcggcggccgcccgtattgctgcgcgaccgctgttcattgcattggacggcgtgaccgatccgcagaacctgggtgccgtgattcgttcggcggccgcattcggtgccaatggtgtgattctgccggaacgccgttccgcttcagtgaacgccgccgcttggaaggtgtctgccggtgcggccgcgcatatgccggtggcgcgcgtggtgaacctgactaaggcacttgagggcttgaaggagcgtggatactacgttgtcggccttgacggtggcggcgataagctcgtcggcgagactggctttgaatccgatccgctcgttgtagtgctcggttcggaaggcagcggtttgggccgactggtgcgcgaaacctgcgacgcgattgccggcatcccgatcagctcgtctgttgagtcgctgaacgcttcagtggcggcgggtatcagcctgtacgcggtgtccaacgcacggcgcaaggctgcggcggagtgattgtcgcttgaggccgtaataggttgtacacacaaagaagcccctcaatttgaggggcttctttgtgtgatgggctcacctacagacagtccaccggattgtccgcttaatgactccacactgccgcatccggatcgtcatcggggttgtagccgtcgtcgtccgggtcgctgtaggtggattcgtcgtcaatgacgccggaatcggcctcttcgttaagttcggcgagtgccttggaatcaaggttgtagctcggcagaacgttgtcgatgtagctggtcacggcctcgcccatcggcacgtcgtggccggccttctccgccaggaaccagcgatggtcaagcacctcatggaagaactgagcaggctcgatctgggagcgatattcgcgcggaatcatacgcacggtcggctcgaacacctcgcgcatccaatcggtggccacgatttccagatcctcgccctcacgccacgtggaggcacggtaggcgtcaaggtcgttgagcagacgacgggcctggttctcctgcacgtcaaggccggtgaggcgcagcagcttgcggttggcgtagccggcgtccaccacgcgcgggcggaccagcacacgcttgccgtcctcggcggtcttcatttccagctcgtccacgtcgaagcccagctcgttgagcttgttgacgcgctgctcaatcttccacatttcgtccgggttgaacttgtcggtgtcggtcagagcgctccacagcgagtggtagcggtcgaccaggcggttgcccacctcgatctcatccacgtcgccgggcagcagcttgccggacgccaaatccataagttcgccgatgatgttggtgcgggccaagtcgatatcgtattcgcgctggccgtcggtgagctggacttgcaggtcaccggtctcggcgtccaccaggaaggcggagaaagcgtcggcgtcgcgcaggaacaggacgttcgacagggacacatcgccccagtagaagccggccaggtgcaggcgcaccagcagcacggcgagggcgtcgatcagtcgttcggcggtgtccgggcgcaggttgcgggcgaacagcgcacggtacggcagtgagaacttcaagtgccgggtgaccagaatcgcctccagcggctccccttcacgggtgtgacggccggtgaccacggcgatcggggtcacagttggcagttcgagcttctgcagtcgacgcaggatctcgtactctcgctcggccacctggcgcgtgatctccttcatggcgtacacctcgtcgcccacgtgcacgaatcgcacgacgtggcgggagatgcctcgcggcaggttggccagcaggtcctcaggccaggtggccaagggcttgtgccagggcagcgtgaacatctttgggttcgagctggcggcggtgattttcagtgcttgcggttccgct

SEQ ID NO: 2242 - DNA, 5516 bp, Unknown
  R51_24m  MAG No. k141_43971
cacgtaaccgttcggcaacacaccagttgaaggagcgacgatgactaccacactgttcaccaacgcacatatcgccaccggagaacccggcagcacggctgcaagcaccctgccattgcaggacattctcgtcacggatggcgtgttcaccgcattcggccccggactcgcgcaacaatatgaggctcagggtggtgatctggcggccattgaggtggtcgatctgggcggcaaacttgtctgcccaccgttctgcgatacgcatctgcaccttgattacgtattcacggcccgcaagcccggtgcggtgaatgaaagcggaaccttgtttgagggcatccagcgatggagtgagaccaagtccgacttgacggtcgacgagatcaagcagcgcgcgaaaatcggcattaagaaagaaatactgcatggcgtgcagctcattcgctcccatgccgatgtgaccgacccgaacctgacctcattaaaggcgctgctggagcttaaggaggaattgaaggatacggtcactctccagatcgtcagcttcccgcaggagggcatgtactcctacgagggcccgcatggcgaatcgggggccgagctggtggaggaaggactcaagatgggtgccgactgcgtgggcggcatcccccatttcgaacagtgccgtgagtttggcgagcattccatgcacacggtagttgagttggcttcgaaatacgacaagctcatcgacgtgcattgcgatgagacggatgatccgaattcccgttacgtggagctgctttcggcgttggcatataaggctggcattggcccgaaggtcaccgccagccacacctgttcgctgggatcggcggacaacgcctacttcttccacctgaccaagctgcttaaggcggcgcatatcaacttcgcctgcgcccccaccgagaacctgtatttgcagggccgtcaggataccttccccaagcgccgtggcatcacgcgagtcaaggagctcactgaggcgggtgtcaatgtgtcattgggccaggattcaatgcaggacccgtggtacccgctgggcaatggcaatatgatgctcattcttgattatgtgctgcatttggcacagatgatgagctttgaagaaatcgacgatgcgttgaagttcctgaccgtcaacggtgccactacgttgggcctgcgcgatatgtacggcttggaaacgggcaagccagcaaacttcattgtgctggacgccgatagtgtgttcaacgccgtgtatgagcgctgctcggtattgcgttcggtgcgcgccggccgcacgctgtttacccgcgaggagaccatcgacaccggactcgccctgctgcaataacccgacaacaaacagtagttccccttgacaggggagctatcgccaaaggcaactgaggggtagaccaaaaacgtgcacattatgtgtgcgtaggtctacccctcagtcagcttcgctgacagctcccctgtcaaggggagctttgctggtatgcgctagctacgctatcgaaacggactacttctgcggagcgtcaccggaatcggcgggagcggattcggctggttcagtggccggagtggcgtcggctggagtctcgccatcagtgggggcaccggcttcggacgaagtttcggcatcggtggcggcaccgtcttcggcgggcttatcggcggcggccggctcctcgaacttctcccccttgaaggtgaattcgccgaggataccctcgccttccgcatccacaatcacgcgctgaccgtcttcgagatcgcccatcagaatcttctcggagatggcgtcctcgatgtcgcgctgaatcacgcggcgcagcggacgggcacctagcagcgggtcgaagcccttctgcgcgagcaggtccttggcggcgtcggtgagttcgagcgacatgtgacggtcgaacaggcggtcgttgagctgcttgacgtccagatccacgatctggcgcacctgcggctcggtgagctgcttgaagacgatgatgtcgtccagacggttcaggaactccgggcggaactgctgcttcaattcggagctgacctggtccttcatgcgctggtagctggactcgttgttagcacccaggttgaagcccgtgttggcggccttggcgatgtctcgcgtaccgaggttggtggtcaggatgatgatggtgttcttgaagtccaccttgcggccctgaccgtcggtcaggtggccgtcatcgagcacctgcagcagcgtgttgaagatgtccggatgagccttttcgatctcgtcgaacagcaccacggagaacggcttgcggcgcaccttttcggtaagctcgccgccctcctcgtagccgacgtatcccggaggcgcgccgaagagtcgcgaagccgcgtacttctcggagaactcggacatatccacgcgaatcagcgcgtcctcatcgtcgaacaggaattcggcgagcgtcttggccagctcggtcttgcccacgccggtggggccggcgaagatgaacgaaccggacgggcgcttcgggtccttcagacccacgcgagtacggcggatagagcgggacagggcggaaaccgcctcgtcctggccgatgatgcgcttgtgcagttcggcttccatgttgagcagtttcttggactcggcctgagtcagcttgaacaccgggataccggtggtggagctgatgacctcggcgatcacgtcctcgtccacgaccatcttgacgtcggactcgccttcgcgccaggagtcttccttctgcttgcgatcggcttccagcttctcctgcttgtcgcgcagttcggcggccttctcgaagtcctgacccttgatggcctcgtccttgtcggcggcgatcttggcgatcttctcgtcgagttccttgagctcaggcggggcggtcaggcgcttgatgcgcaggcgtgcaccggcctcatcgatcaggtcgatggccttgtcgggcaggttgcggtcctggatgtaccggctggacagctcggcggcggactgcagcgcgccatcggtgatggtcacgtggtggtggttctcgtaacgggaacgcaggcccttcaggatctcaatggtctcggcgatggtcggctcgtgcacctgaatcggctggaaacggcgttccagagccgcatccttttcgatgtacttgcggtactcgtcggtagtggtggcaccgatggtctggagctcgccacgagccagcatcggcttcaacatgtcggaggcacccagcgcgccgtcggcggagccggcgcccacgatggtgtggatctcatcgatgaacagcacgatatcaccacgggtcttgatttccttcagcaccttcttcaggcgctcctcgaaatcaccacggtagcgagaaccggccaccatggaaccgaggtccagcgagtagacctgcttgcccttcagggtttccggcacgtcgccggcctgaatcttctgggccaagccttcgaccacggcggtcttacccacgccgggctcgccgatcagcaccgggttgttcttggtgcggcgggagagcacgaccataacgcgctcgatctcgttggtgcggccgatgaccgggtccagcttgccttcagcggcttcgacggtcaggttgcggccgaactgatcgagaatggcggaaccggacttgttctgcttgtctgtcacgccgccggcgttggccagatcgcccttgccgtcaccggtgccggtgccggagttgccgcgaatcatatcgatggtcgcgctcctgagctcacccaggtcgacgtccatcttgatgagcacctgggtgcccacgccttcgccttcgcgaatcaggccgagcaggatgtgctcggtgccgatgtagctgtggcccagctgcagggcttcgcgcagcgagaactccaacacctgcttggcgtgcggagtaaaggggatgtgcccgttcggagccgcgttgcccttgccgatcatttcttcaacctgcttgcgagtggcatccagctccacgcccttcgaggcgagcgccttggcggccacgccctcaccttcgcggatcaggccgagcagcaggtgttcggtgccgatgtagttgtgctgaagggccctcgcctcttcctgcgccaacacgatcacgcgccgtgcacggtcggtaaaccgttcgaacatgcttgtccttcctcaattgacattccgtcttactctaccgattcacgatgacgtttattcatcggattccatgaattgcgccgtaagaggataagaaaacgatatgctggttctagattcacccgtagtcgattacaaggaggctcgaaatgagtgaagcgacaaccaagcccgacatcgttgtcggcgtggatggttccgatgaatcctttgccgcgctaaagtgggcgcttgaggaggcttcgttaaccggtcagagcgtcaacgccgtgtttggctggacgcattcgtgggatatgggttccgaaccggacagcgacgaggcctgggccaaggtccgccacgacatcgccaacgagctgcgtgtgtgggtcgacaaggccgctgcaggcatcgacttcgatccggcgaatctgaagctcacctcggtgaaggcctccggcacttcggccctgctgcagatcggccatgatgcgcagcagatcgtggtcggccgccgctcgctgagccgtgtggcccgctggttcatggggtccctgtccgcttcgctggccgaggccgccgaagtgccggtgaccgtggtgcgcatcgccggcagcgaggatgagaccgtgaccgatgccatcgccaatgccctgacgccaggagaccagccggtccactacacgcagccacagcccgtggtcgaggtggctcgccgcccggtggtggttggtgtggatggttccgagacttcccgccgcgcgttcgacttcgcgctggaaaaggcacgactgcacgacgcgccgctgcatgtgatgttctgctggcagctcaaggatttgggcgttattccgggctatgagaacgccgtggcaccggtgaaggtcggtcagcgccgcgccgaggagattctcgccgggctgatggccaaggccgagattcccgatggtgtcaaggtcagcgcgaatgccttccatattcccgcgtccaaggggctgattgcggcatctcggtacgccagccatctggtggtcggttcgcgcggcctgtccggtctggacgcgcacttcctgggatcggtgtcccgtcagatcgtgaacttcgccgaatgcacggtgactgtggtgcactgattcaccgaaatcggcatggagtgctaacgcacgtctcggtgatgggcttgcagggaggaattctttattcctgcaaccgttgtagatgactttgttttagcttgtcgctagagcgaagtcatctgcatggcctcgttgccgaggccagctccaagactcacacggcttacgccgtcgcttggttcgcgtttcacaggatgccgcgttgcccgacg

SEQ ID NO: 2243 - DNA, 8177 bp, Unknown
  R51_24m  MAG No. k141_44500
ccgcggcggcggcccgcgacgcgatgctggacaagtgggaggcgagatatcccgcgatccgcaggctgtggatggacgcgtgggaacggttcataccgttcctggactatgacgtggagatccggcgcgtgatctgcacgaccaacgccatcgaatcgctcaacgcgagattcaagcgctccattcgcgcccgcggccacttccccgacgagcaggccgcgctcaagtgcatgtacctgaccgtccgctcgctggaccccaccggcaagggacggatacgatggagcgcgcgctggaagcccgcgctcaacgcctttgccatcaccttcgccgaccgctggccaagcgagggaacacaacaatgaaaacgccagttacacacttaacgagacaggcccgcgtctgggccggtggccggcgatccgctggtgccgctggtgccggtgctggttgaagtcgattccgacggatctttttgcgtcgagccggtgccggtgccgttcgaaccggtctggctgccgccgacgccttggctggtcgggtcttcggtggtcggattctttgaggtgccggtgccgttcgaaccgttggcggtgccgtcggttttcgaatccgaggcgccggcgccggtcgaacctgaggtgccgttggcgtcgaagtcggtggagggggcgtcggttttcgaatccttgctggttcccttcgaatcatcgccggtgcccgtctggggcagagcgttgttctgatcgggggtgcccgttcgcgtgccggtgtcgttgcgcgcgggcgtggtcgtggtgggggatacgagattgtccgtgccgcgtccctgcgtggccagcatcacgacgccggccgtcaccgccacggcgagcaggccggacaccaaggtgacgatcatggcggtgtgcttcgaagcgcggaagcgggacttgcgcagctcatcgaccgagtacgtcctgccgttcgcccggctgaacacgatttcacgcggtctgcgtgtggaggaagcatcatcggcggtcacgcccgtcgccgtatcgggctcgtcccgaacgtcggtccggctgccggccgttcggggggtgccgccatcggcatcgccgttctcggcgtccttcgtgatcccgctgccggaggacgaggccgattggagtttttcgccggaggcggtgagcacgttctggtagatcttggtggccacggcggagacgacgtaactggccgccgctccgatcaccgaaccgccgatgccgatcttcgatgcgagcaggaacgaggtgacggcggcaagggtgcccgccacgatggatgagagggagattccttcaaaaaacttcttcacaatgcacgaccgtagggtgtcgggctgacaggttgcctgagactcgatggaagcggggcgaggcctacacgagaccttcaaaatcggccttcgtacaggtccgacacgccctgcggcgcacacacgtgcgtttcgcgtcgccgcaggccgcgggacatcgtcaattacgatgcagcgactgcccggtcggtctgattaccgacatcagcacggcgacgaagatcagcgcaaagcccaccagcgaagtccacatgattgtctcgccccagaacaacgcggagaacgtgacggcgaacagactttccgtacacatgatgattgacgcctgcgaggcaggcacgtgagccagaccgatgttctgcatgatctgggcactcatcgtggcgccgaggaacagatagagcacgctggccactactgagggtgccagccagctggcgttcggcatgggttcggtgaacaacgcgccgatgatgaacaatacgccggcaacgccgaactgcacaaaagtgacggcgatagggtcgaagcgtttggtgtagacaccaaggcaggtcagattgaacgagaagatgacggcggttgcgatggtcagccagtcgccggcgctcagagacagcgaaccgcccggcttcagcgagacgaagccgacgccgatcagacagatcacgccggcgaccagattgatggccttcgggcgggtttccgaaatgatccacgtggcgaacggggtgagtacgcagtaggcggccgtcaggaacgcgctgcggcccggttcaatggtctgcaggccgatggtctgggtgaccatcgtgccccagtaggtcagacccaccacgagcgccggcacaatgatcttcggcgtcagatacggcacgatgtgcttatggaacaaggccagcatgcacaggcaggcgcctatcatgcgcagacccatcagccattggggcggaatcgcctccatggcgaatttggcgagcagataactgccaccccataatgcggcgcagcccagcaacatgagtcgggcgagattcgggggaaagctgcgggaccagcggctgcgcagcttgctgaaacgttcgaccaaacccatggtgcacctcaggacagttaggaaaacttgtggctctctcggctcacagattacgggaactaccggccaaaatcgaccggtcgatgggcgtcgggtgtgtgacaggtgtgtggctggtgcgcggccggggcgcggcatcgccaagcaggtaagaaccggatgaaagctgtgcgaaggtgaggttactcacagcgaacatccgggctagtcgcgctcgaaaccggtactctggaaagagtaaaaaaatacgttgtccatagcaatcatgaaaggattcgacatggcagtcattactccggaaatcaaggaattcatcaagaacaacctcggttggatcaccaccgtctccaaggacggcgaactggacctcggcccgaagatgtccctgttcgtgctggacgacacgcacatcgcctaccacgagcgcaccgccggccagcactacgagaacctcaagaacggctctccgctggtcatcgccttcgccaacctcgagaagaagcagggctaccgcttccgcggcaacgtggtgctgcacgttgacgacgacatctacaacgagcaggtcaagatcgccgaggaaaagggcaccaagaagccggccgtgattccggttctcgaagtcaccgagatccagaaccttgcctccggtccgaccgccggcaagaccatcgccaaggactgattagctgacgtattggtggcttcctcgtcagagggagccactttttcgcttttcagtgcgcagtactaggtgatggcctttgaggtcggtggtggcgaagaggtaggtgttgccgctgtccttgagtttgagttttttgcgtagctgggccacggttagggggaaattgcgtacggagatgttggcgtgcgtgagaccggccaatagctgcttcagttctctcttgttcatggtggcgatggattcgatgacgaatgatctgcctggaaaatcggcaataggttcggccgccacgaacaggtggctattcgggctgatgtgatgcacggcgaagcgctgttcgagaacagcaaagcacccggccttcatgattgaggcgttgggttcgtaaaggtacttccaatgcgaggaatcgaagccgttcgcgctttcctcagccgggagatcctcggtattacaggtattgcatgcaactaaggcagaatcgctgataggggtgtgattgtcgctattatcgccggccttgtacgacagcacctgcccgtcattgacgcataccacgagcggtgaggcgcaacggccgcgccccaacaccagcaacaattccttgcattcattaccggtggagacgatatgcacctcgtgcaccgcgccggcgaaatccgtaatggtcttatgccagtcgagcatgggggagagcttgaccatgaccgtcggtgccttggccagcagcgtatccttcagggtcagcacatccggcgtgcaatcggcaatcgcgtaggtacgcgagccatgatcgtcacggcgggccggatcgaggaagatcatggaggctcggccaagcgtatcaagcactgctgttgaatcatcattgatgatttcggcgtggccagggccgagtatcgggaaattatggcgagcgatatcacataaagtggattgttgttccacatatatggcacgattgaacattcgggacatgtaagaaaagtcgacgccgaaaccgccggtcagatcgactagggatgtcggggaatcgtcgtcgactgcttccttggccaacaatcgctgtgctaaccgggctttgtattgagccgtgaactggctggaacattgttccattgggacttgcggcgggaaaatcagcccatcatgggacgcccagtcaggtagcttgagcgaagcgcgctgccagccggcaatctgctccagcgcgaacggcacatccacgtcgccatcatgcttggcgtgcaaggccacatcacgcacatcttcacggcggtgtttggcgatgaacgcccaagtcgactcagaaatctccatgccgccattctaggggttgtgctgagatgagtatgaaaaaaccgcaagagaacgaggtggcgaaaaccgatgatcgatgaagtgatgatgctgcgccatggccgtacgcaatacaatctcgaacatcgcttgcaaggccagatcgatgtgccgctcgacatcgtaggccaatggcaggtcgaccagaccggattcgcgctcgcttcacggtactactgggccaaggtgaaccggcttgccgagcatcccgaagccatcgcccagcccggtcctgacgccgccgaacgcactgatacgcgccagttcgaggaggcccccgccgccggccggcgcatggtggtgatggcctccgacctgttccgtgcccaacagaccgcacacgccttcgccgatattttgggattgccggtcacctgtgaccaacgactgcgtgaacgcagcttcggcgagtgggaaggcatgacccgcgccgaaatcaaagccgtggcagccgacgactacgcctcttggaaacagcacaccgggggcgaaaccaagcatggtgtggaaagccgtgccgccgtgggccagcgaggtgccgatgccgtgcgcgcactggtcaccgactccgcctattcagacagcatgcccaccacgctgatgctcgtcacccatggctcatggattaccgccaccatctccaacctgctcgaactcgacccggacggcatgaacgcactcggcggcatgcgcaacgcctgctggtgccggctcaaagtgcgccacagcgtcaacggcacccccaccgaacagcccctgtgggagttggaggaatacaacaaggctcccgccatcgccgacagcgccgactgggagaacgggccgaccgatctgcgaggaccgcacatgccgagttggcagccaatcgtctggtgacggtcgctatgcgaaaccccgctcgcaaattcgaacggtgggtctagactaatctcggtttggaaccgtacagcgatagaacagtaggaaagcgcggaaggcgggtgaggcgacatgctgagaatcttcagctcaatcaatggccaagtggagcagatcgagaaaccggaaaacggctcctggttatgtttgagcgaacccactgatgtggagctcgccaccgtcgcatcacagaccggcatcgacctggccgacctgcgcgcccctttggatgacgaggaacgttcacgtgtggacgtcgaagacgattacacgatgatcatcgtcgacattcccaccgtggaagagcgtggcggacgcgactggtacgagaccatcccgctgtcgatcatcgtcaccgaaaacctcatcatcaccgtctgcatgcaggacacgcccgtgctccacccattcatggaaggcacgatccgaggcttcaacaccttcatgcgttcgcgcttcatcctgcagatcctgtaccgcaacgccacgatgtacctgcgttacctgcgcatcatcgaccgcgaaagcgacaagcttgaactgaagctgcgccactccatgcagaaccgcgagatcgtgatgctcatggagctgagcaagactttggtgtatttcaccacatcgctgaaatcgaacgaaatcgtgatggagaaactcaccaccctgcaacgcatcaagcaatacccagacgacgaggacctgctcgacgacgtcatcaccgaaaacaagcaggccatcgagatggccaacatctacagcggcgttcttgcgaacatgaccgacgccttcgcctcgatcgtgtccaacaacctgaacaacgtgatgcgcatcttcaccatcatctccatcaccctgtccatcccgacgctgattttctcgatgtacggcatgaacttcgacggcggcatgatgggcatgccgttcaccgacaagccttggggcttcctgctcatcatcgtgatctccatggtgctttccggtgtggttgcctggttcctcacacgttcgcgcatgttcaagtaaggcgtttgacggttatgcaccactggtcatcgttcgccagccgtagcgtgctccgcgcccgccgcccgatgcggcgcggatttcgctcccggctgatggcaggattcgccgcggcctttggcatgatattgccattgtccggtctggccggttgcggccaaattcaagtcaccaccgtctccggagcgccggagggacccaccatcgccattggggtcgcagccgacgaaccatcggtgggagcatggcatgacggcacataccagggcttcgacatcaccatcgccaaatacgtggccgccaaactcggctatgcgaacaagcagatcgtcttcaagcaggttcgccccgaaaaccggcgctccatgctggacaatggacaggtcgacatggtcgtcgcctcttggcctatcaccgatgggtccagcgcgatcgttgattttgccggaccatacctcacgaccagcgtcggtttgctggtcaggtcggatgagcgtggccgattcaccaatgacgcaggttcggtgggcgacgtaggcgacggcacggtgtgcgcagtgaaaggtgacgagacagtcggcatcttccgcggcaaccacccgcaggctcggattcaggagcgtagcagttatgcgcagtgcgtcacggccgtgcaagtagggtcggcggatgccatagcctccgatatggcggtgctttccggtcttcaagcggccaacgggccccagtatatggacgtgattgcggacaagggcgaggtcagttatggcatcgccgtgagtcaaggcaccagccaattggcgcagaaaatcgcggaagcattggaagacatggttgaggatggcagctggacggccgccaaggatacgttcacaagccaaacaaagctcatggtttcgctgaacggtgaccccaaagccatcgtctcggatgctgaataacgattgacgacgtgtccagttgcgaggctaccttgctgatttatgagtgacaacgagaagagcacgcaaaccgaagagcccaacttccgctacaacgccgcactggcgcaggacatcgaaaacaagtggcagaagatctgggatgagcaaggcaccttctgggcggccaacgtcaacggcgatttgaaggacggcaagggccgcaacgccgaggggcgcaccgcctacttcgccatggacatgttcccgtacccctccggcaagggtctgcatgtgggccacccgctgggctacctggcctccgacgtggtgagccgctaccaccgcatgaagggcgagaacgtcctgcacgccatgggctatgacgccttcggcctgcctgcggaacagtacgcagtccagaccggccagcatcctcgcgtgaccaccgaggcgaacatcgccaacatgagccgccagctgcaccgcatgggcctgagcttcgacaaacgccgcacgttcgccaccatcgaccctggctacgtgcgttggacccaatggatcttctcgcgcatctacgattcctggtacgacgaggacgccaccaacccgtccggctccaagggctccgcacgcccgatcgccgagctcgtggccaagttcgaatccggcgaaaaggccattccgggccacgagtccgatggcaagcagtggtccgacctcactgacgccgagcagcaggatatcttgaacgacttccgcctggcctacatctccaagtccccggtcaactggtgcccgggtctgggcaccgtgctggccaacgag

SEQ ID NO: 2244 - DNA, 7046 bp, Unknown
  R51_24m  MAG No. k141_46050
acgttccttcgagaaccactggcggatcttgtttcgtgccttcgggctcttgacgaagctcagccagtcgcgcgaaggaccggcagtatcggacttggaagtcaggatctccacggtgtcgccgttgtcgagcgtggtgtcaagcggcaccaaacgtccgttgacacgtgcgcccatcgtgcgatgacccacttcggtgtgcacggcatacgcgaagtcgacgggcgtggcatgagcgggcagggatacgatcttgcctttcggcgtgaacacgtagacttcggacgagccgagatcctccttgagcgaacccagaaactcgttggagtcgggggtttcgctggtccaatcggcaagctgctgaatccatttgagattgtcggcttcggaaagctcctggttcttctcgtcacgcctgcggtcggacttgtccggcgagctcagggcgcggccggcctggccgttttccttgtatttccagtgcgcggcgatgccgaactcggcgcggcggtgcatgtcccaggtgcgaatctggatttccaccggcttgccaccggggcccaccaccgtggtgtgcagcgactggtacatgttgagcttcggcatggcgatgtagtccttgaaccggccgggaaccgggttccaccgcgcatgcacggcaccaagcgccgcatagcaatcctgaatggtgtcgacgatgatgcgcacaccgaccaaatcgtagatgttcgcgaaatcatggccgcgcacgatcatcttctgataaatcgagaagtagtccttcgggcgtccggtgacgtatgccttgatgttctgctcgtcgagatcctcgttgatctccgccagaatctgcttcaggtacacatcgcgctggccggctcggcgagccaccagcaccacgatctcgttgtagatcttcgggtagagcactttgaagctcagttcctcaagctccgtcttgatggcgttcataccgagtcggttggccaaaggcgcgtacacgtcgagggtttcacgcgccttcttctgggcggacgtggtcttcacatagcgccaggtgcgggcgttgtgtacacggtcggcgagcttgaccaccaaggtgcgcacgtcgcggctcatggccaccacaagtttgcgaatggtttcggcttgggcggagtcgcccacttcaagctggctgagcttggtgacgccatcgaccagaccggccacggtgtcgccgaactcggcacggcattgatccaacgtgtagtcggtgtcctccaccgtatcatgcagcagaccggccgccaccacaatcggccccatgcccagatccgcgagaatctgggaaacggccaacggatggatgatgtatggttcgcccgacttgcgccgttgcgtgcaatgctggatgacggcgcgccggtacgcgcggtcgaggatggacaaatcctcaccgggatggtgggacttgcacactttcttgattggatccagcggattgagcggatcggcactgatctcacaacccaacttacgggcggcgtactgctcgccatcaatctctgccatgccagtcacctccctcgtcatgaagttcattgtaaccgcgaaccggagccttatgcatgcacctgttcgccatcattggttccgcaaccgtcgttgccgtcatcaccttggtcattcaaccggcccaatccggtcaggacgccactcccgtcgaaccgaacccacgttcggcgcgatcggatccgggcagggtttcagccgggatgaaccgggcctcaacataccgctgaatcaccaattgagcgatgcgatcgcccggatggaagacggcggtgcgttccggatcgaggttgatcagcggcaccttgatctcgccacggtagccggcatcaacggtgccaggcgcgttgagcacggtgacgccctgcttggcggccagcccggaacgcggatgcaccaacgccacgtagcccgcaggtagggcgatggccacgccggtgggcaccagtacccgttcaaaaggcttcagcgtcacatcgacggtggtgatgaggtcggcaccagcatcgcccgcgtgggcatagtgcagctgggccggatgttcggggtcgaggctcttgaccaggacctcggtggattcgggctcgttgtaggtctcgtcgaacgccatcaggcggcgcactcctcacacaccggctggccatcctcgtccgtgtaggcgagctggctacgatgcttgaccaggaagcactgcgagcagatgaactcgtcaccctgcatggggatgacggtcaccgaggaatcctcgttgctcaaatcggcgcccggcagttcgtagtcttcggcgatggcgttctcatcgtcgtcgatgtcgctcgaggcgttctgcgaggacttccccagcgcctgcagcgattcctcgtcctcatccttattgcggggggaatcataatcctgagccatcatggtcctttcgtcgtctttggttcgtaagtcgatatatatagcacggtcagcgccgtactcgcccataggatacacgatttgaaatactcgtaaagttcgacacgtggggcatacttaaaagaagtaatgtctttgcgacggaaagtggtgcgaatatgccagatgatcggcttgaaaaagcccgtttcgtacgcgtgagcaagacgggggacctcgtattctccattggcggcagggaaatggccgtgagcgtggacgacacgctcgaacgggcgattcttgaggccaagcaggtcagaagcgagatgcgacaggccccccagccgcatcagcagtccactttgccgatttcccagatacagtcgctgattcgcgccggtgccgatccggcccgtgtcgcggagaaatatcatctgagcgaaacgctggtacgtcgtttctccatggccgtggagaccgagaaacagtacgccatcgaacaattccttgccgtggcggcacccaaagacagcagggtgcgcaccatcagcgaactggtggaacgcacgctggcctctgctggaatcggcatggaatcagtgacctggaaatccacccggcgcggacttgagccttggcgcatcgtggcgatattcacttccgcgggccgtgagatccatgccgaatggacgtggaatatgcacgacaattccgtgatgagcctgaacaatgccgctcgaaaactgctcggcgaacagaatccggaatcagccacggattccaaactcaagccgacgattcctgaactgcccggcgactccgtacgttccgcgcgtatcgagcgcgccgtgtctgcttgggcggcgcctacgccttcgattccggccgcacggcctgccgcgatccggccctccgtcacttccacaggttccatgcccccggtggacctatccacgtccatctcaccggccacgaaccaggctcatgacgctacggcccccagcccggtctcttcgcagaccgccggacctgtttcgtcatctgccgcaggattgcagcaatcgcctgccacggcaccagagcagggttctgacaatatttcggacgagaccgtacggcgtggccccaatgcacagctggtagccaccgagcaggagcgggcggccgaatccgccgccaccaaacacgaggcaccagccaaaccggccaagcgtaaatcaggacgttcggccgtaccaagctgggacgagattctgttcggagactgaatttccgaatcaggccatatcgatcaggcagggaatatccatttccaatgccgtttgggagccatgcacgctcggcaggtgggtggctttgtctccttgcgtacgcgaatcgacgagggtcacggctcccgctgcctgcacgaccacatcgccgagcatcggccggactcgctcgcagaccggtccaaacaatccgtccgcgatggcctcatccctggtccgcaccaaggctcggtcttgcaggtaatcgcgccaccggcaagctatatcctcaggtcgttcatccggctcggcatacagcatcagcgagcgcggctctcccccgaccagtgacacgcctcgggtgagctgcggttcaacggcgatgtcaatccgctggcccatgtcggtttgcaccatgccgtggtcggctacgatgacgatcagcgtgcctttgggtgcgctgcgtttcaggagcgcgagctgggcgtcgatatgttcgaatgcggccacccagtgttcggaatcccacccgtaattgtggccgactttgtcggcgtcacggatgtacaggtaggtcaggccgggggtacgggaggcacgtgaggcggccagcacacgatcgcgtggggtgacgttgccttgatagtcggtgcctcgcaatgcggcttcggtcaatggcgatttggagaacttgggcaaccccgagcttgtgacgcgcacctcttgagccgcaagtttctcgaacaccgtctcctcgcgctgctggtcgagcggatcgaccatgggtggcacaggaatgtgcggattggctggtttgggtgccagcgcgtctttgaactggatgagttggatgagcttatggctggcgggttcgagctgcgtatagcccgccattgcggtcagtcccgggcaggttccggtaccgaatgcggccatggccgccacagtggtgcttggagcgcaggtggcgatgggacgctgattggcgcgttcgttcatcagcgaacgcagatagggcgcgtggccgaggcgcatggcgaggttccagaagcccaggccgtccacgagcaccacgatggccgattcggcgtcgggcagtcccaacgcgcgctggcaggccttgggatcggcgtggaccttggtgggagtcggatgcccaatcgcggcggacaaggcgggcagcacggcggacaggtgcagtgctcccccacgccgatcggccggggcgtcatccccatagcccacagtgggcaccagccgcagcaactcgtccatatccggcgtctcaacactcatagttgcccattcaagtagcacccctccccttggctcagtgcgcagagaacggttctcaataacaactgtgcgccccaacgcacataatcaaacaaacgcacatcgactgaaacgctggaatcacgccattttatcggcaaacatgtgcgattggcgcaccgaaaccagcgcacagttgttatcgagaaccgttctctgcgcactgtttcgcgccctcccgctaatatgggggcgttcgaaagggagtttcatggcatcacaccgcaaaccgtccgcgcaaacctacgatccgcgcacggtcaaggagcatatcgtcgagacgccgctgaacgaggagatgagcaaatccttcctcgagtatgcgtattcggtgatttacgcacgcgcactgcccgatgcgcgcgatggcttgaagccggtgcagcgccgtatcgtctaccagatgggcgagatgaacctgactcccgaccgcccgtatatgaagtccgcccgcgtggtgggcgaggtgatgggcaagctccatccgcacggcgattccgcgatctacgaggccatggtgcgtttggcacagccgttcgcgatgcgtctgccgctggtagacggccacggcaacttcggctcgctggatgacggccctgcggcctcccgctacaccgaggccaggcttggcccggcggccctcggcatgaacgcggatatcgatgaggacaccgtcgacttcacgccgaactatgacaacaagctcaaggaaccgaccgtgctgccggccgccatcccaaatctgctggtcaacggcggctcgggcatcgccgtgggcatggccacgaacctggccacccacaatctgggcgaggtggtgaacgccgccaagttcctcatggcgcattcggacgccaccctggaacaactgatgcgttacgtgcccggccccgactggcccaccggcggcacgatcatcggccgcgacggcatccgtgaggcctatgccaacggccgtggcacgctcaccacgcgcgccgccacgcatatcgaacatgtcacggcccgcaagcaggccatcgtggtcaccgagctgccgtacatggtgggcccggagaaggtgatcgagcgtatttccgacggcgtgaagaaccgcaagctggaggggatttccggcgcgttcgatctgaccgatcgtcataacggcacgcgtatcgtcatcgagatcaagaccggtttcgacccgcatgcggtgctggtgcagctgttcaagcacacgccgttgcaggacaattttgccatgaacaacgtggcgctggtggagggccgcccgcacacgatgggcctgaaggagatgcttcaggtgtgggttgaccaccgccgtgtggtgattcgccgccgcagcgaatatcgcaagaagaaggcgttggagcgcctgcacctggtcgagggcctgctgctggccatgctggacatcgacgaggtgatccaggtaatccgcacctcagatgatgcggatgctgcgaaaagccgtttgatggttgtgttcgacctggacgaggtccaggcccagtacatcctcgacctgcgtctgcgccgtctgaccaagatgaaccgcatcgaacttgaggccgaacgcgatgacctgaagaagcgcatcgaggagctgacccgcattctggcctccgccgaagcgctcgaccaggtggtcaccgacgagatggacgaggcggtcgccaagtggggctcgccgcgtcgcaccgtgctgctggacgccgacccggatggcactctgacgccggtcgtggcgcagggcgccggggcttcgggtgtgtccaagtccgcgctcgaagcggtgaaggccgccaccacgatttcctccgccgaagccgatgtggccgcagccgcagccgcagccaagaagaccggcgaacagtccgcgctgaccggagccttgaagatcgaggacgagccgtgcgtggtgatgatgagcgccaccggtttgattgcccgtaccacgccaagcgcgatggacgtgttcaatgtacggtccacatccgatgaacgtctgcgagacgatca

SEQ ID NO: 2245 - DNA, 22292 bp, Unknown
  R51_24m  MAG No. k141_46693
cgacagccaaaggagcaccggagcgaccaccgcaattgcaagaatcgccgtgcctttcagccaatccttgtcatttcgtttccagtggaatgctcgccaaatgaaccatatcagcatgggaatctcatacagcgacagcaatggcaaaccgatgaaaaccaggtcgaagcccgcggcgcaggctccatcgcatcccatcatgaagaagtcctcgccgttgtgtttcagtgcgtttggaaataacggtttacggcgtcttcgagctgctcaggttgctcaataatttcgtaggcgccgtgttcctccatctcgccggccggagcgtagccccagcggcagccgatagcgtccaaattgcaggcgtgggcgccgtcaatgtcggtgtagcggtcgccgatcatcacggccctgtcccccgctgcagcatcaaaaccgattttgtcgaagcagtaccgaatcacctgatctttgtccagacgggaattgtctttggaagcaccatagatgccgtccaacagttcggtcaggtggaaatggtcgcagataggcatgcactggtattcgggcttgcagctggccagtgccaggtagtaaccgtcggcatgcagtttgagcagctgttcacggatgcctgggaatacgacgttcaccagtcgtccgggcaccttgttgccgggctcgttcggatcgtcgaacacggcacggtctccgtagtagctgcggtagatgtccacggcccgatccagatcttccgcaggcacatgattgcgacgcagagattcaataatcgccggtccgatgaagcgtcgcagttcggcggcgtccggaaccggtcgaccgatctcttcgaaggtcttgatgacggagccgataatgccgccgtcggacttggtaagcgtgccgtcgagatccaacaggaccactttcatcggatgctgtgccattgagattccactcccccttgttcatgtcgactgctttgaatggtcgtcaaacaatgcgacttgttccaacaatgattatgcccagtcgggatgactgggcatcaagttcacgtgttgttcagtaggagatcactcgtagtcgggaatccaaccgtcacggtgcatttgcaggcgcttttcgagcagggtggccagttcctcttcgctacggcgttccagcagcatgtcccagtgggtgcgggtgggtttgctgatttcgtcgccctcacggtcggcgtcgccctcacggtgggccacggaaccacaacggcactcccactcgtccgggatttcggcaccctcggcaaacggcaggatggtgcggtggcccttcgggcatacatacgccacatcgtttcgcgcggcgaaatcgacgttgtcgtcggactccagcgatttcgctccgatgctcatgcccctgaggctacgttctgccatatcggcatcctccttgaaagatctttaaccctactaatttacgcaacagttcggacttggccgctattccaagcttccgacgtcggctgacaaactcccgtcaaacagccccgtcagtccacgccggagtaggccaccacgccacgattgacccggtcggccgcttcgtgggcgaggcctgccagccgctctcccccgtcgaacggcagcggctgggcgacagcaatctgctgcagcacgtcagccagtcgtttggcagtgcgcacgaagtcgccgccggtcatgtcggtgccgtacaggcacgatcccagcgaaccgccatccgcccattcatacatgatgtcgagaatgccgaaatccggccgctgcatctcgtccagaccgtgatcctcgcacaggatatcgatgtcttcacaaatgcccttgagcttggacgaagcgatggcaatgggcccggagatgccgcccgggtagtgcctcggttcgccgtctcccccgcgtctggcctcgtataccagtgaagagagcacagcggccagtccgttggcgtcgagcttgtcgaacgtgccggcgagcagcgcctcgcacagttccaggtcatgttcactgtagatgcggcgcagcagcagacctttttcagtcaacgtcatgtcaatgtggccggccgcattgacatgacgttcgaggtaaccaagcccggtgagaatatcgcagatgcaatcgaactggcgtgccacggacccggtgcgggagtcgtagcgatcggtgacgcgctgcagttctcgagtctcgcgggcccagcggtggccccatttgaggtgttgctggaggtccgggcagttgcggcatggatgctcgtgttccgccttgcgcaaatcgcgaatgcgctggtcgaggttctggaaagcgcgtgaacgctcctgatcggtcaggaacacttcgtgcttcagtttgcggcggccttccttttcgatgtcgctcagctccatacgcagggtcatgaactgtttgaagtcgccgtgttcgcatgcgaacgcctgttcgtatccggccagcgcgttcttcagtgtgttaatctgtgattccagctgccaggccgattcgttggcctcccactgggcaaacgactggtccagggtgacgcgcgcggtctcgtagtcgctggagttgagcaggttcacggccatgttgaacgtgggtcggaagctcgagtgcagcgggtagacacgtttggatgacagcgaggcggccgtggcgggcacaaaaccgtgatggtcgaccacgatggcgtggccgatggtgtcgatgccgcgccgaccggcacgaccggtgagctgcgtgaattcgccgggcgtcaggcccacatgaccggtaccgtcgaacttttcgagtttctctaccaccacgcagcgggccggcatattgatgcccaatgccagtgtttccgtggcgaacaccattttgaccagaccttcttcgaacaatcgttcgactatctgacggaacagggcaatcatgccggcatgatgcgaagcgaagccttcttccaatgcaaagcggaacttggagaactgcagggctttcaggtcttcctgagtgagttgcccctccaccatctcatccacgatgcggcgaatcctggtcacttcctcatcggtggtgagctccagtccagcgttgatacactgttccacggcctggtcacagccgttgcgcgagaagatgaagtagatgccgggcaacattcccaggaagttaagctcgtccaccacggcccagcggcgcggggtgtggcgttccgctttcggggcacggtctttggcgcctttgccgccgcggcctctgccgaagcccttgcgcttatcggggcgttcctcgccgcgccggcgtgcggccttgcggtccaactggtcgagccggttgatgagttcggcgttgagtttggtggtctgctcgccgttgccgtctcggcgatagaggtccagcacctcgggctcggtgtgttcgtccgcctgcacgatgacgtgctgttccaaaggcacggggcggtgttcgctgatcaccagttttgtgtcgcctcgcaccgaggcaatccagttggagaaatcctccacgttggacacggtggcggacaggccgacgatcttgaccgtcttgggcaggtggatgatgacttcctcccacacgggcccgcggaatcggtcggccagatagtgcacttcgtcgagaatcacgtagcgcagtgcgttcagcgtggtggaacgctcgtagagcatgttgcgcagcacttcggtggtcatgaccacgatgtccgcctcggaattgatcgaggtgtcgccggtgagcaggcctaccttgtccgggccgtacacgtcgaccagatcatggtatttctgattgctcaacgccttgatcggtgtggtgtagaaggctttgacgttgcgttcctgggcgaggtaaatggcaaaatccgccactacggttttgccggcaccggttggggccgcgaccagtacgttgctgccggcttcgagcgcgtcattggcttcggtctggaagtcgtccagttcgaaaggcagggattcggcgaatcgcgctgctgcggacgcccgatggcgttggaccttttggaatgatgcgtaccgctgcgaagggctcagcgtctgggaatcggcattgcccttatggtgttggtgacgtgccattgctgctttccgttagttgttgaatcgcttccagcgggcccatgcctgggtgtggcgttcgcgcttggcggccttgcgacgaatcacgttcgcatgggcctcggcataacgattctgtgccacgctgagcggctgagtgaacagaggcggctcgctggtgtcggcagaggtgccgggctcccccatcgcggccacgcgttcaccgagttggccgccgatgtcggacatgtctttcaaggcacggagtccatgaagggctgcatagatgagtccggcaacaatcatggccagcatgaacagggccagaatcagccatatccaccaaggcatgaaaggctccttacttgttctcgctgatgctcagttcgcgttcggcgcgtgccacgatcatggtgcgcaacgtttccggggcgaccgccgtgatatgacgcgcgtgggcgatgcagaaggccacgaaccaggaatcggaggaaacggtcagatgcaccttttcaccggcaccgcattgttcgacggtagcgcccggcaatgtcttgatgaatgccagatcgcgctgatcggtgatgaacaccgcgtcggtaccgttgtcgaaactccacttgcgcagttcgctcaccggcatgttcgggatgttgatctgcttggtgggcttgaccagttccgccttttcgatacgggccaatcgcagtacctgccagatgcgcggcttgccgttggccttgtcgagggtcttgtctttggagacgtaggcctttttgtccttgggtgcggcggaaccaacgtccgtgtagacggcggcataatacacgccttcgtcaatgaagatcttggcgggggccaccagcttgcggcgggtacgacctgtaccgtcggtgtactccatgtccaacagcgaatcggtgttgatcgcacgcttgacgatggagaagcttcggggctccagctcatagccggtcaggctcagccacggggtctgaccgggactgacatgacggcgcaaacgctcatacagggattcggcctgcccacgctgcttgtccggcagcaacggcgaatgcgccaggtagctgaccgaggcggtgagcatgctgaggtattgcggcgaaatgccggcaagacgttcaaggcccagcgaattggtggcggaaacaataccctcggcatccagcagcggccagtcaatatcgaagaactggctgccggccatctcaccatcgtcggaaacggtggtcagggtgttgatgtccttatggatgatgttgacgaatttcttgagttcatcatcgttctttggcttgccgataaagcgttcgcccagctcgctcatcgagaattcctcacccagatgagcggagaggaacagcatcagacgcaggcgacgatcaacctcactgcccgtttggaaagcggagccgttcttcttgttctgagccttgatagactcgggatcacccggctctcgcacatcgcgactaatcgacggggaaaccaccgaagcgctcacaggactggcggattcgtcggccagagtgaaccggctggcggcgtgcaaacggcgatgataagcgtccacagcctcttgcgggctgacaatcgtggcccccggatgctcaagcacaaacatggccaaatcgtcggaatcggtgtatgccacgttcaggtgttcgccatccacgtcaacggtggcggcgaaacgacgcgaatcaataaccttgaccagtgaatccggaatgggctgcgtccccaagccaggcgcaatcgaatccaagccaagcccgggaatcggggtctgcggcacacgcggcgtagtgcgcgacacatgctgggtgagctgggactgatccggctcggaagaaatcgacatcgaacgagccagatagttggcggcggcaagcaccggcatatcttccggctcgaacatcaggcgaatgcgcggttcgtcgcccaactgcagacgataggacgcgaagtcctggccttccgacttggacgagtactcaggctgccgtgattcgatggcaatgcccatcgcagcgagcttggcgcgatcacgctggaactgcttggcgaacgcggccttggcggcctgatctgccagctctccatacgagtcggcgtaagccttgacgcgctgcgcaatttggcgggatgtgagccattgcgggaacgcggatgacaacacagccagtacgtccagctcgtgcttgccccatttgtcggaaaaacgccgacgtccgcttgtgccctctgccattagtcctcacgtatagttattgtttcgttataagtgcgtatgagtttccccacactcactctatcttagaggctttttccacagttgagcgccatttcacaaaaataatatcttttttatcgttcgaccgtgttgtaaatcacacccaatcgtccggttcgatgccttgcgggccaacgtattcgccgttcggcacgtagctcggctcacccttatcttcaagtttggcgtcggcgaacatcatgacgtcacgtccgaatgtccagtcgccctgaatggaaaccgagttggctgcggccaaagatggcacggcgtaggggaaccgttcgtcgaaatcgcggatgttcttgtagtatcgcggatcaagttcgacgttcgggaagatgtaattgccgtcttccatctcatacgtgtccgtcaggtggaagcgatcggaacgcataatgaacaaatcattggtggttttcaccggaaggaagcgcatacgatccacttggacgcagatagaaccgttgaacagaccgattgcggcacccatggcggtttccagctgaatcacctgttcggagttcgggtccgtgggattcacggtctttttgttacgaatcaccggcaacggcaacacaccatcgcattcggcgagcttgtctttcaaagcgtcgatgcgaatccagatcgagttggtgttgaagtaaggatgcttggcgatgtcttgggccgcttccttatcatccggatggacctggctcatttcacgcagtatcaggcgaccagtggccttgtctcgcacgatatggcctcccttgcgatcggccttggtgcggatagccacttcggccatgaacggggcacctgtgttttcgaagtgctgggccaacgtacgcgaggggcgtgcaccgagattgtcggaattggagatgaacaggtacttgaagccgcgctcctccaatacgtcaagcaggccggactcccagatggtggagaacaggtcgccgtggccgggcgggcaccattccagctccgggttcatggggtagctcaccggttcgccggtggcggccacgagtttgggttcctgatgctggatgatttccatcggcacgtcatgctggctgaacttgcgatgatgcttgagcgccttcatcgtgtccgccgaagtgcggaaagaattcatgaacgtcagcggcagttcgacgttcaggcgggtgcgagcggtaagcacctgaccgatgatgatgtcgatgaagcgcatctgcttggccttgtgcctacgcaccggcaacagcgacttggccttgtccaatcccatggaggtgcccagaccgccattgagcttgaggaatgcggtcttggcgaaggcgtccacggccttgtcgtggttgatggtctcatagacgtcgtggaagctgggcacgtggccaagcggctcgatgtcgtcctcacgaatccagctggaggcttcttcatggcgccatacgtcatacaaatggcggaactggttgatggcggtttcgctcatgccgtgctcgcgcatcttggcggccgaaagctcgaaagtctcatccacttcgggggtgtttacggtttcttcggggatatccgaggtgacggcgtcggtgtcgtcagcggcggcgatatccagttgggccttatcgtttatttcggtcaattcgggtccctttcatcaaatcaataggaaccagtctagcccctgtttggggcaaacacatacgacggggggcggaagcggtgaattgtcggtgataattccaataacacgccaagatgaagtccgtgtttaatccattacgaatggcttacaaaggtaagtccgtcgtcatgttgtctcatgttgtctgaaaacggaaaagccccggaaagcaaccactcagaagcggcggaattccggggctaatcggtcgggccggcgggatttgaacccgcgaccccttgacccccagtcaagtgcgctaccaaactgcgctacggcccgatggtgcaaaagcaccgagtagataatctaccagatatatgaaatctggcaaattacgcgcgtgtcacttccgcttcttcttctcacggatgttcacggagatctgaatcggcgtgccttcgaagccgaattcctcgcgcagggagcgttcgatgtagcggcggtagccgtgctcgaggaagccggtggcgaagatcacgaaacgcggcgggcgcgtggacgcctgcgtggcgaagaggattcgcggctgcttgccaccacgcaacgggtgcgggtgggcggcctggatcttgccgaggaaggcgttgagcttgcctgtaggaatacgctgatcccaggattccaaggccttatccatggctcgcgtcagacggttggtgtgccagccggtcttggcggacaggttcacacgctcggcccacatcacacggtcgaattcggtgttccacaggcgttcgagacgctgcttgtcgaactcgtccatcgcatcccacttgttgaatacgagcacgattgcacggcccgcatccacggcggtggacatgaccttcaaatcctgatcggataccggctgcgaggcatcaaacagaatcagcgccaattcacagcgctcgatggcggcctgcgtgcgcagagaggaataatattccgcgcctgtgagcttgtgctggcgtcgcttgatgccggcggtgtcgatgaacagccagtcctcgccatcgatgttgacgatttcgtcgacggggtcgcgcgtggtgccggccaaatcgttgacgacggcacgttcttcgcgcgccagctgattgagcagagacgacttgcccacgttcgggcggcccaccagagccacgcggcgcaggccggaaggcgtgaggtagccggaagtcttctcggcctgcttgagcttgtcgagcgcgacgtccagcaggtcgcccactcccctgccgtgcatggcggaaatcgagtatggttcgccgaggccgagtttccagaattcggcggcaaggtattcgctggcctggtcgtcgatcttgttgacggccagcacgacaggcttgccggcggcacgcagcatcttgacgatgcgctcatcggtggtggtcatgcccacttgcccatcgaccacgaataccacggcatcggccaaggtcacggcaatctgtgcctgtgaggcgatggcggattcaatgccttccacgtcggcttcccagcctcctgtgtccaccagcttgaagtcggtgccggcccattccgcgtcatagctcacacggtctcgtgtaacgcccggcgtgtcttccacaacggcggcacggcggccgaggatacggttgaccagggatgatttgcccacgttcggacggcctacaacagccagcacgcccaccggcttgggaccggccttgcgcgcgccttccgtgaagccacggccggaaatcagatcctcatcgccttcgtccagctcatagccttcgagattggcggcatactgctcgtattcttggttctcgatggcgtcctcgaccacaccgatgagcagatcgagcgtgtgggcgaagtccagatcggaattgtcgatggtggtaacgccatcggcggcggtcaggaagctggtgaccttggaatcggccttgtcgcgcgcggccacatcctcagcgcccacgcccttgacagcctggccggtgcgacgggcctgacggacctcctcacgggcggtcagcagcacgcgcacctcggcgtccggggacaccacggtggtgatatcgcggccctcggccacgatgcccaaccccccggagaaggagtcggccgacgcctcgcgggcgatgtaggcgcgctgggcggcgatgagcacgttgcgcaccgggatgacgttcgacaccttggagacatggctggagacttcggaggaacgaatggcctcggagatgtcctcgtcgtcggcgaatacgcaggggttgtccgggtccacggagatatcgaaatggtcgccggtgaagaactcgcccaccgcttcggtgatgacacgctcatccacggtttcggcgtccagatcgatgccctgcttcaggcaccaccaagcgcaggcacgatacatcgcgcccgtgtcaaggtaggcgtatccgaaatacttggccagcgccttggacgtggacgacttgcccacgccggcggggccgtcgatggcaacgcgaatcacaggccaacctccttggacagcgaacggacttccgtctgggacagcacgcggtaggaaccgggcttcaaatcaccgagtttgatcgggccgatctgggtgcgcaccaagcgcttgaccgggaagccgattgagccgaagatacggcgcacgatgcggttcttgccggagtgcagcacgaccttgaccatcgtgtggtcgcgtgaggagtcgatgatcgcgcagtggtcgagcttgatccagccgtcgtcgagctgtacgccggtggtcacgagtcgacggcatacggtgccggagatcttgccttccagtgtggcgacgtaggtcttttcgacctcgtacttggggtgcatgacgtgctgcgagagttcgccgtcgttcgtcatgaggataagaccctcggaatcgtagtcgagacggcccatgtggaagatgcgctcgtacttgtcgcccacgatgtcgcgcaacgtgtagcggcccttcgggtcgtccatggcggagagcaccttgcggggcttgttcagtgccagagtgacgtggttcggattgacgcgtacgcgcgaaccgtctacgcgcacctgctgcttatgggggtcgacgcgagttccgagctcggtgaccagttcaccgtcgacctcgacacggccttcggtaatcatgtcctcgcacttgcggcgggaaccgaatcccgcttgggcaagcagcttctggagtcgaatggaattggaatcgtcttgcgctttcgcagcgcgggaatatgcgtttggcatcgttctcccaacgtggccggacagactctgtcatcgcagagactgtcgatttgtatacatacttcagagttggcggactggaatcccagccaattccaacctatatatcataccgcaacgtaggactgctgctagactggcaaccgtttgtacgggttcgcccgtcttccaacagatgaaaaggaatgaacaatcatggaagaaaccaagcaacagccgctggccctgcgcgtgtgcgccgaattggccggcagcttcctgctgtgctttgccatttacgccttctccacatggggttcggccgtgtatggcatcaatatcgtgttcttcgcgttggctaccggcttggcatatgccgcagtcaccgccatcttctcccgcgtgtccggtggccagctgaatccggccatcaccgtagcctccgtgctggtttccaagacgaaaatcctggatggcatcctctatgtgatcgctcaggtcatcggtgccatcgccgccggcttcgccgtggtcaagctgctgcccacatccgagcaggtagctgccaaagtgtggctgactccggccgttaacggtttcgagaacggctccgtgtcttactcgctgctgacccagtatggcattacgttctcgattacgctggcgattgtcgtcgaggtcgttgcctctctgattgtcgttgccaccgccatgtcttctctgggtgatcacggcgagtcctcggaccgtcatgtcattgccatgggtcttgcctatggtctggccgccgccatcagctacccggttaccggtgccggtctcaatcccgcccgttccaccggtatcgcactggccgcgatgaatgagggtcttacgcaaaatccgctgcaacagctgtgggtgttctggattagcccggtcttggccgccgctgtggtggcgttggtcatgatcatcgcgcagatgatgaccactcccaaagtgccggctgccgccgatcttccacagacggatgccgatgcgaacgcggacacgctcgacgatggcgaattcttcgatcaggccgcctcgtctgatggcgattcagcggaaaaagatgttgccgaagagtccaaagaagctgaagtaggtaatcagcaggccgattcccaaggcgatgccgatgaaggagtcgaacgccactgagcgcactttccatgggcttttgtcctgaagaatcaggcgaacaagcccggtgatgatggccgtcacggcaagtatgaccgtggcggccatcgtatatccgaaagcaaccagcagtgtgatgacggcgacgacgccgagtacgcaccattcaaaccatggcttgccctcatgcgcttcggatacatagggatggttgtgcatgttgcgattccttctgtcgaacggttacgtgaccacaatagcaggcgaatagcaaaggtgggattccgcttggacccgttgacgggtcaggcggaatcccacctttgtgcgttttggctgagctgctcccctcagagagtcccgatcagtggaagaagtggcgggtgccggtgaggtacatggtcacgccggccttcttggccgcttcgatgacctcctcatcgcggatggatccgccgggctgcacgatggccttgacgcccgcgtcgataagcacctgggcaccatcggcgaacgggaagaacgcatcggatgccgcgaccgcaccggtggcgcgatcggcaccatcggccagcgtgttggcgcgctcgacggccaaatggcaggagtccacgcggttgacttggcccatgccgatgccgaccgtggcctggtcgtgggccagcaggatggcgttggacttcacgcagcggattgcacgccatgcgaacacgaggtccttcagcgtgtcggcgtcggcggcctcgccggccacgagcttccaggcgtccggatcgtcgccgacggcgttgatcagatcggtgtcctgcacaagcaggccgccatcgatctggcggatggcctcgtggcccttcggtggctcggccaccttgaggatgcgcaggttcttcttcttggtctgcagcagttcgagcgcggccggctcatagtcgggggcgacgatgacttcggtgaaaatcgggcgcacgctttcggccatctcaagagtgaccttggagttgcaggcgatcacaccgccgtaggcgctcatcgggtcgcaggcgtgagccttcttgtgggcctcggccgcggtcgcgccgatggccagaccgcacggattgttgtgcttgactacggccacggcaatggcgggagccatatcccatacggtgcgccaggcggcgtccgcgtccacgtagttgttgtagctcatcggcttgccgccgagctgctcggcgtgggcgaaaccggtctggttgagcgggtcaatgtagagggcggcctgctggtgggagttctcaccgtagcgcagggtgtgcgcacgatcccaggtgcgggtgaactgggccgggaacttggcggaatcgacttcagtgccctgatcgtccttgtccacctcgacggcgtccagagaggccggcttgggccagtgcttggcggtccactcgttgatggtggcgtcataggcggcggtgtgcgcgaaggccttggctgcaagccacttgcgctcgtcgagggagaagccggtgccatcggccacgcgggaggcgaccagtgcataatcggccgggtcggtgacgatggccacggtggcgtggttcttggccgcgccgcgcaccatggaggggccgccgatgtcgatcttctcgatggtatcggcctcgttggcgccggagcgcacggtgtcggcgaacgggtacaggttgacgaccaccaagtcgaacggcttgatgccgaactcctcgagctgcttggcatgctcggggttggtcatatcagccagaatgccggcgtgaatgtacggatgcagcgtcttgacgcggccgtcgaggcattcggggaatccggtgacatcggacacctcggttaccttgacgcccagctcggcgagcttcctggcggtcgaaccggtggaaacgacttcggtgccggccttcacgaacgcttccgcgagtacttcgatgccttccttatgaaagaccgagaccagtgcccgacggatcggtcggttcgtgtttgtcatcctgttcctccttggattcttgtggttgtgacgccagggaccgcgcctgacggacgatgacggtcttcggggtcgcggcggtggtgcgggaatcattgatcctcccaaccaaccagcctatcgaaaaaacgagcactgtgccaatcagcgcgagcagccatgccgcggtaaatcccaatgcggtcgaatgaccgacgactctggtggaggccatgacgtcgacgccaatgtgagcgagacgatgatcgccaagcgatccattggacaaagcgaacagcaatgtggatgccagtgagatcagcatcgcgctcaggcagaatgacccggcggagtagatcagcgaaaccagtactgggccgcgggtggacgcattccgtatattcaacggtctgcaggcgaatccttgcggcaggaatacagccagcaggcccacgagcgcagcgatggcgagaggcgcgttcaaggcaacggtacgccatagttcgctgctgaccggttcgggcagaataccgaatgccggtattgcaggaagctctttggattggccgagccataacgtgaaactggccaaatcaccgatggcgaatccgccgccgaagagccaggaaacagcccagagcatgacgttgggtagccagatcagtatggcgacggtggtgagaattcgtgaaccggtttccatcccggacaattcgaacaacgatacgacagcggcatggttgcgtaccgaccatacgatgacggtaatcaatccaattgccaggtatatgcccagtatcgcgacggccaagacgacgccgattttcaggcagtggcgtatgtccgccggcacctgcttgcgagtccagtccctgaatgctcgcatcttggctgattccggtacggctgcgcataggaaaccgatcgagaatacgatggctgctttcagcaacaccagccactggtcatcgacaagacctaggtgtacggattgccggaatgcctcgttcaacccgagccaaacattcaatccggcaacatacgcatgcggcccgtatgctttgattcgcatggtgagtgcattgatcagccatatcagcagtatggtcaacatcaatggcgtgatggtgagggtgaacgaatcggttctagagcccgatccctcactcagaagcacaacggcctgtgtcagcgaggttgtgccgacggtgagattgtcgccgccctcttccatggagacaaccaataacatcagcgctgtatagcaacctaatgcaacggcatagatggccatggatgcgagggcgactatggctccccgcacccattggcgaatcacggctttcatcacgattggttggaaccgatcagtcgatgttggccttggcgagtatgtcgcgcatgatttcagcggcctggcccggggtcttgcccacggggatacccgccgcttcgagcgcgttcttcttgtcctgggcggtgcccttgcctccggagacgatggcgccggcgtggcccatctgcttgccttcgggggcggtgaaaccggcgatgtaggcgacaaccggcttggtcatgtgctccttggcccatgcggcggcgtcctgttcggcgaagccgccgatctcgccgatcatcatgacagccttggtgtcggggtcggcttcgaatgcctgcagggcttccagcagcgtcgtgccgacgatcggatcgccgccggcgccgagacatgcggtgaagccgatatcggacagttcgcccatgagctggtaggtgagggtgccggatttggagaccagtccgagcgggccgcggccgacaatgccgtcggggatgatgcccaagttgacgccagggttgccgagcgtgatgaaaccggggcagttcggtccgatgatgcgcacgcccttcttgagcgccagttcgacgaagtatgcggaatcggccaccggaatgccttcagtgatgaccacgatgagttcgatgccggcttcgacggcttcgaccacggcggacttggcgaacttcggcggcacgaacaccacgctggccttggcgccggtggcttcacgtgcttcgccgcaggtggcgaacacggggatgtccacgtcggcaccgttcttggcaccggggaaggtgacggatgtgccggccttgcgcgggttcacgccgccgacgatattggtgccggccttgagcatgcgagccgtgtgggtcatgccctgatggccggtcatgccctggacgataacgggagcgccgtcttcgatgaacagcatcagcgaacctccttggactgggtcgcctcaccggcgagctgcgcggccttggctgccgcgccttccatggtttcggacacatggatattcggattgttggcggaagcgaggatatgcagaccctcggcggcggcgttgccatcgaaacgcacgacgatcggcttggaaccgccgagcttggcgaccgcttcgaggatgccgttggcgacttccacgcaggaggtgatgccgccatagacattgatgaacacggattcgacctgagggtcggacagtacgatctccaggctttcggccatgacggctgcggaggcgccgccgccgatgtccaggaagttggcgggcttgatgttggtgccctgttcctcgccagcgccggagacggcatccagggaactcatgacgagtcctgcgccgttgccgatcacaccgacctcgccgtgcaggtgcacgtagtgcaggccgtgttcgcgggcgcgctgttcgaaggggtcgggaacgatgagatccacgaaacgcgcccagccatcatggcggaaggaggcgttgtcatccaaggagatcttggcgtccaaggcgctcagctgcttggtggattcgtcatccgggtcgccgatcttggcgagcggattgatttccacgagcgtggcatcgttgtctttgaagcagcgccacatcttgagcagaatctgtgcggcctgatcgacgtccgcgtggtagaagccgatgctctgtgccatttcggtggcagcggccaggtcgaagtcgccgagcgcatcgatgtgcaggcgcttgacggcctccggatgttccttggcgatttcctcgacttcggtgccgccgttggcggtggccagcacgtcgaagtcgcgcgaggtgcggtccacggagatggacacgtaatattcgtgcaggatgttcttggcttcggccacaagcacgccggaaaccttgtgcccgtggatggtcatcggcaggatggactcggattcaagaatcgcctcgtcgcggttatgggcgatcttgacgccgccggcctgaccacgatgaccgatcttgacctgcgccttgattacgcagggatagccgattttgtccgccgcttcggcgacttcatgggagttctgggcaaagatggcgtccggggtgggaatgtcctgttcctcgagcagctgacgcgcctggtattcgtaaagatccatcgatccttccctgactatgtaattggtccggcatataactgtacacagtacatgccggaccttgaaaactaactgtacgttgggtgagacggaatctcaggccggcatcgcgatcagcgagctgctgggcttgccgccgagcttatccagaccgtcgagaccatcgagccgcatcacaaaactgaagcccaccacagtgccgcccgccttttcgataaggtcggtgccggctttggcggtgccgcctgtggcgatgagatcatcgacaatgagcactcgctcccccgcctgtacggcgtcggtttcgatttcgacgctggctgtgccgtattcgaggtcataggattcaccgatggtttcgggcggcaatttaccggccttgcgcacggcgatgaaacccttgcccagatgggcggccatggccgggccgaacaggaacccgcgcgattcgagaccggcaatggagtcgaattcgctcggggacaccggcagagccgtttcaagcgccttgagcagaatcttcaagcccttggggtcggcgagcactggcatgaaatcacggaagataatgccttccttgggaaaccccggtatggaacgcaccaaggacaccagatattcggcgtcctgttgccctaccttgctcaatgcgtcgatggtgatgtccgactgtgccatagtgctcgccccttttatgcctttgcgatgcgatactcggatggtgctaccgaatcgaacagcttacttcgtcttggtttcgttgtcgtcaccggtctcgtcagcggtgtcttcctcggacacgacggacgcctcgatcggaacctgaccagcctcatcgttagccggagcctcggtgtcttcgtcgggcagcgggttgccgttctcgtcgacctcatcatcggacacataggccgggcgggtgtactcacgggcgatggcgttgaagccgaaacgcagcttggagccttcggagtcgatgacgatctcctcatactgctcgtcgacttcgacgaccttgccgatcacctggccgatggtgatgacctcggtgccgggctgcaggttgcgacggaagtcctgcttctcctgctgttgctgcttggccttcttggactgccaccacatcatgccgccgaacacgacgacgatcacgatgagcataatgtactgttgttccacgaaacaactccttcaaacgagcgacattgacgaaacgccgccaagtgtgcaaacaggagaaagtctagaagagcttgctgacatcatctttgggcgtaattcccaaatgctgccatgccttctcggtagccacgcggcctttgggcgtgcgaatcataaaaccttcgcgcacaagatacggctcgcacacggtttccacggtttccgattcctcgcccaccatggccgccagattgttcaggcccacgggtccaccgttgaagttgcgcacgatggcattgagcacggcgatgtccagccggtcgaggccttcggagtcgatctggtacagggccagcgcctccttgacgtcgtccggccgcaccacgatcaggtcgtggacgatggcccagtcgcgtacacggcgtagcaatcggttggcgatacgcggcgtgccgcgcgaacgcaacgcaagctcatgagcggaacccgcatcaaggtttacgcccagtacgttggccgaacgttcgatgagcttttccaactcctcatgcggatagaagtcgagatgtgcggtgaagccaaagcgtgcgcgcaacgggcttggcagcataccttcgcgcgtggtggcaccgatgacggtgaatcgcggcagggtcagcgggatggagcttgcgcccgggcctttgccgaccatcacatcgacgcggaagtcctccatcgcgatatacagcagctcttcggcggcgcgcggcagacgatggatctcgtcgatgaacagcacttcgccgacgtcgagggagctcagaatcgaagcaagatcaccggcatgttgaaccgcagggccggaagtcacgcgaatcggcacttcaagctcattggcaacgatcatggccaacgtggttttgcccaagccaggagggccggcaagcagaatatggtccggtggcacatcgcgtttgcgggccgcgtccaggaacagttgcagctgggccttgagccgtggctgtccgataaagccttcgagaacatgggggcgcagctcctcgtcgctgaccggctcgttgccgatcggctgggaggagaccatgcgcaacgactcttcgttggcaccggtgtttgaggtaccgtaatccgttgtctcgctcatcagcggcccctatccatcagcgccaaagccagacgtagcacacgcggcacatcgtcggtggcaagcggcgtgggaatatcgttttcggcgcaagcctcggcaacggcctgctgggcgtcctgctgacgccagccaagtgaaatcagtccttcgacaacctgttccgtaccggtatccaccggagacttggatattgccgcctgagcggaagcaccctcgatctgactcaaatcaatagagcccttaagctcgaggatgattttctgtgcgcccttcttgcccagccccggagccttggccagcgcggtggcgtcgttgtcggcgatggcgtgggccagctgactcggcgtcagtgtggagagtaacgattgggccactttaggtccaatgccggagaccttgatgagttgcagaaaggttttcttggcgtcccgatccaggaatccatgcagggtaatggcatcctgagagaggttcatataggtgaagacgcgggtgtcttgcccggcgtgcagacggctcaggtcggtggcggacatgcgcacttcgtagcccactcccccaacatcaatcaatgcggtatcggtttcgaccgattcaacccgcccggtcagcatgccgatcatacaggtactccttcagggctccaggattcaagactcgaacaactgttcgaaagtatactacatgcctcggtcgtggttgatgcggcggcgcgtggatttctgtgcggcctcagcccactggcgttgcgcggcggtcagatgttgttcgcgttcgccgccctgcaatgcgcctgccgggcgcagcgcatggcaaatggccaaagccaaggcatcggcggcatcggcgggagtcggcattttggtgaggttcaaaatacgtgtcaccatacgctccacctgaatcttctgcgcctgcccgttaccggtgatagccagcttggcttcggtaggcgtatgcaacgccacgggaatattgcgttgcgcggcggcgagcatggcgaggccggcggcctgtgcggtaccgagtacggtgttgcggttggattgtgcgaacactcgttcgatggatacggcatcgggtgcgaagcgatccattttctcggacaggccgttgtagatggccagtagacgcagatcctgggtgatatccggtgaggaccgcaccacgtccacgtgaataaacgaaagccggcggtgctcgccggcttcgatcacgccgaccccgcaacgtgtgagcccggggtcgacgccaaggataatcacgaggattactcctcgtcgagctgggccatcacctcgtcggaagcggtccagttggagtagatgttctgcacatcgtcgaggtcatcgaggttgtcgatgagcttggacaccttgcgggcatcgtcgaggctcaactcgacctcgttcttcggctgcatgacctggtcggcggaatcgtagtcgaagccggcgtcctgcagagccttgcgcacggtgaacaggtcggacggaccggtcacaacggtgaacacctcaccgtcatcggtaacgtcctcggcaccggcttcggcggcggtttcgaacagcttgtcgaagtccacgccctcggacggcaccacgatctggcccttgcgctcgaagttgaaggacacggagccggaggtggccagggagccgttgcccttggtcagggtggaacggacttcggcggccgcacggttgcggttgtcggtaaggcattcgatgatgaggccaacgccggcaggagcgtagccctcgtagacgatgtcttcgtagttggcggcgccgtcttcagcaccggcaccacgcttgacggcacgagcgatgttgtcggccggcatggaggccttcttggccttgtagatggcatcgtacagggacgggttgccgtccgggtcgccaccgccgaggcgggcggcgatttcgatgttcttgatgagcttggcgaagagcttgccgcgcttggcgtcgatggcggccttcttgtgcttggtggtcgcccacttggaatgacctgacataatgctcctagca

SEQ ID NO: 2246 - DNA, 15296 bp, Unknown
  R51_24m  MAG No. k141_46947
aatcaccgagggctaccagtccgtgcatccgttgaaggccggatggcaggagcgtatcacgctctggcagctctaccccatcgccggccactgtgtcttcttcggcggcggctacgtcaacgaataccgctccatgtgccgatccctgctgaagtaacagacttggctcccctctctgaggggagccaagaacgcatccactctcagctcagcgcgtccttcaacttgctgaagaagcctttcttttggccagcctgtggacgggatgcctgggagacgtgcgtggtgcctgaatcatgcgaggcggcgaactgttcgatgaggccgcgctcggtttcgttgagcttggtgggaatcagcacattgacgtgggcgatgaggttgccgcgctcgtccttgttgcggatgttcgtgacgcccagtcccttaagcgtcacagtgtcctcaggctggcagccggccgggatggacacggtcttctcaccatcgaacgtgtcaatggacagatcgtggccgagcacggcccagctcatcggcacctgaatccagcagtgcaggtcgtcgccatcgcgggtgaactgcttatccgccttgatgcgaatgtcgatgtacaggtcgccggcagcgccgccgccctcacccacttcgccttggttggccaaacgtagacgcgcgttgtcgttgatgccggcgggcacggtgacgcccacggtacgtgtggtacgcacacggccgtggcccatgcagctggggcacgggttcttgatgatggtaccgtggccctcgcaacgttcgcagggggcggaggtcatcatctggccgagcatggtgcgcacgaccttctgcatgaatccctggccgtggcagtcggggcaggtgaccggctgtgcgccgctctgggcgccggagccgccgcactcctggcacagggagaacgtgctgatcttgacgtgcgcggtgccgccgaacacggcggtcttcaggtcgatggacgcggaggccagggcgtcgcggccgggctgggtacgcggcaccgggccctgtgagccaccaccgaacgcggaaccgaagaacgtggagaacacgtcgctcatatcgccgaagcccgccccggagaagccgccggcaccggcgttcggatcgttcgggtcgacgcccgaatcatacatacggcgcttgtccggattggacagcacatcgtaggcgttgttcacttccttgaacttgtcctcgaattcagggcccgcgatgtcggggtggtacttacggctgagcttgcggtatgccttcttgatctcgtcgtcactggcgccgcgttccacacccagcgtctcgtaataatctgccacttgattgatcctttgtgttcgtttggtctgcgggtcattgtgccacagacggcggtcagtcttgggtccggccctcggagaggaaggcggtcaaatatctggctacggccctgacggcggccatagtggccgcatagtccatgtgggtcggccctatggagccgacgaaggcgatgggttccgtgtcgttcgtctggctctccgtctcggattcggtttcgggttcgcctacgggatcgttccccgccggttcgcccgccgcaccgctgcgcccatagccactgctgaccacggaggcatgcagtaggccgggggtgtgcatttcggagccgatggccacgcccacgccggatgcattcgtctcctcgctcaggttgctcatgagcttcatcagcacgacctgttcttccagcgcgtcgaagagcggggccagatcggccagggaccgggagtgggccaggtgcgaggtgccggacatgtacagttcgtccgcgcgttcgtccaatgccatcgattcgaaggcgtcggccagcgcgtcggccacgccgcgcaccgactcgtagccggcgctggcggcgatggatcgcacggtctccgcggatttcgatagggacagtccgacacattgttcgttgacggtgttggagagccggttgatctcgtccacggcgggcatggatgcgatggtcaggccgtgctgggccacgcggccggtgtcggtaatcaccaccgcgagcaacgtggtcatggcaacgggcaccatctccacgtgccgcaatgtggccttggccagcgatggcgaggtgactatggccacttgaccggtgatttcggacaacagtcgtgccgaacgctgcagcgcgtccttgagactcaccgatccggacaggaagctgttgatgccgcggcgctgcgcctcgctgagcggcaccacggtagcaagtcggtccacaaagtatcgatagcccttttcggtgggcacacgaccggccgaagtgtgcggctgaatcagatatccttcatcctccagagcggacatgtcgttacggatggtggccgaactgacgccgagatcatggtcgcgcgtcagcgaagtggagcccacgggctcctgagaacggatgtaatcctccaccacggcgcgcagcaccagcatgcgtcttgattgcgtcatgcgcgcctccttatatatgcatacatattcatatcagtcacggttcactcagggcgtaccccgacggtcggttcgccacgccgcgacacgcgggaacccagaaatattgcctctttcttggctccgccacgtgcaggtggcgcacttcaccttagaacattgtattagcactccttaggcttgagtgctaatgcgttcgtttgcagcgtagcaatgttcactgtgaacgctaacagaacacaaactaccaaaacacgccaaaattgcaccgcaacgtcgcaaaccgacgctagcatggtaatcgcaatgtgagggcgtcaagcgcccggcacaagccggatacgcggcccgaccaattggaaggaaagtaatccatgaccgaattcaaggagaccgagctcgacgagcgcgccatcaagatggcgaaggtcctttcggctgacgcggttgagaaggcaggctccggccaccccggctcccccgtctccctggcgcccgtcgcctacacgctgtaccagcacttcatcaagcacgatccgaatgatcccaactgggaaggccgcgatcgcttcatcctttccggtggccatgcctccctcacccagtacgtccagctgtacttctccggctacggcgtgaccctggacgaccttaagaacttccgtggcggcgctgccacccgcaccccgggccacccggagtacggcctgaccccgggcatcgaaatgaccaccggccctctgggccagggcttcgcctccgccatcggctttgcctacggcgagcgtttccagcgcggtctgcttgacccggagaccccgaaggaagattccccgttctaccacaagatttgggccatctgtggtgaaggcgacatcgaggagggcatctccggcgaggccgcttccctggccgccaaccagaagctcggcaacctgaccgtgatcttcgacgccaaccgcatccagatcgaaggcgacaccaacctggtgctggccgaggacgtgctcaagcgcttccaggcctacggctggtacaccgacgagttcagcttcatccagcccgacggctcctacaaggaggacatcgagggtctggccgacgtcatcgccaaggccgaagccgccgccccggaccagccgaagctcatcaaggtccactccctgatcgcctggccgaccccgggcaagaccaacgacccgtcctcccacggctccaagctgggcgccgaggccgtcgccggcctcaagaaactcctcggctacgatccggaggagtccttccacgtcgacgaagaagccctggcccacgcccgcaaggtcgccgatcgcggcctggaggcccacaaggcctgggacgagaagttcgacgcctggcgcaaggccaacccggacaaggccgccctgtacgaccgtctgaaggccggcgaactgccggaaggcttcgacaaggcccttgacgaccttgaggccaccttcgaagtcggcaagggtgtcgccactcgtggcgcctccggctccgtgctcaacgccatcgccgccgtcatgccggaactctggggcggctccgccgacctcggtggctccaacaagaccgacctcaagggcgctgccaccttcgccccggccgagtgcgccactaagcagtggccgaactgcaacgagttcggtcgccagctgcacttcggcgtgcgcgagttcaccatgggctgcatcaccaacggcatcctgctgggttcccacacccgtccgttcggcggcaccttcttcatgttctccgactacgagcgttccgccgttcgtctggccgccctcatgcagatcccgaacctgtacatctggtcccacgactccgtcgccgtcggcgaggacggcccgacccaccagccggttgagcaccttgcttccttccgcgcgattcctcagcttgaggtcattcgcccggccgacgccttcgagaccgccgaggcttaccgttacttcttcgagaagaagaacaccctgcctggcgccatggttctgacccgtcagggtgtcccggttcttgccgagaccgctgccaaggccaaggacggtgtcaagaagggcgcttacatcctggtcgacaccgagggtactccggacgtcatcctcatggcttccggttccgaggtccagtgggctgtggctgccgccaagaccctggccggcgagggcgtcaaggctcgcgtcgtgtccgtgccgtccatggaatggttcgaggagcaggacgccgagtacaaggaggctgtgcttccggccgctgtcaaggctcgtgtctccgtcgaggccggcgttgccatgccgtggtacaagtacctcggttcctacggcaagcctgtctccatcgagcagttcggcctgcagggtgacggcgctcagaacatgatcgacctcggcatcaccgccgagcacgtggtggaagccgccaaggcctccatcgccgaagtcgaagccgccaagtgagcaactaagcaataattcaataattgttggctcccctccctgaggggagctgtcaggcgaaagcttgactgaggggagcaatgcttgagcccactcccctcagtccgcgttgcggacagctcccctctcccaggagaggggagcctagggcttgaatccaaggagaaaataaatgactgaagcaactcagcgtacgtccgacaacggcgtttccatctggctggacgacctgtcccgctcccgcattgagtccggctccctgcaggacctcatcgccaacaagaacgtggtcggcgttaccaccaacccgtccatcttccagaaggccctgagccaggtcggcccgtacgacgctcagctcaaggagctcggcaaggttgacgttgagaccgctgtccgcgagctcaccaccaccgacgtgcgcaacgccaccgacatcttccgcgagatcgctgaggctaccgacttcgtcgacggccgcgtctccatcgaggtcgacccgcgtctggcccacgacaccgagaacaccgccaagcaggctgtggaactctgggagaaggtcaaccgtccgaacgccatgattaagattccggcaaccctcgaaggcctgccggccatcaccgccaccctggccaagggtatctccgtcaacgtcaccctgatcttctcgctcgagcgctacgagcaggtcatcgacgccttcatcgagggcatcgcccaggctgacgccaacggccacgacctgaagcacatcggctccgtcgcttccttcttcgtctcccgcgtggacaccgctgtcgacaagctgctggaagccaacggctccgacgaggccaaggctctggagggcaaggccgctgtggccaacgctcgcctggcttacgagctcttcgagaagaagtttgccgaggatccgcgttgggccgacctggctgccaagggtgccaaggttcagcgtccgctgtgggcctccaccggtaccaagaacgccgcctactccgactgcaagtacgttgacgagctcgttgccaagcacatcgtcaacaccatgccggagaagaccctgaacgctctggccgaccacggcaacggcgctccgtccatcgagggcacctacgaggagtcccacgccgtcatcaacaagctggctgagctgggtatcaacctcaaggacgtcactgacaagctggaggccgacggtgtcgccgccttcatcaagtcctgggattccgtgctggctgacgtccagtccggcatcgaccgcgtgaacgcctgagattattagctgatgcgcatttcgcgcattaactgattagctcacagaagctccgaccccaaccggtcggggcttcttacgtttgttgctacagtagtacgagcacatgagagaaaggccgaaccgtaatgaacaaacttgtcgcacgccagcggttggtgatgacctttaccttcttttcgatgttcttcggagcgggcaacctgatcttcccgccgtttgtcggagctcaggccggttccgcgaccataccggcggccatcggcttcatcgtctccgcggtcggcctgccgattctcggcgtgctggcggtcaccttcgccggtggcttcgacaaactcgccggccgggtctcccccaaattcgccctgttcctcggcttggcgatcatgctcaccatcggcccctgctttgcgattccgcgtacggcgaccacctcgttcgaaatgatggtggcgcctttcgtgccgtcctcctacggctggctggcccaactcatctactcgctcgtgttcttcacactggcgttcctgttcgcccagcatcccgaaaaactctccaaagtgctcggccgattcatgggaccgttgctgctggtgctgattgccgtcctgttcatcgcctgcctaatccacggtatcggtaccccggccaaaccgatgggcgactactccacaaaccagattgcacgtggcttcctcgacggctaccagaccatggatctgctcgccgcgctctatttcggcatcgtgatttccgcgaatatccgcacccagcaggtcgatgacgaatcgcaagtgcagaaggagaccgcgtatgccggactcggcaccggtgtgctgctgatcgtgatctacggcgcactgagctacgtgggcgtggtgtccggtgccatcgccaccatcgatcccgccaaagacacgggcgcgaccgtgctcaccaatctcacctcgtccctgttcggcgcgttcggtaccgcgttcctcggtatcgtcttcgtcatcgcctgcctcaacgtatgcaccggactgatcggtacctgcgccacctacttccacactcggttccagaccgttgcagggagaacgttgagctaccgcacctggcaggtcatcttcaccgtgttcagtttcatcgtgtccaacgccgggctaagcgcgatcatcaaggtttccgtgccggtgttgtccgcactgtatccgatcgccatcgtgctggtgctgctggcgctgacccacaagtcgctcggcgcgcgattcccgcatgtctacttctggaccgtgctgctggtgggcatcgactccttcgccacctgcatctccagcctaatcaccgtcttcggcggctccatcggctggctggacacgacgctggccatgctgcccttgcagcaataccagctcggctgggtggtcccggctatcctcggtgttgccattggtatcgccgatgctccgcgacggtagttcttcccggtctgtgccggagtctggcggtcggtcggtgatggcggttgttgcgacgctcagcggtgccggtgtatcgttcgcaccactatatgagcgcattgggggcggcatgatgctgcatccgaactgtccggcgattggcagaatgacctactatctctcgggccaagcaactgacgattatggagtctgcgtcacctcaccactgtggtttatgacggtgactgcgctgagtgttgtcgcgattctctgtctgaccgttgcgggagtacagggcttttcgcgccatcggctctgttcccgttgccctgttctggtcaggtctcacgttctttacctacagctacaacactggtagacacaccgatttctgcccagcgctatcggcaactgacaatgcaggtcttgtcgcttattgcatcggccgtgaagctttgggactgctgaccgtcgtgttgtgcgtgctgccattgttctccctgctttcggcgattatggccatcacgttggctgcgcacgacgcgacaccaccggcataaaatctccttcatatcacgaaacaacgggcacccgttttgcgaggcattctatccgtcccgtgtttcgcaacgcatgagacggcacatccattgaatcaggagtctagaccatatctcgccgaatcttgcggtaggtggcatagaacaggaagccggccacgatgccggaggtggcgtcggagatgggttcggcgatgaagatgccgttgacgccgatccagtgcggcagcagcagcgcgagcggcacgagcaggatgatcttgcggaagacggccaagaacaccgactgtttggcctggcccatgccgacgagtgcgcattgcgcgcccatctggatgccgaagataccccagccgcagacgaaaatcggcatcatgcgggtcacgatgtcgatgaccgtctgttccgaggtgaaccatgaggcgaagaagacggggaatgtggcgagcacgttcgcggcggccgctcccctgacgccccatccgaacacgaaaatgaacacggggtcaagaaggatggatatgccggtgccgatgagtacggagaccatggccacagtggtttcgccaactgcagcagcacggtgagggtcagggctatggcgatgaggaacgcggcgctggtgccgaggatgcgttcggctttcttgaagttgccgcgcccaagttcaatggaggcgcgcggcgcgccgcctgtgccgatcagcgaggcgaaggcggtgacggccagcagaatcgggaagcagatgcccacgccggtcatcgccgcgttgcccacttcggggatgtgcccgatgaacagtcggtcgatgatcgtgtacgaggcgttcgccgcctgcgccacgatggtggggaccgacatggtcagggccagacggggcaccggtttggtgcccagcccggcatcgatcgtgttcgcctgtaccaaggatcagctctgccagtagtagctgaagaagtcggcgagctcccccatggtttcgtgcagcatgcccatgcgcggcaggtacaccacgcggaagtggtcggggcgatgccagttgaacgcgccgccgtggctgatgaggatgtgcttgtcatgcagcaggtcgagcgcgaactgctcgtccgagtggatgttgaagcgtttgacgtcgatcttcgggaagatgtagaacgcggccttcggcttgacggcggtgatgccgggaatctggttgagcatgtcgtaaacgaggtcacgctggtcgtgcacgcggccgcccggcacgatgtagtcgttgacgctctggtggccgccgagcgcggtctgcaccacggactgggcgggcacgttcgagcacatgcgcatgttggcgagcatgttgaggccctcgatgtagtccttggcgatacgcttgttgccggacaggatcatccagccgatgcggtagccggcgatcatgtgcgatttcgacaggccggagaaggtcacgcagaacaggtccggggccatcgaggcgatggagatgtgctgcaggccgtccatgacgaggcgatcgtagatttcgtcggagaagatgatgagctggtgttcacgcgcgatgtcgacgatctgctggagcacctcctttgggtaaagtgcgccggtggggttgttcgggttgatgatgacaatcgccttggtgttgctggtgatcttggagcggatgtcatcgatgtccggataccattcggactgttcgtcgcacaggtagtgcacggcggtgccgccggccaggttcacgcaggcggtccacagcgggtagtccggggagggcacgagcacttcgtcgccggtgtcgagcagcgcggacatggacaggttgatgagctcgctgacgccgttgccggtgtagatgtcgtcgatggtgacgttcgggatgttcttcagctgcgcgtactgcatgatggccttgcgcgcggagaacaggcccttggacggcgagtagccttcggtgtcggtgagctggtgggccatgtcatagacgacttcgtccggcgtgcggaagccgaagggtgctggattgccgatgttcaatttcaggatgtgggtgccgttggcctccatgcgcatcgcctcgtcggcgaccgggccgcgcacgtcgtagagcacgttgtcgagcttgtgcgatttgccgaaggtacggcggcggcccacgggaatctcgctgtccgtcaggggcttggcggtgcccgtggcaagcggcgtggcggcgtgttcgccgtccgtgacgctgttggaagcgtccgagttcaattgcggggtggattcctcgccgcgcagccagttcgcgtcgacgtccagttcgctggccaggaattcgagcacgtcttcgcggggcatggtcttgccggccacgtattggctgatatggctcttgcccatctttacgccacgatgttcggcggcgtgcaccaaatcgacctgcttcaatcccctactgttcatcgcattgcgcagacgttccgcaaacaccgatacgctcatatccttatgcctccaaccgggagttcaatttatcttttgaacaacagttcaaagcatactcccggttcaacacaagttcaattttggcgtgttctcgagtctcggccggttcagcccaactgcgcttcaatccattgggcgacgccgtcctcgttgttgggcgggcagatctcgtcggcgatagacaacaccttggggttcgcgttggccacggccacaccccggccggattcgctcatcatgttgatatcgatgaggtcgtcgccgaaggcggcggtctgttcgagcggcacgtccagtcgttcgcacagcaggtgcagcgcgtgctccttgttggcctgcgggttcatgagcatccacatcacgccttcgctaatagagatgtcgaagtccggcggaatcagcgcacgcagctcgttccactgttcaggctcggggaagatggtgatcttatccgccacgccttcgggcacgtcgtggaagttcgtgtattggaaggcctgtgttttccaatacacgcgcacatcgaagttggtgtagcgcacgtcgttcatcacgatgccgagcttcaggccgggcatgcgatcgagcaggaacagacagacttcgcaggcacgccgtgaggagaagccaatcttgatcaaatggttctcatcggccggcgtggcacctgaggtgagcaggtcgaagtcggagtgggccgggtcgaaatcgatgagggcaccgttcagatagattacggcgtccaccggcagtttttcggcgaactggaggccggtactcaccggccgcgcggtggcgatggcgaatttcagtccggcatcgtgcgcgcggttgatggtgtcgatgctgcgctgggtgatgaaccggtcctcgaatacctcggcgtcgtgcagcaacgtaccgtcgaggtcggcgaccagcagtcggggttgtttcggtgtgatggcgtcgagaatcacagcagcccctcgcagtgttcacgcacgagttcggcggaatggtgcaatttggcctgctcgtcctcgctcagatcgagttcgacgatctcgttggcaccattggcgcgcagttcagtggggacgccgaggaacacgtcatgttcgccgtattcgccgttcagcagggtggagacgggtacgatgcggcgttcgtcccacaggatggtctgcacgatgccggccacggtggaggcgatgccgaagttggtaccgcccttggccgcgacgatctcatcgccacgggtgcgggtcttctcttcgatttcggtggtggacacggaggcgaaacggtcttggttgtcggccaggaagcgggcgaatggcttgccgccgagcgagacggtggaccatgcggtgaactgggagtcgccgtgctcgcccatcacgaagccgcccacgttacgcgggtcgaggccggtctcttcgccgatgatggtcttgagacgcgaggtgtcgagcgcggtgccggtgcccagcacctgggtgcgcggcaggccggaacgtttccaggcataccaggccatcacatcgaccgggttggagaccatgacgatcacgccgtcgaagccggaggccatgacgttgtcgaccacttcgcccacaaggcccacggtgaagccgagttcggccatgcggttggagttggccggcggcttgcggcccacggtgatgacgacgatgtccgcgtccttgcagtcggcgtagtcgccggcgcgcaccttgacgtggcggtcctggaattcgctgccgtcatcgaggtcgcgggcctcccccagggctttggcggcggagcggtcgatgagcacgagctcattgcacaggccgtgcgtgacgatgccgaaggcggcggtggcaccgacctggccggtgccgacgataacgactttgttgcggttcatagtgaccatggtgatgtcctttcgtaatactcgatagaacgcatacgacccatgaccgacggtaacggtcatgggtcgcgagcgacaagtctatatggcgtgcaagccgatcagccgaggttgaacttggtcatcatgtcgaggccgatgatcaaggccacccacaccagagcgatgataacggtccaacggttcaggttcttttcggcgacaccggaagtaccggcgttctgggtcagaccgccgccgaacatgtcggacaaaccgccgcccttgcccttgtgcataaggatgagcagggtcagcacgaagctgagcagcacgacgatgacttgcagcgtgatcttaagagcggtcacagggtacctccggattgattggactgttgaccagcatagcgcacacacgggaaaaccgtggtattagttccgtgatttcgtggatttcagtgccagtcgagcgattttggcgagttcctcaacatccagggccgcccctccgatcaggaagccgtcgacgtcgggttgggaaatgagttccgccgcgtttttcgaggtgaccgatccgccgtacaggatacgtacgctatcggataccttcgtgccaaaagtggtcttcaaatcgttgcggatggcgtttgcggcatcctgggcggattgcggagtggccaccatgccggtgccaatggcccagacaggttcgtaggccacgatgagttcggcggcttgttcttcgttgagatcgcgggtgacgtctcgtacctggcccacggcgaaatcgagttcaatgccttgacgtcgttcctcgaagctttcgccgacgcacaaaatcggctgcatgccggcggcgagcacggcacgtacctgatcgacgatattggcgtcatcttcaggatggtatttgcggcgttcggagtggccgacgatgacgtacgagcagccgagatgggcgatcatgtccgcggacacatcgccggtgaaggcaccttgggtggtcacggaaacggattgtgcgccgtaggcgacatggagcttgtcggcttcgaccagcacctgtacgctgcgcaatgacgtgaacgaggggaaaagcgcgacttcgcagcgtttgaagtcaaagcgagcgtcacgcaacagccataccagcttctgcacgaagtaagtggcttcaagatggtcgaaattcatcttccagttgccggccaccaacggaatgcgtttggacgccatatgtttcccctctaaaaaatacgtagctcccctcaaggaggggagctagaaaatggattactcaagcaccttcagaccagggagctccttgccttcgaggaactcgagggaagcgccgccaccggtggagatgtgggagaagccgtcctccgggaagccgaggttacgcacggcggaggcggagtcgccgccaccgacgatggtgaacgcaccggctgcggtggcgtcgaccagaccctgggccacggccttggtgccggaggcgaactcaggaacctcgaacacgcccatcgggccgttccacacgacggtcttggagtcgacgatcttgtcgtggaagagcttctgggactccgggccaatgtccagacccatcttgtcggccgggatggcgtcggcggcaacgacttccggagcaaccggggtgtcaccggccgggaagccggcgttcacggcgacgtcggtcggcagcacgagctcaacgccgttcttctcggcggtctcgatgtagcccttgaccttctcaagctggtcctcttcaagcagggaggtgccgacctcgtagcccttggccttgaggaaggtgaacaccatgccgccgccgatgaccagacggttggccttgtcgagcaggttctcgatgacgccgagcttgtcggagaccttggaaccgccgagcaccacggtgaacggacgctccgggttctcggtggccttggacagggccttgacttccttctcgaccagcaggcctgcggcggccggcagatcggcggcaacgtcgtagttggagccctgggcgcggtggaccacgccgaagccatcggaaacgaaggcctcgccgagggcggcgatcttcttggcgtaagcggcgcgttcgtcggcgtccttagaggtctcctccgggttgaagcgaacgttctcaagcagcacaacatcgccatcgttcatggcggcgaccttggcctgagcgtcctcgccgtaggtgtccttggccagcggcacgttggtgccgagcagctcgccgagacgggcggcaaccggggccaggctcagctcaggaacgaccttgcccttcgggcggccaaggtgggccatgaggatgaccttggcgccttcttcgcgcagggtcttgatggtcggcagagcagccttgattcgaccgtcatcggtgatggtggtgccgtccagcggaacattgaaatcagcgcgaaccagaacgcgcttgcccttgagatctccaaggtccttgagtgtcttcatgaatatcctttccttgacgaatcgcacgtcaaagtggccaattttgccactttgcatattacaggcattccggaacaaaacaccgcattcgcctactgactgaatgcggtgtttcgttacgtcgttgtcg

SEQ ID NO: 2247 - DNA, 9929 bp, Unknown
  R51_24m  MAG No. k141_47443
cctggccgtggtgctcggcatgcgcgtcaccaagatgaagtcggccactgcgcgcgtcatgttctatgtgtacgccgcattgatgggcttcaccttgagctcgatcttcatggtctacgacctcggctcgatcggcgtggcactcggtgtcaccgcagcgttcttcttcgcgctgaccatgttcggcatgactaccaagttcgacatgctcaaggccggcccgatcctgatgatcggcctgatcgtgctcatcatctcgcagatcgtgctcgccttcgtgcaggtcgacggcatgaccaagatcgtctgcgccatcggcctgatcctgttcgccggcatggccatctacgacgcgcagtccacgcgcgcgctgctgaccgaatacgaggcccagggcccggaaatggtcaagaagatctccatcctgtgtgccctgaacctgtacctcgacttcgtgaacatgttcctgtacatcctgcagctgctcggcaacagggactagcctcgccagccgattggtgggcggcatgtagcctgctcgtcaaacgtcacagcccgaccacattgtggccgggctttttcatgtctgtcacattcgcacgttaggctgtctccccgtgaaaagacaagaactcgtaggcatgctgagcctgttgttgaccgcgctgatctggggttttgcgttcgtggcgcaggtccagggcatggatttgatgtcgccgatgttcttcaacgccacgcgcttcacgctgggagcactgtctttggtgccgattctgctgtggcagcgtggccgggggagcgcagataagggcgatacagccggggtcgatgtcgttgggaccgaggcatccagggccgtctccacagatgccgcatcgaacggtgcatccgacgtcgttaccatcaccggtgccaagctgaatgcgaacaagcccgattcgtccgtggcgcgattgctcgccaacccggtggtcatttccgtgatctgcggcatcgtgctgttcaccgccagcaccctgcagcagtatggcattctgtacggcaaatcggccggccgcgcgggattcctgaccgccatgtacatcgtgatggtgccgttgctggcctgcgtgttcctgcgccggcgcatcggcatgctggtgttcgtggccgtggtgctgtccatcgccggcttctatctgctgtgcatcaccgatggtttcggttcgatcggcctggcggatatcctgctcgtgttcacggccgtgctgttcgccgtgcatattctggtgatcgatactttgggcggcaccgtggacgccatcaagctttcattcggccagttctgcaccaccgccgtgctgagctgggcgggttcgctgatcgaaggctcggtcgactgggccggcgctgctcattcctggattccgatcctgtacgccggcatcggctcggtgggcatcgcgtacaccttgcaggtggtcggccagcaatgggtgccaccgacgcgagccagcctgctgatgagcctcgaatcgttcttctcggcggtaggcggtgcgttgcttctcggtgaagtgatgaccccgcgcggttacctcggctgcgccctcatcttcctcggcaccctgctggcccaagcgccggccaggctgccgaagtggctgcaacggtgaatgaatcggccgcaggccgattccatagcacctcagtccgaggtcttaggcgcttcacccacttgcggcgcgccgttgatgtcgcggtggatgttctgcatttgcacttcgatgttctgcagcgaacgggcgcagtcgagcagtgtctgtgaatgctcgctgagcttgttgtccggcaaatcggtcttgtagcgcagcgcatgctccagcgacgcccaataatccatggcgatggtacggaactgcacctccaccggcgtgtaatgcgcgcccgaggagagaaacacgggcaccgcgtagattacgtgcaatgaacgatacccgttctgtttcgggttcttgatgtaatccttgacgcgcagcacctgaatatcggactgcgacgacagatagttggacacggaatacacgtcgtcgcggtaattacagatcacgcggatgccggccacatcgaacagattgtccttaatcgaattgacactgattggcagattcttgcgctccagcttgccaatgatcgaactcaccgacttcagacggcgttccatatgatgtatcgggtcatggctgaaccgcacctggaactcgtcgtcgagaatctccagcttggtgctgatctcgtacatcgcgccttcatacacctgcatgaggtcaacgaatttaacgacctgttcgggagtgaaggtgcctcccggaagatccaacgctttgagacgggcctgtagatcggaggttttgagtcggctatgtcggtcaagtatcacgtccaccaatatactcggcggattccagacaatctggatgttcgcggggaatctttccaagaacccatatttaagatcgtgacaaccaatggcatacgtgaccggagcatgacgaaccccgccgatagaatcggtcgttatgaatgaagacatgatgaccgaggcggagcgtgcctcgattgcagccgatggaaccgatagcttgttgggggagcgcggcaagggcgtattccatatccacacgctcggctgccagatgaacgtgcacgattccgagcgcatcgccggcgtgctggaggccaatggctacgtccctgcaaccgaggaccagatcaatgacaatgacctcgatttgctggtgctcaatacctgtgcggtacgcgagaacgcagccgaacgcatgtatggcaccatcggccgattcaatcgcgtcaaactggttcggccgaacctgcagatcgccgttggcggctgcatggcccagcttgaccgcaagaagatcgcggatactgcgccatgggtttccgcggtgttcggtaccaagaacatcgaagatctgcccaagctattggatcagaatcgtgcgaccggcaaggcgcaggtccaggtcactgaacaattgcggcagttcccgagccagcttcccgccgcccgcgcctcccgcatcagctcgtgggtggcgatttccgtgggctgcaataacacctgcacgttctgtattgtgcccaccacgcgaggcaaggaaaaggaccgccgccccggtgacattcttgatgagatccgccaatgtgtggccgatggtgccaaggaggtcacgcttctcggccagaacgtgaactcgtttggttatggtattggcgatcgatacgctttcagcaagctgttgcgcgcctgcggaaccatcgacggtctcgaacgtgtgcgcttcacttcgccgcacccggccgccttcaccgatgatgtgattgcagccatggccgaaacgccgaatatcatgcatcaactgcacttcccgctgcagtccggttccgaccgcatcctgcgcgcgatgcgccgctcctacaggtccgccaagttcctcgatatcctcggtcgtatccgcgaggccatgcccgacgcccaaatttccaccgatatcatcgttggattccccggcgaaaccgaggaggacttccagcagaccatggacgtggtgcgccaggcgcgcttctcctcggcgttcacgttcatctactcgccacgccccggcacgccggccgccgcaatggaacagattccgcgcgacgtggtgcaggaccggttcgaccgactggtggcgttgcaggagcagatcaccgaagagaacctcgccacattcgagggccgcgacgtcgaagtgatgatcaccggcaaactcggcaagaaggacaccgacacccaccgtgtcaccggccgcgagaaaaccggcgtgctggtgcacatcggcgtgcctgaaggcgaaccggtacctgaaatcggcgatttcgtcacggtcaccgtcacacacgccggccgccataatctgcttgccgaccccgatgtggccgctggacagacctattccgtgcgacactgagggggcgtatatgacgcaacgagtcgtctccatcgtcggtcccaccgcgtcaggcaagacggggttgggcatcgccatcgcccggcgtctggccgaagcgggggagcgggccgaaatcgtgaacgcggacgcctaccagatgtaccgtggcatggatatcggcaccgccaaacccaccgccgaagaacaggcggccgtgccgcatcatctcatcgacatcatcgaccccgaagacacgatgagcgtggcccgattccagcagcttgcgcgcgagaccatcgccgacctgcaatcacgtggcatccggccgattctcgtcggcggctccggcttgtacgccagagcggccatcgatgacatcacctttcccggcaccgatcccgacgtgcgcacacgtcttgaggaacgcgagaaaaccgagggtgccggtgctttgttcgacgagctgcgggccaaagaccccgaagccgccgcgcgcatggacccacgcaacccacgccgcaccatccgtgcgctggaagtcatcgagcttaccggcaaaccgtattcggccagcctgccgcgctaccggtacgtgattccgtccgtacagatcggactcgacctggaccgcccggatttggaccatcgcatcgacctgcgcaccaagcagatgtatgacgatggattcatcgaagaagtcgaacggctgcgcccgcatctgggtgccaccgccgtacgcgcgctcggctatcagcagatcatcgacctgctggacggtatctgggatgtgaacgacgccttcgcggacatcgcacagaaaaccaagcgactcgcccgcaaacagatgggatggttcggccgtgacccgcgcatccactggctgcaggccctgaacccgaaactggtcgacaacgcgatggccattatcgcgcacgccgacgccggcgactacgacccgatcgacgcccgagccgacgaatacacccagcatcatctgggcgatatcacggcgtaggaatcagccgaaggccggtgcaatcacccgcaatcagtgtgcaggcccctgattccagccggcgatcaagaacacgcgcgtcggattcgccgggcgtagtatcgcgtcgaacatcgtctccagtgcagacgtgtcgccccgatatgccgagtgcttggcggagcgatactcctcgcgcgtcactgagccccagtcgagatcccagccggcgtcatgcgccaagcgtgaaccgaatatacgcagcaccatcgcattgccgccacggaacggatgcagataaccgagctcatcataaatagaagcgaacgcgtgaacgaacacgtcgcgatccaacgcatgcaggttgcgcttgtccgccaactccatcgcgatgttgtgcgcgccggtctcaatgagcccagccgggaagaacgcctccggattcgcggcccgagcccggtcgttcgtcacctcgcgtgtggtgtttgaggtacgcaacttgcccgcatcctcgaacacgccttcgaacagccccttatgaatggcggtcaactcgtccaagtcgccagacggattccaccgacgttccgccaacaatacggtacgtgcgaacaccgcatccgcgcgatccgtggcatgatcatccagactgccggcagccagacgatcctttccggcagggtcggcggcggcgcgcagacgcatggcggtctgctcgtccgccacgtcgatgagatgggtcacgggctccaagccacgttcgtaggcaaccgcggcgcgcatcgttgcctcgcccggcgtcatcgcttccagtgcgcagttcttgagtgcaaatgcgactgcgctcgcacgctctgcgggtgtcatgcaacccatgataaggcatattcgcgctccagcggggaatcgactcggacgaacctcgacgaaccgcggcgaatcggctgtcgggattcgtcaatcgaccatatcgtcacggtgtcgtcaccaaccatgcacccccgtactagtagaatcagacccgatatggcacgaacagcatcctccaacagcaccaaaccccgtaaatccaaagacaacgggtctacccatgatggcgaaaccaaggtccagcccgagcttgacctcgaacctgagccgttgtggaagaagatcctgctcgcgattccgcgcgcgttcggctccggcgtacgcgccgtcaccggcgtcggcgaatacgacccagcctaccgtcgtgacggtttgtgcttcctgctgctcgtgctcgccgtactgttctgcgcgtccgaatggttccgtgtcagcggtccattcggccagctgcttcacgccatcgcggccggtgtgcttggtctgatgagcgtcgtgctgccggtgttgctcgccgccgtggccttccgactcatgcgcaattccggtaaagggtccaataacccgcgtgtggtcaccggttgggtgctgctcatgtggtcgatttgttcgatcatcgacgtggcgatcgccgccgaccacaccggattcgacatcacgattctgcaatccgccggcggcctgttcggcttcttcctcggctcaccgctcgcctggggcctttccaacgtgttcgccatcatcattttcgtggtcgtcggcctgttctccttgctgatgattaccggcacccacgtcaccgatttgccggaggatgcgcgcaaaatcgcagctaaaatccaacgcaaaccgtatgtgccgatgggccaggaggccgacggaagcgccagccagttccccaacgaggtccgtgtgggagataccacactcgcctttgccgacggtgttccctcgcatgacggcaacgacgacggcaacgacaacgatcaggccggcgatgcacggcccagcctgttcgcacgactgttcggccgcaaatccaagaccgaagacgacaaaacccttgacaagtatgctgccgacgatccgttcgaccgtgccgccagccagcatggtgccaccgccgaaaccccggtggtcgatccgatgaccggcgagattaccggtgcgcgaaccattgcatcgtcttcgtacgacggtcgtccgcacctatccagccctgcgcctgctgccgatgcggatgatggcgacgcttcccgaacccgcgtcatcaccagtggccagaccatcgccatgcccggtgggggagcggtagacgatccgtgggcacccagtgccgcccaggccggtactgtcgcgctcgcaggggcagccggggcgatgggagcggccggggccgccggtgccgcggccgcggcagccgcgaccggagcctacgcaggcgccgatgcggatggcagcggagtcggccagggcgtgcccaatacggacggacagccgaatgccgccgccggcaacggtacagacgacgacgccaataggccgtatcagttgcccgacctgaacctgctgaccaaaggtcagccccatgcgatgcgcaccccggccaacgatcgcgtgatccgggcactgacttccaccttcgaacagttcaacgtggacgccaaagtcgtcggcttcctgcgtggcccttcggtcacccaatatgaggtcgagcttggccccggcgtcaaggtggagaaagtcaccaacctgcagcgcaacatcgcctacgcggtggccagttcggatgtgcgcatcctttcaccgattcccggcaagtccgccatcggcatcgaaatcccgaacgaggatcgcgaaatcgtgcacttgggcgacgtattgcgctccgacaaggccgtgggcgacccgaacccgatgctctccggcatcggcaaggacgtcgaaggccacttcgtgaccgccgacctgaccaagatgccgcacctgctggtggcaggtgccaccggttccggtaagtcgagttttatcaactcgatgctcacttcgatcatcatgcgtgccacgcctgaacaggtgcgtctgatcatggtggaccccaagcgcgtggaactgtccgcctacgcaggcatcccgcacctgctgaccccgatcatcaccgatccgaagaaagccgcacaggccctcgaatgggtggtcaaggagatggatgcacgctactccgacctcgaattcttcggattccgccacgtcaaggacttcaacgaggccgtgcgcgccggcaaggtgcatgcgcccgccggctcccagcgcaaggtggccccctatccgtacatcctcgtggtggtcgacgagatggccgaccttatgatggtggccaagaacgatgtggaaagctccatccagcgcatcacccagctggcacgagccgccggtgtgcatctggtgctcgccacccagcgtccgtccgtggacgtggtcaccggtctgatcaaggccaacattccatcccgactggcgttcgccacctcgtccgccaccgattcgcgagtcattctcgacacggtcggtgccgagaccctgattggtcagggcgatgcgctgttcctgccgatgggttccgccaagccgattcgtgtgcagggctcgtgggtgtccgaatccgagattcgcaaggccgtggagtttgtgcgcacccagcgcaagccgaagtaccgcgaagacatcgaacagatggccaaggaagccgaaaagaaagacagcatggagcctgacgaggagatcggcgacgacatggacgtgctgctgcaggccgccgaactcgtggtcactagccagttcggttccacctccatgctgcagcgcaagctcagggtcggcttcgccaaggccggccgactcatggacttgctcgaatcgcgcggcgtggtcgggccgtccgaaggctcgaaggcccgcgaggtgcttgttcagccgcaggacctgccgcaggtgctcgccttcatccgaggcgaaaccagctcgctcgaagccagcgccccgcaacaacccgaactcggcgaataattcacccatcgacctccctctgatgagggaggtgcccgaaggggcggagggagagaagcgcggacagcatcagcacgaaacctgattcccgaataatagcagtcaatatccagccaccactcactcaaggtaggagtatgggggtaacgtgaacactatggatgagaacacaatggacaagcagtcatcgcccaaatcatcgctgttcgacggatggaacgcgccgccgaacctggtcacctactcgcgcatcgtactcgtggtgattttcctgacgctcgacattctcgccggggcctggggcgccgacgacctcaccctgcgttggatcgccgcggtgctgttcatcgtcgccgcgtccaccgataaaatcgacggttggatggcccgcaaatacaatcaggtcaccgaaatgggcaagctcatggatccgatcgcggacaagctgctcacttgcggcgcaatgattgtatgctccgcgttcggcgagctcggctggtgggtgaccatcctgttcctgattcgcgaaatcggcatcaccgttatgcgcttcttcgtcatggagcgtccgggcggcaaggtcatcgccgccgcatggcccggcaagctcaagaccgtattccagtgcgtgggtctgtccatgctgctgctgccgttctggtcattgggtaacggacaggccacgccgttctggatgaccgcttactacttcctgacctacgccatcatctacgtggcattggtcctgtgcctctactcgggtgccgtgtacctgtacaacacgttcgtcgccccgaagcggaagtgacggatattccaatgcaggaattgtgcgacagtctcgcggccggcatcctcaagatctgcgaggcgaacaatacgaaaatctcctgcgctgaatccctgaccggtggcctgctcgccgatgcgttcgtgcgtattcccggtgcctccaacgtgttgctgggctccgctgtcacctacgacatcaatgccaaggc

SEQ ID NO: 2248 - DNA, 6827 bp, Unknown
  R51_24m  MAG No. k141_48183
accagccggccaaccagcctacgaacgcggctgctacggcgtcatccgcagcttcgacggaagagacgtttatttcccatggcctgcgtacgccgcaacgtcgtcacttgcatccgctggccgccgcgctggccgccgccgcgctcgccggcgcgggcggactactggccacatggctgatgtccgacgtgttcatggtgttcggcgtatcgctgggctggccggtgatcctcaccgtcgcgggaggcttcgcgggcctcggcttcgtgctggccgccgccgtgacgttacggggggcccgtcgcgcgctggccgtcgtgctggtgccgctggtgctggcgtccaccgcgcttggcgtggactcgatctacggcgaataccagaccatcggcagtctcgtcggctatacgccataccccccgctcggttcggtcaccgtgcgcaaggcctcgatgagcgtcggcgagtggcgcgacaaggcgcgcaaggacgctctgccatccatgcccgactcgggcagggtgttcgtcgtcagcatcccgaacaccgaatccaagttcaaggcgcgcaaggcgatggtctacctgccgcccgccgcgctgtccgaccgcccgccggccctgccggtgatggagctgctcgccggtcagccgggcagtcccggccgcctcatcgacgccggcaacatcgccgccacgatgaacgcttacgccgccgaacatgacgggctggcgccgatcgtgctcgcacccgaccagaacggttcggccatgcacaacagcctgtgcgccgacaccacccgaggcaacgccgaaacctacctcaccaaggacgtggtgaactgggccagggcgacgctgccggtagccaagtcggcccgtatgtgggcgatgggcgggttctcgcaaggcggcacctgcaccacgcagctggtgccgcgtcaccccgacatctacggtgcgatgctgccggtggatggtgagctcgagccgaccgacggcagcgtcgagacgatggtccggcgatatttcgccggcgaccgcaaggcctacgacgggcaggtgccggtcaacgccatcgccgccaccggcacggccggccaggcgctgttcgccggcgccggcaaaggggatcggaagtcggtagccaacatgcgcaccatcgccgcggccgcccgcgcggccggcatggagaccaccgaactggtcgtgcctggcgccgaccatgactggcatgcggtgcaggcggtctggaaccccggtctcgactggttcggcgcgcgaaccgggctgggcgaaatgacgaaatcgttggaggaatacccacaagtggaggtgttgcaatgagcgaagaacaacagcatgggaacgcgcggccggcggccatgccgcagacgcggcggcccctgcgggacgcggaaccctcgcggacgaagcccgcaacgacctcccgcgccaccaaaccgcatacggcaaggtccagccatgcggcggaaagctggcgtgaactggccggtgacgtgcggcagtgggcggacgaccaccggttggccgtcaccgccacggcggcgctggtggcgctgaatctggtggcgtggctggtggccgcgatggccggattcgcgtttccgctgcggctcagcaccagcatggccgcattcaacgccggcaaactcatctgctcgctgttcctggcgcgcggcgtcatccaactcatggtcgacgccgtcctgtggctcgtcatgctgtcgatagccgaaccatggctcggccgtgtgcgcaccgtcgtcaccgcgctcgcctgcgcggccggcggcgtgctggcgggcctgaccctgtgcgcggcggccggatggatgttccaggactccctgttcgtctcccgcatgcggttcgcattgagcccgctggtgttgccggtcggcgcgctcatggcggccagcgcgttctgcagccacctatggcgcaggcgcatccgactcgtcggctatgtggcgatcctggtcacgttgctctacagcggcaaccccagcggctactgcatactcgccgccgcgctgatcggccatgccgccggccgtgtgatggccggtccgcccgcgcacgtcgaagccgaatggcactggctgcgcagcacctccttcgaggcgcggcgcatattcgcggccatcgccgtggtactggccctggggccggtcatcgccatcacctcccataaccatgcgggcccgctcagcacgatcggcctgctcatgagcccggtttccgtcgacgatggcatgctggccaaatgcttggccggtgacacgcacggcggctgcttcctgcagttcgatctgctgcgggcctcgatgcccggcgcggtgttgcgctcgttgctgcccaccgccgtgaccctggtgctggcgtggggcctgtatcgcggacgtcggttcgcggccatctgcaccgtggccatcaacctgttcacggtggccatcgccgtcgcctactatctggtcgtgccgctgagcttcgcgccggacggcatggcctccctgctgcagcacggcgcgatcgtggcctgcgtggcgaacgtcctgcccccgctgctgttcgccatcgccctgctggcggcgatgaaacacttcccgatccgcatcggctggtgcaggctggtcggcggcatcggcgccatcgtgctggcctggctggcgtgcgccgccatatacctgatatacggcatcgcccaacccgccaccttctcgccacgcgctacggcctcgtcgctgctggccgagctgccgggacgcttcctgcccatcggcttcctgagccatatgaagctgtcgttcgtgccgcgcactccgatggcctcgatcatgtaccaaggcgtcggcctggtgttctggatcgtggtgctggccgtggtgatccactggatgggcgacgtgagcgaatcgaacgagcgagcccgggcgcgcgccgaacgtctggtcgaaaccggcggcgaatcgatgagcttcatgaccacgtgggaaggcaacagctactggctgtcccccacgggcagatcggccgtggcgtatcgcgtgctcaacggcatcgccctgacctgcaccggaccgttcggcgatccggcggaatggatggacgatctgaacggtttcgcccagcactgtgcggaacgttcgctgtcgccggtgttctacggcgtgcatcgggaacagcgcgacgcgttgctggaagccggctggaactccatcgaggtcggcagcgaaatggtggtcgacccgcgcggctggaagacgaccggcaagaaatggcaggacgtgcgcaccgccatcaacaaggccaagcgcgacggcgtgaccgacgtgcagtccacattcctggaagcgtcgctcgatgtgcgcgaacagatcgaggacatctccgaggagtgggcgcagctcaaggcgctgccggaaatgaagttcacgctcggcggcgtcgaggaactgcgcgacccgcgcgtgcggctgctttacgccatcgacgcggacgggcgcgtgctgggcgtcaccagctggttgcccacctggcgcgacgggcgcatcgtcggctggacgttggatttcatgcgccatcgcaccgacagccccaacggcatcatggagttcctgatcgcgcgcatggccgagcggctgcgtgacgagggcgaagccgatcccacgcacgccgtggagttcatgagcctgtccgcggcgcccctggccggcatgaatcccgatcgggacaacgccggggaggacggggcaccggccagcgaaggcacgcaggtgctccaacacgcgctgcagatcgtggccgactggatggaacccgcctacggcttccactcgctgttcaacttcaagcgcaagttccagcccaccgaagcgccggtctacgtgtgctacccggacccggcggcgttgccgcagatcggactcgcggtggtgcgcgcctacgtgcccagcgtgacgcccgccgaagtggccggcatgctcagcacgctgcggtcgtgaaggtgtgcacacgggtacgcaggttagccgattcgagcctgagacggggtatctgctttcagagaggtacatttggccccttgcggacaactaactgccttcaaagaggtgcctgaactctgaaatctcgagtatgagcgttgcaatgacaacgtttgtactcggggtttcccgtattcggtgcctctttgaacgaagatagcattctgcagaagcccgaatgtacctctttgagcggagaaagcctgacaaggagggcgcggcaagcgctatctccgtttcgaggggctgatttggtctctcccggaggtctactcccgtttcgaggggctgatgccgaagtattcacgctccaaaatcggcggaatggcgttggcgcggatgggtttttacatgcggtctagcggccgaccagccccttgaaacgggagtagacctccggcggggatcaaatcagcccctcgaaagcggttttgccggtgcagaggtgtcgttgactgcatcgcgagccgcctcgacgtagtaacgtggggcgtatgagcgaacgtaacgaacacaatgacggaaatacgcaaaccgcatacttcgccggcggctgcttctggggtctggagcgctacttccagaacgtcgacggcgtcacggacaccacggtcggctacgcgcaatccaccgtcgaatcgccgacctacgagcaggtatgcgcgggcggcaccgatgcggccgaaaccgtgaaagtcgagtttgacccggcacaggtcagcctgcggacgctgacattgctgttcctggaggtcatcgacccgttctccgtggaccagcagggcgaggaccgcggccggcagtaccgcaccggcatgttctacacggacgagacgcagcgcgccgtgtatgtggcggctctggagcagctggtcgaccgccagccgcagcgcccggccgtactggtcgaaccgctgcgcaacttctacccggccgaggcacaccatcaggactatctggtgaacaaccccggcggctactgccatgtaccgatcgccgcaatcgcgaacgtaaaacgccgtcagaagtacgtggaacgcatctgggatctgacgcttgagcagttcgcggtcacgcagaacgccgctaccgagcgcccgttcgtcaacgagtatgacgaggagtttgagcccggcatctacgtggacatcgtcagtggcgaaccgctgttctcgtcgcaagacaagttcgattccggctgcggctggcccgcgttctcccgcccgattgccggtgacttgctgaccgagcatgaggaccaccgcattccgggccgcgaccgcatcgaagtgcgcacgtcggacacacagattcacttgggccacgtgttcaccgacggcccggccgaccgcggcggcctgcgctactgcatgaattccgccgccctgcgcttcgtgccgcgctcgcgcatggccgaggaaggctacggcgactggattgcggttgtggatggggatgatcaggcatgagcatggagaatatcgcgggcgctcgcaaacctgccaagcgtgaggatgagcggacggttgccggcgagcatcgcatgatgcgccgtgcggaccgcgaggtgaccgatcccgagcggatcgccgcgatcatcgccgcctgcgacatcgttgaagtggcctatgcggatgccgagggcctgactatcgtgccgctgaatttcggctttgattacgacgaggcgactggcaagctgacgctctggttccactccgcgccgcgcggccgcaagctcgacgcgattcgcgccgccgccggtggccgactgcccgtggctttcaccatgcagaccgactgcgaggtggtggcgggccgcaccacgtgcaattggggtgaggcgttcaagtcgatcgtcggcaatggcacggcgtcactggtcgaggatctggatgaatgccgccacggcttgcagacgctgatggcgcagcaggcgcatatgccgaatgtggaattcactgatgcgcaggtccgcagcgtcacggtgtggaagattgagtccgactacttcaccaccaaagtccgcaccaaacccgtgcccgcacacatgcatcagcgttagccggggatagcgcgccacctccccactggcgggaggcagcgcgcagcgccggtggatggcccacgtccggacccgatagacttgccgccatggcagcagtgacagtggtaattaccagctacaatcagggcccgttgattcacgaggcagtcgagtcgtcattggccccagacggttcgtccggaacggatcatcatcgtgaacgatgggtccgatgaccacgcatccgtcgagatgctgaacgccactctcgacgattgccggcacggggcgatggatgcgaatggtgtggccatcgacctcatcggccaggcaaatgccggtccttccgccgcgcgcaaccgtggcatcgccgccgccgaaacgccgttcgtagtggtgttggatggcgatgaccgtttgcggccggccttcattgagcgcacgttgtcgatgttgtccgccgacaaaacgatggtcgccgcatccggctggctgcagactttcggtgtcctggaatcagtggtccagccgactggtggcaatgccgccgcgttcgtgtcgcataattgctgcccggccacgtgcatgattcgccgtgtcgcgtgggagcgctgcggcggctacgacgagtcgatgcgcggcggcttcgaggactgggacttcttcctgtcgttgttggagtgcggattggcggtggaaaacgatatctgc

SEQ ID NO: 2249 - DNA, 2545 bp, Unknown
  R51_24m  MAG No. k141_50433
aagcgccgaaccgcgaaagcgcctgtcggcgcaagggccgctcgcggcggcaaaaaatggagcccggggcttaagcacggtccgacgcggatacttagtatagcttgcgatggggctcgccgcgccgggggaggtgtggtgttggctggtagctgattgttggggtgcggttggtgggtctctccctcagtcacgggcatcgcccgtgacagctccctcatcagagggagcctggagcagggctactccaaccgtccgcgacgccagaggttggcaccgtgctggaaatccttggcggtggccatgaggctgccggcggtgtgcataaggcgggcggctttggtgcgcacggccttctcatcggcatccgaggagaaggcgccgttggcctcggcccgggtcaccatgcgccgcgcctccatgcgcaagcccaacgccaccacatcggtaaacgccgccgcacgctcaagcgccacggcaaaatcgcccacaaaagcaccggagagaatcgaatcggccaatcgcacgatgtcatcttcactgggagcctgatccacgccggcgatggcggaggcggtagtggccaccggctcacccaagcgccacagatgcgcgatcgagtcgcgattcgatcgcatccacgtacgcaacatatacagtcgccacagcacaccaggcagcgaatccggctcggcatcgctccacagttcggcgatttcatccacgccgaccgtctccaccaacgtgagcacccgctcaacaaccgccgggtcttcgctatggcgcacacgatccagcaatgcggcagcagacagatgactcatctcgctcaacgcctgcgggtccatgccaccggccaatccatcggccacagccgggtcgagctgagccgggcgcgaggggcgtgaagaacccatgcgagcaggtccgaatgccgctccggccgcacgcaacgagccgaagcccgggcccagactgccggcggcaccattgtgcgcggcatgagctgcagcggcagcggccgaggagttggatgaatcaggaaatgcgggtctagtagacaagcggttgaaccttctgaatatcgatgattttgggaccatgaggcgtcggagtgacgaacagcgccaccgccgtgccggtcggcatgaacggtgtcttggcgatcaggcgtttgctcaaagacggcgcaacgcacatgctgcgcaggtgtccgaacataccaccaatcaccggccggtgcatgcatatcgctatgggctgacggcgctcaagtgcgaactcgatttcgctgagtagacactcccatgcggtgtccggcgcagcggcgtatgcatcttcggtgagcggatcgagatgaaccatgtctcgtccggtctgccacgcgaacatctccaacgtctcctggcagcgcacccaaggcgacgtggccagtcgggtcggattgaaacacgccagctcgcggttcagcgcgtatgccgcagccgcgccgcgcggcgtgatcggacggttcgcgtccgaacccttccacagcttgcgcgcttccgctttgccgtggcgcacgataatcaccggcaccgcgtccagtgcaccttcttcgacccgatcaacgaatagcgcgaggatgtccttatcggtggaatggctgagcttcttgcgggcctcggccggcgtcagccacaaaacttcgtcgatttcgccgatgtccgcccgatgcaccgggccaaacgcatgggtacgccgcaggttgtcgatggcgctgatcggcgtggccatccagaactggatatgcttggtatccgccgaccgatccttggtatggcgctgtttgctgccttcttcggacagcgggtactcgatgtcgcccagataagggccaagttccacggacaggcccgattcctcgccgatctcgcgtacggcggcatgccggtgcgattcgttcgggtcgaccttgcctttcggccagctccagtcgtcgtatttcgggcgatgcacgacgcacagttcgatgcggttgagtacgttgtccgccgcggccgggctgtcggcctgcgccgggtccggggtgggagccgcgtccgatgcgccgtgtgctgccgtggccttgccgtcagaatccgtggtgttcgcgatgatggtgccatcggtggcaatattggatttcgctgatggagatgatgcctgcgtcggctcggcatcatccttccaccggtacagaataccgccggcggcttccacgattcgtctcatactgttcgtacccatctcttgtattgtaggtcacgttggaccgctgctacgtagttttgcgcgctgaacgacgatgcccggcatcctctcgaaagaggagccgggcatcgtaaccaccctcagtcagcttgcgttgacagggagcatcgagtgaaatcagttgtgcgaattggggcggcgctggtgcttgcgaatcagatattcctgactgtcgaccagcgggcggccctcgtcgtccttggtgtgcagcacatacgtgccgtcgggctgcatgtgccagctcatggtggag

SEQ ID NO: 2250 - DNA, 3336 bp, Unknown
  R51_24m  MAG No. k141_53178
tcatccaccgaatgatgcacatcgtgggtccagtcgcgcaggttgtgcgctttgatctccaacaatcccttggcctgggctttgcccatcaggctgaggttcatcacctcaaagtattcggggaacacgctcacgatatcgatcttcatgttatccagcctaacggtagccccgcccgcattacacggccaccactacactattgcggtgatgaatacgacgatgaacctccccacccgcaaaaagcccgaagtgttgtccccggccggcaacctgaggggcctgaaaaccgcggtcgattatggtgccgacgccgtctactgcggcggcaaagccttcggcatgcgatcggcccccaaaaacctaagccttgaggactttgaggaaggctcgcgctacgcccatgaacgcggcgcccgcgtgtacgtgacctgcaacgtgctgccgcgcaacaacgagatcgaagccatgcgcgagtacgtcggccagctcaaggacaccggcgtggacgcgctgatcgtctctgacatcggcgtgatgatgatggcccgccaagtggctccgaacctggaattgcatgtctccacgcaggccggcgtcaccaattaccaagctgcgaacgccttctatgagcttggcgctcgccgtgtggtgttggcccgcgagatggacttgcaggccgtgcgtgatattcgcgccaacattcccggtgacctcgacatcgaatgcttcgtgcatggcgcgatgtgcatggcgttctccggccgttgcctgttctccaactatctgaccgggcgtgatggcaatcatggcgaatgcgcgcagccatgccgctggaagtattcgatcgtggaagagaagcgccccggccagtacttcccgatcgagcagaccgagaacggcgcctatctgttcaattcgcaggacatgaatatgctggggcacttggatgatttgattgactccggtgccaccagcctcaaaatcgaaggccgcgcgaaaagcgcctactatatcgccgccatgaccaacgcctacaaaaccgcggttaatgaatacatgattcaacgcggttttgaagacgctgatggcaatgttctgaagcctttccgtgaccgtgtgattcgcccgggcgaccccgattttggccaaggaaccgaagatcaagtgatgagcaatgccgatgccgcgttcgccggtgtggccgatgagggatatgaccgtggctctgatactgcggttgccgattcggtcaccggctcggttgccgcagaacgtgaccgcgtgacggttgctgatgccgccgactcaactgcctctggtacgtcggccggcaccgccgtcgaacccgacggcatgagctcccacgcccgctccacgcgccgcaagtccaacaccgcggtcgaacagatcgagaccgattggaagcatgcggccgttcgcccggccccgcacgtcgaactgcccgaatggctgctcgaggaaaccgacaaggtggcccaccgcgactactccaccggcttctattacccggagcacaaggtcacacagaacaccgaccgctccgcctacttccgctcatggctggtagtgggcgaagtgctgagctggagcgcggacgaaggcggacgtgtcacgctgatgagccgtaacaagatcgagcccggtcaacaggttgaattcctgctgcctggcgagagaccattggtctttaccgtgccggaaaccggcctgcgcgatgccgatggcgcgccagtacccgccatcaataatccggcgcacgtgttctcgatgccctgcccgcaccaggtgcccatcaacgccgccatccgctcgcgcaccaaaaagcccaccctcaaagccgaataacctaccactccgccccccgctgactgggggtggtcatgggaatcatgaacaccgcccgcacccaagaaagaatgccttatgcctgaatacagcgaagaaatcctcgattccaacagcatcagctctaccgataaagccggtcgccctattccggtgaccatccccatcgcactggcccccggcatcaaggtggtgtacaccacgcgactgggcggcctgagcgccggcgattacggcaacctgaacctcggcggcaagtccggcgacgaacctgaggccgtactgtcgaaccgcatcgcactcgccgaagcggtgcaagcccgcctatcgctggtctcccaagtacattccggcgtggctgtggacgtggacgactcgttcgtcatcaacacccccttcggcttcgacgtgtccggcacacatggtgagactgacactccgcacgtcatcgaggcggacggccaggtcaccgcacaatccggcatcgccctaggcatgttcgcggccgactgcctgccggtgctgctgggcgacccggtcaccggcatcatcggtgcggcccactgcggccgtcgtggtctggagcgtggtgtgatcggcgccacggtagacctgatgaagagcaagggtgccgatccggcgaacatcgtggccacactcggcccgcgcatctgcggcgactgctatgaagtgggcgacgagatcgccgaccagttcatcaagcgcttcccgctgaccaagacgaagacccgtttcggtggtgccggcatcgacatcgccgaagccgcgatgattgacctcgccttcgccggcgtacaccaggtggtcgattcgatgccgcgcgtgcacgccgccacccagtaccttgaggaagacccggaactcgccgaactgtgccgtacggacggcgaaggcccggccgagctcgcggagcgcatcgacaacatcagccacagcatgtgcacgctcgaaaacccactgtggtactcgcaccgccgcgccgcgctcgccaacaaaacacacgaaggccgcctccttgccctcatcgtgcgtgactaaacggagaatgcgagcacattccgtggagaagatgtgatgcagttcacggacggccagccctcaccctacggtggtgcctatgactgagagagatttcgatacccccgtcgagacgcctaccgtccagccggcccccgctcggggcgccaaaccggcacaaaccgtgccggtggtggccgtggtgctggccgccggcttcggtacgcgcttcgaccccgacaatcccaagcagcttgtctccgtgggcggcaagcccatcgtgtgctggagcattgatgcctttgaacattgcgatcgcgtcagcgacatcgtggtggtggtcaatcccaaggtgcgcggtgaagtggaaacgttggttggcgagatgggctacaccaaggtccgcgtcatcattgacggcggtgacga

SEQ ID NO: 2251 - DNA, 17872 bp, Unknown
  R51_24m  MAG No. k141_54015
gcaggtcgcggatggagaccgcgggaatcatgccgctggcgtccgccgaatcctcgtgatagcgcggcacgttatccggcatgcgcgcgtaggccagctgggacagggcgagactgtccgcctcggtgaacggcagtgcggtgaaagtgtcgaaatgttgccggatatcgtcggtgatgttccccatagcagccttccttgttcgaatgcattcgagagaaacgaacctacggtaattctacgccgagcgggttttcatcacaggcgagtcgggtcccagagtctagaaccctatctcgccttcaaggggctgatttggccttctggagacatctatctccgtttcaaggggctgttcatccgtcatatcccgagtatgagcggcatcaccccaacgtcattccgccattttcatgctgcttctacttgggcatcagcccctcgaaacggaagtagatctctggaaaccacgacatcagcccctcgaaacggagatagcatcaatttaggcccagattgcccgttacagcatcgggtaatacttaccgtgatcgattttggcggcgatatcacgtaattcggcagcatctcggcggtcttcttcattaccttgcgacaacttgttcgctttgctgtccagatgatgctcgatgccgaagtaactgcatatccccacgagcgcaaacagccctataccaactaaccagttcatagcacgctccttgccaaagcttctgccttaatatggtactgctgttcatggatcgtaataaaaaaagcgggctcgcaagcccgcttttggttttaggttgaagacgatcaggcgccgtattcctcaaggtaggcggcggcgcgctgctggatatcgtggctgagcaacggggtgccgtcggagttcttcatcttggcggcggcgtcgaagatctcgcgcacgttggcgatggagagcaccgggaagccgaattcggcttccacggccttcacggcggacaggtcggagtccttggtcttctccatgcggtccacggagagcacgagacccacgacctcgacgttcgcctcggccttgagcttggggatgacttcgcgcacggcggtgccggcggtcatcacgtcgtccacgagcagcaccttcatgccgtcggtcagcggggtgccgaccatccagccgccgtcgccgtggtccttcttctccttgcggtcgaaggtgtatccaacggtcatgttgtggccggcgttcagcgcgatcgcggtggacacggccagcggaatgcccttgtaggcggggccgaacacggtgtcgatgttgcggggaatcgtgttgtgcacgatggcctggctaatcttttcggcgtagaacgtgccgagcgcggcgatcttcttgccgtcgtcgaaggcgccggcgttgatgaagtacgggctcttgcggccggacttcagcgtgaagtcgccgaacttcagcgcgttggattccaacaggaattcagtgaagcgatgtgcgagtgtttctgccatgatgttccttacctccaagtctgtcctgcggccagtttagcagcgagttcgggacggctgtccagcaggtcgtcaagttcgcgggcgacgcgcagcggggccaccgggtcgaagagcgcggccgcacccacttcgacggcgttcgcgccggcgtacaggtattcgagcgccttctcaccactgtcgatgccgccgagtccgatgatcggaatctccggcaatgcggtgcgcacccgatagacggctgccaggccgaccggcagcacggccgggccggatacgccgccggtgacgttggcgatgatcggctggcctgtgcgaatgttgatgcgcatgcctttgagcgtgttgatcatgctcaacgcgtcggcgccgtgttccacggccgcgcgcgccggcacggtgatgtcggtgacgttcggcgtgagtttgacgatcatcggcttgtcggtcatcgagcgcagccggtccataagattggcgagggccaccgggtcggtgcccacgctcatgccgccggcggaaacgttcgggcagctgacgttgatttccagcatgtccgcgtcggagtcggcgagcttttccacgaccgccgcgtaatcgtcatcgcaatgtccggcgacattggagatgacgaacgcgcccgcggccttgagcttgggcaggtcttcggccaagtaatggtcgatgccggggttctgcaggcctacagcgttgatgttcgcggccggcgattcggcggtgcgcggcgaggggttgccctcccacggcacgggcgaggcgcccttggtgcatacggcgccgagctggctgacgtcgtagaaccagcgtacggcggcgtactggaaggtgccggaggcggtgccgaccggattcttccattccagaccggccaccttggtgtggtgcttccacacgtggggctcgtacaggttgatgtggttgtcgatgccctgcgcggactggttgtttgcgctcatcgtcactccccccatccgagctgttcgcgagtgaacacgggtccgtcggagcagaccttgagccggccgtccacggtgtcgatggtgcacagcacgcaggtgccgtagccgcagcccatgcgctgttccatgctcagctgcgcggggatgccgcgttcggcggcccaagcggccacggccttcatcataggcagcggtccgcaggacaagatgatcggcttgcgatcgtaggccttcaggtcgtcgccttgttcgagtttgttgagcaggtcgaccacgttgccttcggcgtcgtcgatgctccacgaccagtccgcgtaccgggagacgtattcctcagcgaagtggtcgttgcggtagccgaatacggcggtggcaaaggaggcgtcgtgttcggcgagcttttgcgcggcgtagattagcgggggcacgccgagtccgccgccgacgagaatgtagttggcgtcttccttgaggttgaagccgcggccgagcgggccgagcacgtcgacggtgtcgccggcctgcagccttgccaactgttcggtgccgtggcccacgacggcgaagatcacgctgacttcatcgccgtcgacttcgctgacgccgaacggacgcggcatgagcatgaagtcgtcgtgcgtgaacaggttgacgaactgggcgggcttggcatgggaggcgatgaacgggtcgcggaacgtcagtcgcatcacgcggtcggtcagttccgtaacctgcgtgatttcgacgttgtggcgcggcgggaagaatccggccgcagtcgcctccgcaaccacatcatgggtgggggtgaaagttgtcatttcattcctattcagcatatcaagctcccccctatcaggggagctgtcaaccgcaggttgactgaggggtagttaaacacactcggctccggtttccagcccacactcacgtatagcccacagccggacaatctacctacctatatacggcaacccgcagattatcgcgcatgtcgagcgccgcctggcgcgcgctgctcgccacaaggtccagcgcctcgtcggcggtcatggattcggagtacttgccgctcttcttccatgcgccgatgatgccgcgcgacgagttgacgatggcgccgctgccctgcttgtcgaacatgcctgccacgtccgcggccgtgccgccctgcgcaccgtagcccggcacgaggaagaacgtgtgcggcatacgttcacgcaacgccttgccttcctcggggtgggtggcaccgaccaccgcgcccacgcgggagtagccgtggctgccgatggtctcggcgccccagccttccacgagatcggccacatgctcgtagaccttcgtgccgtcggccaggtcgagcatctgcagttcgctggaggacgggttggaggtgcgcacgagcacgaagatgtccttgtcggcttcggcggcggcctcgacgaacggggtgatgccgtcggtgccgagatacgggttgacggtcaccgcatcctcatgccacgggtcgaagtcgcccacgccgttcaggtggtgggcgtaggcggctgcagtggagccgatgtcgccgcgtttgatgtcgccgagcacgtagaggccctgctgggccgcgtattcgcaggtcatcgtgtagatgtccacgccggcggggccgagcgcctcgtacatggcgatctgcggtttgacggcgggcacgatgtcggcgatggcgtcgatgatcgtgcggttgtattcgaagtaggcgacggccagctgcgcggattcgatttcctccggggattcgaccgagtcacgcacctcgtcggcaaagctcgccacgacctgcggcggtaccaacgcctcggtggggtcgaggcccacgacgctggggttctgagtgttgtcaatcgcttcgatcaggcgatccatgctgctccttatgttatctacagacggctgaacatcagctgggagccgatgatcgtggcgagggggcgtccggtgacctgccagccgccgaacggggtgttacgagccctggagtggaactgttcagggtccacggtccattcctcagcggtgttgagcaccacgaggtcgacattgtcggcgtcatccacgcggctcaggtcgagcagtcggttgacgccttcacgctgcggctgagcgtcgctctcccccgcaatcacgccatccggatcatccccagtgggcgcgggttcggcgtagtcctcgaccagcgcggccacgtcggttggcacatgccccatgagttcggcgggtcccacggacatgagctcgatcagacgctcatcggaaatgaagccgccgtcgacgagcaccttgtggcacacgccgtacgcgcattccagtccgatgatgccgttgggcgcctcaaggaagccgagttccttctctgccaacgtgtgcggcgcatggtcggtggccagcagatccacggtgccgtcggcgatggccgcgatggtggctttgcggtccgcttcggagcgcagcggcggattcatcttggcgagcgtgccgtacttgagcagcgcctcgtcgctcaacgccagatagtgcggcgcggtctcgcaggtgattggcaatccttcggccttggccttgcgaatcgcctcgaacgagatggcagtgctcacatgctggaagtgtacgtggacaccagtgcggcgggccgcttctatatcgcgggccacgatcttgagctcggtgtcttccggaatgccgggcacgccaagttcgcgcgagaccgggccttcgttcacggcacctgtatcgtgatgctcgcaatgctcgattaggtacaggtcggaggccttgacgttctccagcacctggtccaggatctccggcgtcacagcggaaccgtcgtcgctaattgcggtgatggggtgcgtgagcatggccggcgtcttggcgtcgtcctcgaatccgggcacgtacctgagccagtcggcaacgtcgcttgcctcatgaccggcgcgatccttggacgcgcacacgcacagatcgtaacgaaccggcaattgaacatcgtgcgcagtatcgtactgctgcaggaagtcgatgacgttgtcgaagccggcatccagaacctctttcgcaccggccgcttccaggtcagacacggtctgcccatccagtgccggcaacgtgttcggcatgatgagcacgttcgtgtatccgccggatgcggacgcgcggcagccggagaccatagattccttgtaggtctggccgggatcgcggaagtggacgtgcgggtcttcgaaaccgggggccacggtcagtccggtggcgtcgatatcggcaccgtcagccacggcggaggtgtcggcgaagtaggcggcagcggtcccgggcaccacgaggtcgatgacttcgccggtgttccagaccttgatgttgcgtagggtgatgctcacagtttggcttcctcgtcgcagtagtcgcagcggtattcgagccgttcagagtgcacgaggtggaacatctgcttgatgccgggctcggtggtggtcacgcagcgcgggttcacgcaggagatcacgccgacgatgtgctcgggcaggttcggctgcttcttttcgacgatcttgccgccgcgcaccacgtctacggtggcctggcaggccacgaagccgagcacgtcgaggtcgatgtccttgtcatcctcgattttgatgatgtccttggagccgtaacgcttggagttggcgttcatgatgagcgcaagcttggttttggccggttcgattttcaggtattcgagaaccttcagcgaggttccggccggcacatggtcgatgatgatgccgttctgaatgctggtgacttccatcaggcctgaacctccttggggttgagcggttcgtatccgggtagttcgtcgcccaccacggtgctttcgagggccatgcgcacgagcatgccgttcttgacctgttcgaagtaggcggcacgcgggtcgtcgtccacgtccacggagatttcgttgacgcgcggcagcgggtgaagtacggccatggacggcttggcgagctgcagcttttcttcgtcgagaatgtaggtgtcgcgcaggcgcaggtagtcgtcttcgttgaagaagcgttccttctgcacgcgggtcatgtacagcacgtcgaggtcgccgatcacggaggccaggtcgcgcacttccacgtaggagcagttgtcagtggcgttgatgcggtcgatcacgtactgcggggtcttgagctcgtccgggctgataagcacgaagcgcacgttgccgaagcggcacagggtctcgatcagggagtgcacggtgcggccgaaggtcaaatcgccgcacagtcccacggtcaggtcggtgatgcggccgaagcgcgactgcagcgtggccaggtcggccagcgtctgcgtgggatgcatgtggccgccgtcgccggcgttgatcaccggcacggatgcggcgcgggaggccaccagcgcggcaccctccttcgggtgacggatggcgaccacgtccacgtagttggacacggtcttcaacgtgtcggcgatggattcgcccttggtcacggaggccagctgcgcgccggcgaatccgatgaccttgccgccgagacgcagcattgccgtctcaaagctcaggcgcgtacgggtggagggctcgtagaacagcgtggccagcactcgcccatcgcaggtatgggcaacctctttgcggtgggaatcgatgtattcggccttatgcagcaggtcgagaatctggtttgtagacaggccgtccagcgttacgacgcttttgccgaccattggcgtttcttcagacaaggctcaccttttcgctcgtggttttcaggtggccacccttgtgtgacctaatataacttacgccatttttcggacagccgcattcaccgagtgttcacctgaaaatccaacgaatatgctgtgtctgtatagctgatatctgctttggaacgccagagctcattcattaggtcgatttgacgttcattaggtcactgcaccctcgtatctgttgttggaatgccgccattccaacaaggtatgcggcggcggaccgacctaatgaacgatgaatcgacctaatgaacgtagtgaacgcaatacaagaaaggtctatcgctgcgcgcggcgtcggttccgctccagtcgcggtgcgatcacgtgcatacgcgggcgaggcgcggtttgcggctgctgcgttgcggcggaggccgtggcggtggttgccgcagtcgcctcgtcttcggcctgcccgtagaacaggcgctggcatacgtcacggcatttgcgcatcacggccagcaggtcgttctcgaaatgctggccgcggtgggcgccgtagccgaggtagacggcgatgccgcccagcgaatagatgtcatcaggcagaatatcggcctggttggcgcgcccgctccacagatagttgccgttgcgggccgcggtgcacaacgtccatgccttgcgcagctgaatcgcatcgatagcgctgatgagcttcttggcctccagcacgtccaatgcctccaatgtgccgttgacgcgcagatctttgatatcgccggcgtgctggagctgcatgagttgcacggtccattccacgtcagacagaccgcccttgccgagcttcagatgacgttctcgacgcacgccgcgcggcagacgctcggcctccatacgggccttgagcttgcggatgttctgcaattcggcctcggtcagctccgtggtcgggtagcgcaacgggtcggcgatgttgatcaggaagtcccgcgccagttcggcgtcgccggccgcgtaccgggcgcgcagcagcgcctggcgctcccaggtcgaggcccaggattcgtagtattcctcgcaggaggcgtaggagcgcacgagcgggccgttcttgccttccgggcgcaggtccaggtcgagttcgatcttgggttccagcgtcgtcgggccttgcaggatgttgcgcaggtcttccacgaccttcttggcgaaggcgttggcttggccgtcgtcggcatcgtcggccggacggtagatgagaatggcatccgcatcggagctgaagttcacttcgcgcccgccgtaacggcccatggcgatgacggtgatgccggccggcgcggtttcgacgccgaacgcggcgatctggtggcgcacggcccaggtcagtgaggcgtcgatgatcgcgtcatacacgtcggtcatggccttgagactgtcggagtcgctgatcacaccgctcatccaagacaggccgatgcgttcgatttcgtggcggcgcatggcgcgcatggaggtggcgaactcgttgatgttcgagccgaaacgttccagcgccgagccggtctgcacatccaatgcctcgcgcgtgcgggcctgcagattgccgtcatcaccgagccaactgatcgattcgaccgacttgttgagcgcgtcgcccaggaatcgcgagttggacaggatgtggcacagacgctgggcagcggaggtggagtcgcgcaggaagccgaggtagccggattcggtgccgaagttctcctccagcttgcgccagttgagcaggcccatgtccgggttctggccctcgcccagccactgcaagacggcgggcaggatgatgcggttgattttggccgcgcgccccacgccggcagtgagcgcctgcacgtggcggatggcggcgtccgggtcgccgaagccgatggattcgaatcgttcctgtgcggcctcgacgctcagcacgatctggtcgttctccatctgggcgttgaccggcagcatcgggcgatagtagatgtcgaggtgcaggtggcgtacttcgcgacgggtgtcgtcgtatttgtcgacgagttcttccgggtgcaggccgaatgcgcgggcgaggcgacgcagctcctggttctggttgagctcatccacgtcgatgtcgcgcttcttttcgaggcctccgaccgaggcccggccgaggtccgggaacaggtgcgtgcgcttcagggaccagatctgctggcgatgctccatcacgcgctcgaagcggtagtcctgggacatgcgcacggcctgtttgcgcgaaacgtagccgccttcggacaggcgctgcagcgagtcgagcgtgttgctggtgcgcagcgattcatcggtacggccgtgcacaagctgaagcatctgcacggtgaattccacatcgcgcagaccaccgcggccgagcttgatttcgcgatccttcagaggtgcgggaatcagatcttccacgcgcttgcgcattttctggcagtcgtagacgaagttcttacgcttggacgcgctccacacgaacggccgagtcatatccatgtaggcccagccgaggtcggggtcgccagccaccgggcgggccttgagcaacgcctggaactcccagttctcggcccactgctcgtagtagttcttgtgcgaggagagcacgcgcaccagcgcgccgtccttgccttccgggcgcaggccgccgtcgatctgccacagcggctgctcggccacgcccatgatggcggactggcagacacgctgcaacatggtgcccatcttggtgcccacgcggatcagcgtctgatggtccacgtccttgtcggccggttcgaccacgtagatgaggtccacgtcggagacgtagttcagttcctgtgcgccgagtttgcccatgccgatgatggtgaagcgcacgtgctcgctgccctcggtttcgtggcgggcgatggccagcgcgccttcgagcgccgcgtccgcgaggtcggacagttcgcggctgatggtcggttggatggaggccgggtcgtccgccacggcatcctgggcgatgatggcggccagttggttccggtagctggaacgcaaggccgtggccgcttcggccagatccttggaggcgacgggcatggccggttcgtccgggtccgcgccgaccgccttgagcagacgtgcacggcgttgcgcgtgattgaacagatggctgttgcagttgtcgactgctgcggcctccacaagctgcggcttgaagcgcatgaacttgcccatcgcgtcggagacgccgagcaccgtgaccagacgcttcagggcgtcgttgtcggggatgacgtgtttcagatcgcgctggctggattgcatcgcgttgacgatatccacgaaattgctcaatgccatatcggggtcgcaggcgtgggccagcatgctcagcagttcggtgcatcgctcatcgggaatgtcgtccgccttgagctggtcgaacaaggtgcgggccttgtcgaggtcttgcagacctgccctgatgagatccatggagctgggtttgaacatcgacgattccataagattccactatatacgctcatgccctccgaatggggcatgagccgggaaggagtcatcgggcgacgctgatgagctccgaggaatccatatcgtaatcggccatggcgtaggaacggatggcggggtcatcataggtgttcatgtaataggtgttggtcttggacgaatatccgctggtgaacagcgtgcgttcgaactggccgtcgcccatcttcgccatgccgtccaccatctgcacggagccgagggtgtggaacaggcgagacacattggcggcttcatcgttctgctgcgggtaatgcgcgttggtgtaggccacacgaacgaagcgcgacggggagctcacgtcgcccgggatgccatgcatgcccacacccgcaccccaggcggtcaaggaggccttgccccatgaagtcggttcggccatctcgttgctgacgcacatgtagttgcgcagattttccatatggaagtcgaacgtcggctgattggtcagcacatcgacgtcatcatgatgcacgtgcatgccatcggccatctgctcgacgacgatgctgcgcttgccgtcgccgatgaaccagtgcagcagagactcctgctgtcccggcacgatctgggagacgagcgtcacgttcctgagcgcctcctcgacctcgtcgacggagtcgaaattacgcgccacccacagcggaaattcgaacgtggcgacgttttccgtgccttcgaccggttcgtggacgaacgaggcgtagccggggaaattcaagccggcgatggccagaccatgttcattggcgcagtcgaaatacatcggcctatcggccatgaccacgcccacgccgatcaccgcgttcggcttcgccttgccgcccgcaccgaacaccgtgtcatagtggtagccgcgcggagtgaccaggatggtctccccatatgagaaactccagtcgagattacggccgaaataggtgttgccctcatcatcggagaaacggacaccagtgcacataacggacttccttccatcgctttggttggcttgtacgttcatgatacccatcggccgctgggggaactctgggtttcgccagcagattaacgtgcggcgcgacgcattgagatgcgccgcgccgcgatatgcgtcaaccttgcgtaccgaggaacaacggttccgcattgcgccagatacggcgcgtggtggcggggtggttcatcgaatacaggtggacgccgtccacgccgtgggccacgaggtcggcgatctgctcggaagcgtagaggatgccggcggcacgcagggactggatgtcgtcctcccacttgttcagcagggtgttgagcttgtccgggatacgcgaggcgttgcgttcggccatgcgacgcacggacttggcaccacgcaccggcatgatgcccgcctcgatcggcacggtgatgccggcggcgcgcgccttgtcgaggaagcgatagaagtcctcgttgtcgtagaacagttgggagatcaggtgagtgacgccggcatcgaccttgatcttaaggttttcgatgtcctggtccagcgagtcagcctggtagtggccttccgggtagcaggcgccgaacactttgaggcccggcttcacggagcggatgtatgacacgaggtcgctggcgtggttgaactcgcctaccagctgctcgccgtcgatgtagtcgccgcgcaatgcgagtacggcgctcacgccggcctgctcgaacatgtcgagggcctcgtcgattttcgccttgtcggaatacaacgcggtcagatgcgcgactgcgggaatgccgtactccttgctgatcgtatgagcaatgcgcgcggtggcggtgcggtcggaatgggtgccgtgaccgtaggtcacggagatgaagtcggggttcagcccttcgagtccgtcgagggtgtcatagatggtgtccacgggagcgttgcgcttcgggggaaagacctcaagggtgaacatcggggaatgcatgctgatttccttacataaacccgagctccctcatacagagggagctcggtgatttccgctacttgtcgagcttggcgcgcacggccttggcggcggcgaccaggttctccaggctcggccaggtctcggcgttaccacgggtcttcagaccgcagtcggggttgatccacaccttcttgacgtccatcttgtcaaggatctcgtagatacgatcctcgatctccttctcggaaggaatacgcggggagtggatgtcgtagacgcccgggccggcctcggtctcgaagtgcgcgtcatgaatggcgtcgagcaccaccagatcgccacgggaggcttcgaaggagatcacgtcagcatccatcgcgtcgatgtcgcggatgatgtcgttgaactcggagtagcacatgtgggtgtggatctgggtggtcggcttgacggcggagtgcaccagacggaaggccggaacggcccagtcgaggtacttgacgtgccagtcggacttgcgcagcggcagcttctcacgcagggcggcctcatcgatctggatgaccttgatgccgacggcctcgagatcgagcacttcgtcgcggatggcgagggcgagctgcttggtctgctcctcgtgggtgatgtcctcgcgcggccaggaccagttgaggatggtcaccgggccggtgagcatgcccttcatcacgtggtcggtcttggactgggcgtacgcagaccattccacggtgatcgggttggcgcgggacacgtcaccccagacgatcggaggcttgacgcaacgggtgccgtaggactgaacccaagcgttcttggtgaacaggaagccgttgaggttctggccgaagtattcgaccatgtcgttacgctcgaactcgccgtggaccagcacgtcgaggccgatctcctcctgcttcttgatgacggcgtcgatctgggccttgatgaactcgtcgtaggcttccttggtgacctcgcccttgcgcagcttggcgcgctcggcgcgaatctccttggtctgggggaaggagccgatggtggtggtcggcagcagagggaggccgagggcctcgcgctgcagggcctgacgctcctcgcgggcaggctggcgcacgtagtcggcgtcggacagcttgccgatgcgctcggcgacggctgggtcggcggccacgcgggtgccgtcgaacagggcctggttggcggcgagggcggcggatgccttcttctcgtcctcggtggcgtcggccagagcggcgacttccttgagctcggtcagcttttccacggcgaacgcgaagtgcttgaggtcttcggacgagatgccggtctcgccttcagtgctgaacggcacgtgcagcagggaggatgcggtggagacggccacgttggcggtgacctgcttcagggcgtcgaccaggccgagggaggtggcgtagttgttgcgccagatgttgcggccgttgatcacgccggcgaagatggcggtgttggaggccacgccatacttggcgacggcttcgaggttctcttcacagccttcgttgaggtccagtccgatgccgtcgaagccgagcaggttgacggtctcgtacacgtcggcgatgtggccgaagtaggtgttgagcagcaccttgacgttgcccttggcggacaggatcttggtgtacagggtcttgaagagctccacatcgcccggctccttgtcgagcacgaggtacggctcatcgagctggacccatgcggcgccgagttcgttgaacttgtcgagcacttcggcgtagacggcggccacggcgttgaccaggcccttgtcgagctcgagttcggtggcttccggggtgcgggcgagcttcaggaacgtgtacgggccgatgaacacgggcttggtgtcgatgcccagcgccttggcctcgttgaactcgtcgaacggcttggtggagttgagcttgatctccgcggccgactcgacttcgggcaccagatagtggtagttggtggtgaaccacttcttcatcggcagggcggtcacgtcgcccttgtcgccctggtagccgcgggccatggcgaagagcgtgtcctcctggttatcgaaggcgagacgctcgtaacgcttcggaatcacgttgaggaggatggcggtgtccagcatctgatcgtagtagctgaagtcgttgctggggatgaggccgatgccggcggcctgctgcagcttccagtgcttggcgcgcagttcggcggcggtggccttaacggcggcgaggtcgttggcacccttccagtagccttcgatgatcttcttcagttcgcggttctgcccgatgcgggggaagccggagacggaagtcagagtggacatgaatcctccaatgtatgcgttcgtaacccgacttagggtagcaaaacatccggattccaccccttataaatggccgcagagtgtcgttatagatggaatttatatccgctttagtcgaagtctttcacattgatgaccgcgagcagttcgccgctgtgcacctgccattcgtcgaacggtttgttcgatcccatgatcacgatggatgcgggcgaaagtcccaagttgagcaggtcgagtcgttcgccgtcggagtcggcggaggcgagccattgggcgctgatcgacacagtcggctcgtggcccactatcatgaacacgcggttcttggccttgacgtgggcgagctcgtcgaacaccgcctgcactcccccgtcatacaggctgatgcggtagtcgacgatcggcttgtcgccaaaggtcttgagcatgcggtccagtgtctggcgcgtgcgggtggcggacgagcaggagatctggtcgggcaccagtcccagcgactcgatgcccttgcccacggccttcgcctgtttcagacctttgtcggtgagctcgcgctccgagtcacccttgtcgccgaacggctcggccttggcatgcctcatgatgatgaggatatggtcgtattttttcgctgctttggcgactttgctcagcttgatgcccatccgtggctcccttcacgaaccgtctgcccggtgtggtgttgcttccagtatagaggtgtgtgagcgttcacaaactcatcgtcgggcggttattcatgcgtgttgccgagttctcccacctgacggtcgaggtcgcgcaacaccttacgtagtttgtggtcggagatgtcgcgcagttccagttcctcgatctgcgcctcacgctgttcgtcggtgagcgagtcgatgtcggtctgcgtgtccttggtcacgcgatcgcgctttctgagcgcctcgaatccggaggccatggcgcgcgagataacaaggaaaccggtatggccgatcatctggtggtcggggcgtacggcgaggccttgggccttccatgtgcgttcgaacgattcctggatctgcggctcggtccagcaaccggccgcgcgcagggcttcggccagtcgactcatctgcgtggtggtagttacgtaactgaccaacacgccgccgggggcaatcacgcggtatgcctgctcgagtctgttccacgggtcgagcatgtcgagcatgatacggtcgaaccagtgttcgggcagttcggcggccacggagtcgaagtcgccggttttgagatcccaccagctgggggcttcaccgtaatacagcgtggcgttggcctgagccactttggcgaattcggggcgcagctcgatcgtggtcagatggccgcgctcgcccacggcgtccagcagattcacgctcatcgcgcccgagccggcaccggactcaagcacgcgcatgccggagcggatgtcgccgagctggacaacctgggcgatgtccttcggatacatgatctgcgcgccgcgcggcatcgaaagcacataatcggccagtcgcgggcgcatcaccgcatactcccagccgccgatggcgcgcgacgatttccacggcttgttcttgtctttctcggggtagacctgattgacctgtgcctcgcgcttggcatgcacggtgaggatcacggtgccttcggtcttgccgatcacatcgtcatgcagaatcaggccatgctcggtctgcgtggagccgccggccacaagctgatcggtgatcttcttgcccttgcggtcggtgaactgcaccttctcgcctgcggtgagaggcccgcgcctcggctccataacttgctccttgtgtgctcggtgggtcaatcgctacaagtctaatgcatgtaagctcgttggtgaggtgatgacgatgcgaatgcagatgacaagccagatcgatgccggcggcaatgaccccattttcctgatgttccacggttacggcaacgacgaaagcgagatggtgcggattctcgacgccgtatatgcgccgacgcgagccgatgcggccccggccgcaattgccgccgtacccagctatatctcgttccgtgccacctacgcgaggccctatatgggcggcaattactggtatcccgacggctgcggcgtggacgagcgccaacgcgaatgcgcggcggtcggggatgcggtggcttcactgctggatgcctcggcattcgcccatcgcaggaagatattgatcggtttctcccaaggcggttatctgtcgtatcgtctggtcaaggcgcatccgacgttgttcgatgccgcgatcctgcttagcccttcgttcatgggcgaggaacaggcggcgcttgactcccctacccgattcttcctggcgtatggcgcgcaggaccgcacgattccgctgcccgaccagcaaacggcccatcaggtccttgaacgggccgggcatctgacctatcgcgagtattccggcatggcccatgccatctgtgatgaggaaatcgccgatatccgggatttcctacgtgccatatgatgccggaatagcttcaatatggaatatctccgttcaaagaggtaccggtccaagtagaagcggctcaacaatggcggaatggcgttggccacgcccattcatcgc

SEQ ID NO: 2252 - DNA, 4757 bp, Unknown
  R51_24m  MAG No. k141_55486
acgtcggtaatctcggccaagtagccggaggccatcaaactggttttgccagtcagtctcaatagcgcaagagccggcccctgagatactcaggggccggctcttacttccatttccccagcggggttggcttaatcgcagtatatctcactgctgaccatgtctgttttacttactcctaatcaatgagcttgtagccgtgatcggcgactacggacttgagcttggtgaggtaggtttcggcggccttggagagcttggaacgctcgttcgtgatccagccgaccaacatcgtttcgtcggtgtcgagcggcacggtgacgatcttctcgttgttgaggtcgccgttgtcgatgccggtgcacaccgtgtagccgttgaggccgatgatgaagttcagaatcgtggcgcggtcggtcacgttgatctgcttgggggagtattccggccagaccgcctcctcatagaagtagaacgagccttcctcgccctgttcgtactggatgaacggatagggcttcagatcctccatggtgatgatcttcttggcggccaatgggttgtcccgtgagatgaacacgtgcaggggggcgcggaagagcggatggaattcaaggtgtttctcgcgcaggagtttgccgatcacgtccttattgaagtcggacaggtagatgatgccgatctcggactgcatgttcgccacctggttgatgatgtcacgtgtacgggtctcacggatcgtgaactcgtattcgtcggacttaatggagttgatcatctccacgaaagcctcgacggcgaacatgtagtgctgggtggagacctggcacagctgcttgcgcggcttggcatgcttgtaacgctcttcgagcaggtcggcctgatcgagcacctggcgggcgtaggtcaggaattccgcgccgtccacggtcagggcgatgccctgcgaggagcgggtgaaaatctcgatgcccagctcgttctccaattccttgaccgacgagctcagggccggctgggagacgtacagggcatgggaggcctcgttcatcgagccgcactcgacgatcttgacgatgtatttcagctgcagcagtgtcataaagtctatttatatcgctagggatggtcgccacacgggtttataacctcatcaatccactatggcgacacaatatgagatgcctcgcatatcgcggacgctgtgtaacgggatatgcgccacattggtaacctgaggcaggaccagtacgatgccatccagaccttctccttctccagcatcgaccgcttctccacgccgagcctgatgaccaggctcggcgccgacgtgatgaacatccagaacgccttcatgatgattctgcgcatggtgccgcgtgccgcgtcgttgaagtgctcaccgaacagtgcgacatgccggtcgccaaacggccggtcaccgtcgtcaaggacgggtccatagacttcaactgccgcgacgcaatatttggcgacttacaggcgtacgccgagttcggcgagcgattcgcgcgcctgcgacgcgttctcgaagaggatgctgtggatgccgacctcgttggcgccgacgatgttcttggcggtgtcgtcgaagaacacgcagcgctcggccgtgagaccgaagcgggtcaggaccagctcgtagatgtcggcgttcggcttgtgcatcttctccacgccggagaccacggtgccctgcagcagctgttcgaggcgcgggtacttctcgaaggccaggtggaaggtctcatgcgaccagttggtcagaccccatacgccgtagccgtgggccttcaaatccgccagcagttcgaccatgcccggcagcgtgcggggcagcgcgtccgcgtagtggccgatgtagaacttgaagatgtcggcgagttcctggccttgttcgcgtaccacatccgggtagatgtccgcgaaatcctcgccggcgtccatgcggtcctcgtagtggaagaagccgcaggggtcgtcgtcggcgcagatgcgttccacgatttcatcggggaatcggccttcaaggcatgcgcgggtgttccagtccagcagcacgccgcagaagtcgaaaatcacgtcggtgatgggggagttggccatgatggttccttgtgtgtttgggtcgttgggtgaggtctgcgatttagtgtacggggtttgtgtataggtcggggtatgtggagtttgaggcttatgtttctctccctccgtcttggttttgccgagacacctccctcgtcagagggaggtcaacaaggttatgcgatgacgtcggcgatggcttcggggatggcgtggatcacgtcgccggccacgattgggtggccgagcgtcatgaagcgctggcgatgctcgcggccgatcagttccggctcctgccagccctgctgctcggattcggaggcgatcgccgccgccaggccatgcaggtaggcggccgaggccacggtctcgcccgtggtggccacgtcatcctgctgggcgagtagggcgccggtcagaccggccagtacgtcgcccgcgccggcggtgcccagccaggccggcgcactgcccgacgcatagacatggtcctcatccaccacgatggtcaccgcgcccttcagcaatacggtggcaccggtgagctcgtgggcgcgcttcgcgctggccaacgggttcagccgcacgtcgtcggcggtgtacggctcgtgcgaatcggcatgctccgcggtgctggcggtggtttcgaaccggttgagcagtttcgccatctcgccggcatgtggcgtgatcaccacctggccgggcacacgctccggcagcaggtcgagtgcgccggcatccaccacgattggcggcatgtcgtaggcgtccttgttctcatcctcgctgccgagcgcgtaatgcttgagcaatgcggcgatggtgtcccgctgcatatcgccgtcggcgccctcgacgctagcctcgggcacgccggaccccacgacccaggactgcacatgtcccttgccgatcacggcttccggcagtgcggtgagcaccatgttctgcgcgcgctccgggcccagataccggaccatgccggtgttcgcgcgggcggcggcgctggtggtgagcacggcggcaccggggtagcgctgcgagccggtcaccagaccaaccacgccccgggaatatttggaatcctcgaaccgggggagacggaccgcgtcggacgcgaacgaattatccaccacctcgacgtccggatccttgtcgtcgatatcgaatccgaaatcgaacaactcgatacggccgcaggcgaacgtggcgggcggcagcaccgcgcacggcttcatcgcgccgaacgtgaccgtgaccgtggccggaatgtacgggccgggcagagaaccatcgttcacaccgacgccggatggcgtatccacagcaagtaccagcggaaaatcgcctgacgactcatggttcggcagggcgggctcatcgggagactcgccgtcgagaccaagggcggaggcgagcgcggcgggaatgccgcgtagcgagccttgaatgccgatgccggtcatcgcgtcgatgatcagatgcgatttcctggccacggcgatggcggtctgcaatcgctcgccggcctcaccggcggaaaacccggacgcgcaaccgggaatatcggctgccgggtcaagcaccagcaccttgccgccggcgcgcacgagcgcggcgaatccggcctcatgcagcgaccggcccacggcgatggcagtgacgttcgcgccctcctgggccagcgcggcggccgcgaacagaccatcgccaccattgtctccggccccggccagcagcacgatcgacgtgtcctccagcgccagatcctcgtcgtccagcatgccggccgccatgtgggccgcggcctgggcggccatgcgcatcagcggcacgcctttgtccagcaggggtcgctccatggcccggaccgtatcggagtcataggcgctgtgcagcagcagttcgcgatgatcggcgtcttcggtgtattccatggcaacccctttcttgtgtttgttacttgcggcccgtgtttacaggccgtacacctcgtgggcgaacttttcgagcacggggatcgaacgcttgactttctcggtgtcgatgcagtaggccatgcggaagtatccgggcacgccgaagctgtcggacggcacgaggatcaggtcgtattccttggccttcatgcagaacgccacggcgtcgtcctctaacgccttggggaagatgtagaacgtgccgccggggcgcaccacgtcgaagccgatgccggtgagcgcatcgtagagcaggttcatgttcgtctcgtagacgttgaggtcggcggtctggtcgatgactttggctacgcccagctggatcgagctcggcgggcagttgtggccggtgccgcgcgagatttggcccatcatcggcacgagcaggtcggcgtcggtggctgcggggttcaccgcgacgtagccgatgcgttcgcccggcaggctcagcgacttcgaccacgagtagcaggtcagcgagttcgcatagaagctggccgggtagggctgggtggctccgtcgaacacgatttcgcggtaaggttcgtcgctgatcaggaagatgtcgtggccgtactcggcctgcttggcggtcaggatcgcggccagacgcttgagcgtgtccgccgaatacaccgcgccggacgggttgttcggggtgttgat

SEQ ID NO: 2253 - DNA, 6623 bp, Unknown
  R51_24m  MAG No. k141_56372
ggcaacaagccccgcatctggtacggcggcgattacaaccccgaccaatggcctgaggaagtgtgggacgaagatgtagccctcatgcagcaggccggcgtcaacctcgtctccgtagccatcttctcctgggccaagcttgagcccgaagaaggcgtgtacgacttcgattggctcgaccgcgtcatcgacaagctcggcaaggccggcatcgccgtcgatctcgcctccggcaccgcatccccgccgatgtggatgacccaggcccacccggagatcctctgggtcgactaccgcggcgacgtctgccagcccggtgcccgccagcactggcgcgccaccagcccggtcttccttgactacgcgctcaacctgtgccgcaagatggccgagcactacaaggacaacccctatgtggtctcttggcatgtgagcaacgagtacggctgccacaaccgcttcgactattccgaagacgccgagcgcgccttccagaagtggtgcgagaagaagtacggcaccatcgacgccgtcaacgacgcctggggcaccgccttctgggcgcagcgcatgaacaatttctccgagatcatcccgccgcgcttcatcggcgatggcaacttcatgaacccgggcaaactgcttgactggaagcgtttcagctccgacgccctgctcgacttttacaaggccgagcgcgatgccctgctcgagatcgcccccaagccgcagaccaccaacttcatggtctccgccggcggtgccgtcatcgattacgacaagtggggttacgacgtggacttcgtgtccaacgatcactacttcacgcctggcgaagctcacttcgacgagctggcttactcggcctccctgtgcgacggcatcgcccgcaagaatccgtggttcctcatggagcactccacctccgccgtcaattggcgcccgatcaactatcgcgtcgaacccggcgaattggtgcgcgactccctggctcacttggccatgggctccgacgccatctgctacttccagtggcgccagtccaaggccggtgccgagaagtggcactcttcgatggttcctcacgcgggccccgactcccagatcttccgcgatgtgtgcgagctgggtgccgacctcaacaagcttgctgacgagggcctgctgagcaccaagctggtcaagtccaaggtcgccgtcgtcttcgattacgagtcccagtgggctacggaacacaccgccacgcctactcaggaggtacgccattggaccgagccgctcgcgtggttccgcgcgctggcggacaacggtctgaccgcagacgtggtgccggttcgcggcccttgggacgagtacgaagccgtcgtgctgccgagcctgaccatcctgtccgaagagaccacgcgccgcgtgcgcgagtatgtggcgaacggcggcaagctgttcgtgacctactacaccggtctggtggacgacaaggatcacgtctggctgggtggctaccccggttccatccgtgacgtggtgggtgtgcgcgttgaggaattcgccccgatgggcaacgatttccccggtgccatggaccaccttgacttggacaacggaaccgtggcgcacgatttcgccgacgtgatcacctccgtggccgataccgctcacgtggtcgcctccttcaaggcagataagtggaccggtttcgacggcgctcccgccatcaccgtcaacgacttcggcgacggcaaggccgcatacgtcggtgcccgtctcggccgtgagggtttggccaagagcctgcccgcgctgctggaggaactcggcatcgagacttcggctgaggacgatcgcggtgaagtgctgcgcgtcgagcgtgcggacgaaactggcgagaaccacttcgtgttcctgttcaaccgcacccacgatgttgcggtcgtggacgtggaaggcgaaccgctggtcgcctcgctggcccaggtcaacgagtccgagcacacggccgccatccagcccaacggcgtactcgtcgtcaagctgtaaaaccgcgcatagcgcctaattacccaacggctcccttgctgctcatcgtagcagggagtcgttttcgtttctccagcaaagtcgggtagggtggtcaccgtgcgaggcaaaaacagagtgacgatggcggacgtggcccatgaggccggtgtttcggtagcctcggtgtctaattttctgaacaaacagccatatatgagcgaggcgatggccgcgcgtattgcggaagccatcgaccggctcggatacaaagtcaactcgtcggccagaaacctgcgttccgggcgcacctggttgctcaagctggtcattcccgatctgcggcaggtgtatttctccgaactcgccgaggatattctggccgaggcccggcaacatggctatggcgtcatcgtggaatccaccaccaacaatcgtgcccgcaagctggaaagcatcgcatcgatgggcacgcacagcgcggatgggctcatcttaagccctctgatgatgacggttgacgatatcgcagctttggagggcgattacccgctcgtactgttgggtgaacgtttgttcggcgtcaacgcgccgcacgtggtgattcgcaatcgcgaaggggccgccggcgcgaccccgttcgatacacaaagccccgtgacgaatcccgtcacggggcttttaccgttttaagccccgcctagtacactcgtcaccatgcgagtgatcggacagcgaatcaaaagaatggcaaccatagcagtgactgccatcctttccgtatccctggcctcgtgcgggcaggccacggacgacaaccgtacggagatcagcgtatggagctgggaaccgagcatgggggaggtcatccgccgtttcgaaaaagccaatccggacatccgcgtgaaatggaccaatatctccggctacggcaatcttaataccgccattcaagacggttacggcacgccggacgtggctcaaatcgaatactatgcactgttgcagtacgcggtctccggccaattgcttgatctgaccgacaaaatcggctcggattattccaacttctttaccctcggcacatggtcgtccgtgcagctcgccggccgtacctatggactgcccatggattcgggcccgatgggcttcttctacaacgaagacgtgttccgccaagccggcgtggacgccaccaagatcaagacttgggatgactattacgaggccgccgaaaagctcaaggagatcggcgcgtatatcgccgccgactcgggcgacggcagtttctatgacgcgatggtctggcttgccggtggtcagccgttccacacgtcggccgacggcaaaaccgtgaccatcgatttggatgaggatgccggcacccaacggttcaccgaattctggcagaaaatgatcgatgaggggcttgttgacaccacctccgccacatggtcggatcggtggaaaagcagagtgggcaccggcaccatcgcctccgtgttctctggggcttggatgccgtcgttgctgctgtccaatgtgccgggcgcggccggtctgtggcgcgtggctcccatgcccacctatggtgggcagcctgccaacgccgaaaatggcggctcggcgctgaccgtgttgcaactgacccgtaagccggatgcggcctatcgtttcgtggactttgtggcgcatgacgcccaaggcattagcgcgcgtgtagacggcggtgccttcccggccgattacgccaccctgaattccgctgattttctggataaaaccacgattaccaatgaccgtggcattgaaatcccgtatttcggcgggcagaagttcaaccgggtactgtcggaggccgccgaggatgtgtcggtcggataccagtatctgccattcgaagtgtatgcgcgcagtgacttcaaatcgacggtgggccaggcatacgagtggtccggcagtttccacgcctatcagcagcgacaggaagccattgagatgggcatgaaggacgaggaaggcaacccgctcgaaccattggagaagcccggcaagaaagtcagtctctccgacggcctggcccaatggcagaaagacctccgagaatacggcctcaatcagggctttacgattaagtagggttttgagtaggtttttcggggagggacggaatcgactgcgctatgcgcggccgatgcctgcacaccgcgttacttcacattgcgcgagtagatgtatgccatgcctttgaagatcaggtctgaatcgtagacgtcgatcatgtcggtgtcgttcttgaaaatgcggctgagccctcccgtggctaccacttggaacggctcatcgatttccttgcggaactgctgaatcgtgcgctcaatgccaccgaggaacgtgtaatacagtccggcctgcatagcagtgcgcgtattggtggccagaatcgactgcggttgcgtgatctccacttccggcagctgggcggtctgcccccacaacgcctcggccccggtgcggatgcccgtggtgatgaagccggagcgaatcgtgccggaaccgtccacatagttgaacgtggtggcggtgccgaagtcggccaccagcaccgggccgccataggtgtggtaggcgccggcgcagtcggcgatgcagtcagagcccaaggttttggggtcgtcgagacgaatgttcatgccggtcttgacgccagggcccaccaccatcggttccaatccgaggaatttgatcagcgaggcgcggaaggaatacatcaccttcggcaccaccgagcagacgatcacatcgtccacatcgtcggccgtgtaatcgctcaaagccaggaactgcgtgatcatcagaccgtattcgtctgaggtgtgcgtcgccttggtggtgatgcggtaggagccgacgatgcggtcgccctccagaaaaccgatcacgatattcgtattgccgatatcgaccgccatcagcatgggtcaggcctccttgttctcgtcatcgacattgctcgcgccgccggaacgcaacgctgcgagccgcagcaacagtcgttgcgcaagcacggttttgtccatcttgtcccaatgctcgatcttcggggtgccggcatcctccgctccggacgtgagcacggtgacaacgttggtgtcggtgccgaacccggcaccggcgtcgcgcagattgttggccaccagcatgtcgcaatgcttggacgtcagcttcttctccgcattacgaatcagatgctcggtctccatcgcgaatccgcacaggatctgcgagccgtcgtcgcgcttgcgttcgccggcccacgccagaatatccgggttggaaaccagctccacggtgatgctgctgcggccggccttcttgattttctccggcgcaatctcggccacgcggaaatcgcccacggcggcggccataatcgtgatatccgccgccgggaaggcgtcggccaccgcatcgaacatatcctgcgcggtcatgacgcgcaccacatccaccgcatcgggcgcggtcaaggcgactggaccggagaccaacgttacgtcggcaccaaattcggctgcggccgaggcaatcgcataccccatcttgccggtggaatggttcgtcagatagcggaccgggtctagcggctcctgcgttggcccggcagtgaccagcacgcgcagccccttgagcggggaagatgagggagcctggtcatcctgcgcatccgccagcagccgagcggccacttcctcgatgcgcgccggctcttccatacggcctcgtcccacgtcgccgcaagccagattgccttcctccggctccacaatctgccagcccaattcggcgcaggttttcagattgcgctgcgtggccggattgttgtacatatgcacgttcatcgccgggcataggatcttcggcccctcataggccagaatggtggacgtcagcgtatcgttcgccaatccacaggcgatgcgggcgatgacgtcggcgctcgccggggccaccaccagcagattggcccaggccgcatcggccacatgattgatggtcgttggcacggtcggattggccgtcacgtcgccgtgcgcggccggataagcggggaacatcgtggtacgggtgggttgatgggtcagtgaggtgaatgtcaggggagtgacgaagccttcggccgctgtggtttcgataacccgcacctcgtggccggccttggtccaatcggatgccagatgacaggccttgaacgcggcgatgctgccggtgacgcccagaagaatatgtgccatagctgcctcccggccttatgccaaggccgcacgtgtgcccacgccagcgcttcccgcgtcgttgcccgacgatgcgccgcgtgttgtggtcgccgcggaccctccgtcggcgccgcaatccagtatagccattgcctccggcgtgtccggggatatagtagaacgtggtgatcgacccgaatgggcggtcaaccacgcaagataacaacgaaaccatattcgggcgtaagcatgcccgaatgcatcagggagtatccatgtcccagaacaatggtgtgcacggcgagtccggcgcaaccgaagacaggaaca

SEQ ID NO: 2254 - DNA, 2655 bp, Unknown
  R51_24m  MAG No. k141_56487
ggctccgagctgctgctgccgttccagaagggctacgagaacaacctgcccgccgaggccaagtacaacgtggacaacgccaagaaaacccttgaggccgacggctacaagatgggcaaggacggctactacgccaagggcggcaagacccttgaaatctccttcactttcttcggtgacaacgccacccagcaggccctcgccaacgcctaccaggcgatgatgaagaaggccggcatcaaggtcaaggtcgtgaacgtggccgagtccaagttctccgacaccgtgtcttccggcaactaccaggtgctgccgatggcttggcaggctccgagcgccatgaccttcgtggtgtccgccccgcagctgtacacctccgacggcccgtccaacttctcctacgtgggcagcaagaagatcgacgagctcgtcaagaaggctggcagcctctccgactatgacgagcagaccaaggctgtgaacgccgccgagaaggaagccctcaagctgtatggcactatcccggtctccaacccggcttcgtacctcggtgcgaagaagggcctggccaactacggcccgtccggcttcgccggcaacctgccgcaggacatcggctggcagaagtgatgacgtctgactgacgtctgacatggccaccgcgccgggaacggccggccgcacgcatcgactgcaaggctttcgatgccggacgcggcctgcggcaggttcccggcggggtgtgaccgcggcagcatatgccttactctccttatttctgcatatgatgctgcggttgggaagcctcccgtttgcgcgcttatgcgtcgcgcgcgaacgggaggcttttgcatacttgccgcgattccaccccggcaacgatttgtccaccttgctgcccgcgcggctgaaaccgtatccaccttcctcttcccggatttgtgacgctgacggttgccgagcgtcacaaatccgggagatagtcgcccttacttgttgtcagaacttggtgagcccggatttgcggatatggtcctcccagccatccggcttaggcagtgtgaccagttccctcattgtcacggcagggatcgcggccgccacgatgcacaagcccaaagccacggacgtgactgagtaaccccagtgttgcatggcgatgccggacagaaatgtgatcaccggggcagcaatcgtctcaatcatgcccatgccggcgaatacgcggcccatatgctccttgttgatgagcaatgattggaatccgttgattaccgcattgccggccggtagggccagcagcgaaattgccagaaacgccatacgcgcaagaatccacggagccagcgctgcgccgagcgcgccgatgctcatcagcacgtagaacgatacggcgactatgccgccgcgcacatgctgaaccagcacggaagagatgagcgagccaacgatgacgcccacagacacagaaacgttcatgaaactggctgacaccacatgtgatgggtcggagccgatcgagagcaccgtaatcagcaggaacgagttgaagcacgcgaacgccagcgcgctcgacaaaatcaggcgacgttcgaatcgctcgctaagaagccagcggaatccggaaaacatctcacgccaatactgtgacgcggatgatgtcgtggtcgttgcctgctcgtcagcggcctgagtgatgttggccgcatcgccattctcatcggcctcatcgtcggcaagggcgcggccctccgtattggtccgcccgccacgatgccagtattttgtgatccgcatcgccgccgcggtttccaatagattcagcagcgcgctgactgcgaatggcagccatagaccgccgccgatcaatacgccacctactggtgcgccggcgagttcgagggcggcatcgcggccatcattgaggcttgacgccttgggcagcaattgatcgggaacgatgcctcgtagcatcgtgttgctcgtggttcctaggaggcctgagcgtatgccgaggcatatcgcaagtaccatcagcaccgggtatatgagtaatcccgcccatcctagggccgcgcatatgccgaacagtgcgaaaccaatcaggccgaacgcaatcataagttttttgcggtcgtacttatcttgtaccacgccacctggcagccgcaataccgacgatatcatggtcatgattgaatccagcagcgtcgcctgtgccggtgagcccgtgacggtctgcgcgatgagtggcattgcgaaaccttggatacttgatgacagcgacgtgcatgaatccgctacgaaccatttgccataatccgtgccgcgccatagcgactcggtggtgttgctatgtgaattgtgaccgttggactgtgttgaagattggttgttgactgttccgatgtaatcagccattgtgatcatctccgtattcatcgatgcttgagatattctattatgttcgtcttcaagcgccgcaccggactcacccccggccaataccgcgacgcctttacaacaccgtgtgattagggaaggtcagggtactaaccctgggaaaagtgcagtattctgcattattaaccctaggaaaaatgtaattttggacaatcgcaaccctaggaaaaatgtagaatacgcgaattgcaa

SEQ ID NO: 2255 - DNA, 3113 bp, Unknown
  R51_24m  MAG No. k141_63168
gcgtacacattgcacctgcatccatgaaccaagggaggtcccatgaaaaacaaagtgcagctcatcgcttacgccgatcgtctcggcgatggcactcttggctcgatgaccgacatcctgcgcacccgcttcgacggcgtgtatgacggcgtgcatatcctgccgttcttcactccgttcgatggtgcggatgcaggctttgacccgatcgaccacaccaaagtcgacccgcgtctcggcagctgggacgacgtcgctgaactttccaagacccacggcatcatggtcgatgccatcgtcaaccacatgagctgggaatccaagcagttccaagacgtgcttgaaaaaggtgaggaatccgagtattacccgatgtttctgaccatgagctccgtcttcccgaacggcgccaccgaagaggaactggccggcatctaccgcccgcgcccgggcctgccgttcacccactacaagttcgccggcaagacccgcctggtctgggtcagcttcactccgcagcaggttgatattgacaccgattccgacaagggctgggaatacctcatgtccatcttcgatcagatggccgcatcccacgtcagctacatccgtctcgacgccgtgggctacggcgccaaggaggccggcaccagctgcttcatgacccccaagacctttaagctcatctcacgcctacgcgaggaaggcgtcaagcgaggcctcgaaattctcattgaggtgcatagctactacaagaagcaggttgaaatcgcctccaaggtggaccgcgtctacgacttcgccctgcctccgctgctcctgcactcgctgttcaccggtcacgtggaacccgtggtccactggaccgaaatccgcccgaacaacgccgtcaccgtgctcgatacgcacgacggcatcggcgtgatcgacatcggctccgatcagctcgaccgcagcctcaagggcctcgtgcccgacgaggacgtcgataatctggtcaacaccatccacgccaacacccacggcgaatcccaggccgccaccggtgccgccgccagcaacctcgacctctatcaggtcaacagcacgtactactccgcgctcggctgcaacgaccagcactatctggccgcccgcgcagtccagttcttcctgcccggagtgccgcaggtctactacgtgggcgcactcgccggccgcaacgacatggaactgctgcgcaagaccaacaacggccgtgacatcaatcgccattactactccaccgccgaaatcgacgaaaacctcgagcgcccggtggtgaaggccctgaacgccctggccaagttccgcaacgaactgcctgcattcaatggcgagttcagctacgaagccgacggcgacacatccatcaccttccgctggatcgctgccgacggcaagaccaaggccgccctcatcttcgagcccggccgcggactcggcacggataacaccactccggtcgccagcctcgcctggaccgatgccgccggtgaccacgagactgatgatctgctgagcaacccgccgattgccgatatcgactaacctttggcccataaacgccactccgctgtgcgcgctccaagtagtgcgtccggcgtaagctgggtccatggaaaacaaaccgcccgcagtgcactgaagctagtgcgctcgggcggttttgcatgtggcggggttgcgggtcatgctcagtcggagctggccggtacctcccgccggtgatgagagcaaagaaagagcagcaacatgttggaaccgtacgtgcgcccgggtattgacgaccgcccggatctcgacaaggcattgagtcccgaagacaaggatgccgtggcccgactggccatcaaagatcgtcggcgtcctcccgaggcatccgccgatcagcccgaggcccaggccgtgcgtctggcggccgccggttcgtcggctgctgccgctgccgcggccagcgtggatgcccctgcgcctgatctgtcgtctgcatatctcgatatgcgcgatccgatggtcgccgccaatggtcagcgacccaccgctgttcagatttcccgtcttaattggggctttttcgtggcttcgattctggtcggcgcgccttgggcggcgttgaacaccatcgccatgcccaacgccgtggcgcgattgttcgactacgacaccgcttctgccatatcggtcaccatcaatccgtccaccagccgtccgctgcccgtcgccactgacttggtggtgcctctggccgtgctggtggtcgttggcgtggtggcctccatgttcgcgatgcccttggtctccgcgctgtccgaccgcacacgtattcctctgggccgccgtaccccgtggatggtggcgggtggcgtgctgtgcgcgctgatcacgctggttctggggcggaacacaggcctcgtagtgctgtgtttcttctgggcgctcatgcagtttgcctatgcgatgatttccgtgccgttggccagcgccatcagcgaacgggttccggacaaattccgtccgcgcattgagcgctggcacggtatcggcgtgatgcttggccaagcgcttggtgtatgcatgggtgcgctcggcgtgatgttcgactccttcacgccgtttgcctacaccgccgtgctgtttgcggtttccggcatcctgaccgtgatcatgctgcccaaggagccttccagccaggagcagccacatcaacgattcgagtcgagccaggtgtttgaccagctgcgtccgccggcacatgcacctgcattcgcccgtgtgttcgccgctcgcgtgtgcatgatgacgggcgttgggctgaccggggtctttctgtggtatctcgtgcgcttttgggtgtatggcaaggctgtggtgttcacttccgcgccattgaccattcccgcgggcctcctcatcgccggcatggccgcggcaacgctcatcggtgctgcgctcgcgtcctgggccgctgggccgatctccgagaagatcgaggaacggaacatcgccaccactgcagtggtggcggcatcctgcctgctgtatgccatcggcgtggcggtggcatgggggctcggcgtctggtccaccggcac

SEQ ID NO: 2256 - DNA, 4144 bp, Unknown
  R51_24m  MAG No. k141_64914
cgcgatgaattcaggagtcttcttgacggtggaatcgccatcggccggttgcgcgaagtgcatgaccggttcgaccgagttcgtctgttcggcggcgtccgccatcttcagtcggttctctccgcccacgccgtcggacgcggccatcgtgtcgcacaaggccagtccggccaccgtttcggggtacaggcgctggatgtccatcgccacgtagccgcccatcgacagtccgacccagatcgcctgctcatagccggcggccttgatcaggtccacgtaggctccggccaggcgatccagcgcctcgctgtacgcgccgttcgccatgcgggggccagaatcggcatcgctcggcaccggggatgcgccggagccggccatatccggcgcccaaatcgggaagtccggcacatcgttcaggtcggcggagtcggcgagcgccttcgcgcacacgtcccacatgcggtggtccaccgggtaggcgttcatcagcaccaccggcacgccttcgccatcgcgatagatatgattggccaattcgattgccatgaattactccttcacattcacgtcccaccagcgggaagcaaaacaactgtcagattccggcccaggccaacgcctgccgcacgatgcgaccatgaccgttgaccatctgcgccacgaacgtgttcattacgtcgctcttgggatccacccattccacgtccagtgtctcgtcctgtggcttgcagtcgccggcgatgggcaccacgtagcacagtgcgatggcgtgctggcgcggatcgtagtattcgctcagtcccggcgtggggaagaattcggccacggtgaatggctggagtccgaccggcagcagcggcagggcgatgtcgcccaggtccttggccacattgcgggcgatggcctcgcgcagcgtctcgtggtacagcacacggccggtgatcagcgtgcgttcgatcgacccgtcctcggatacgcgcagcagcgagcccacctgggagatgcggcccatctcatcggtgcgcacgggcacgatctccacgtatgcgatgggcatctgatgacgcgcccggttgatgtcggccggtcccagccagcccggcgggttgccgtggccggaaccgcccccgtggatgaagtcctcgggcgtgatgttgtcgaattcgccgcggccacggccggcatcataatcgccctcgtcgggcacttcatcattcatgactggcatgcatcccattattgcgcgtcacagcgcgccgcgcgtcaccttccagcgaaatcttgggaaacgtttggccggcggcggaaaatacgacacaaatgttgggtggtgctgggaagctggtagccagcagggagccgacggccacgaaccgcacggctccaagcgccaagacgtattgcatgaataaggcaatcgcccggcggccacgcacgagggccgtacggcgacgccaaggaaaacacagaagaagggaacatcatggcaaccaccgctatcacctctgccgatttcgagaagaccatcaccgacaacgagatcgtgttcgttgacttctgggccacctggtgcggcccgtgccgcgcgttcggcccgattttcgaggcggcctccaacgagccggagaacgcgaacatcgccttcgtcaaggtggatatcgacgccaaccaggatctggcccaggccgccggcatccaggcggtgcccacgctgatgatcgccaagcagggcgaggtcatcttccagcaggccggcgcgctgcaggccgccgatctcgacgatctgatcgcccaggccaaggcactcgacctcgccgccgccaaggccgcccagtccggtgccgaccagcaggcctgagcctgattttccttcatccactgcgccgcctatcatggtaggcagtgtgaaatccaatcaaggagcgcaatgacgagacatgccaagccgacccgtatgctcaggccgttgaacaagcgccagtggatgaagatcgcggctgtggtggccgcggcaggtctgctcggcgcggcgggattggtgtcgcgcagtttctaccatgctgatgatgtgaagccgattcccaccatcacttcgttctcggctaccgattcggccgcatcccgttctgccactcgtggcgcaatcaacagcgccgacaagaacaccacgttcattacggtgaagattaatggcgattcgcgcgtagtacttggcgaaaaagccaacatgaccaccgtcaaggacgtgctggagacgggtgatatcacgcttgacccggatgatgccgtatcgccctcgctgaaatccaaggtcaccgaggccaccgtggtcaccattaatcgcgcggatgccgatgtggagaccaacgataccgagatcgccttcaatgaagtgcgcaaggagaccagcagcctgcccaagggtcaggaaaaggtcgagaccgagggccagaagggcattatggagaccacctcgctggtcaagcgagccggcgacaaggtcgtctcttccaacgtattcgcctcatgggtcaagaaggccccggtggataaggtgatcctggtgggcactggttccaccgagtcgccgtcgacgtcgtcatcatcgtcggccgatctcggcaccactgttccggctggagaagttcagtcctgggcgcatcagtatctgttagacaacgggtatagcgaagcggacttcaccgctgcgaactacatcatcaatcacgagtccggttggagccccaccgccaccaaccccacgtctggtgcttatggcttgggtcaggccttccccggtagcaagatggcttccgccggcgcggactggcagaccaactacaagacccagttcaagtggttcatcagctactgcgagcagcgctacggcggcatcgtcgcagcgtacaactactggatcgcccataacaattactgattgcgattattctcggtctacgcaaagaacctccgccggttggcctaaccaccacacaaggggttacccccctaactttataattgcgtatgcaattcaatatcgctcgcataattcacggagacggccatgacctttaatcggtatatttgctttcgtgccatccttgaatccataggtgccattgcctgcatgctgatggctcttattggcaataacctgctcggagtaatcgtggcagcgatcgcggcgctgttgtggatcggcggcgaagtatggggcatgactgtattccgacggcagaacccgcgacgcgacgagctttccgatatgcatcaaagcgcggccatgcaattcgcgctggtcagtttggtgggcattctggtaattgtcggtttcatctacaccacactgaatttgattgaccgctcgatagttcacattattccgccaatgctactgcccgcattggccatgtgcgccttggccatttccgatattcgatatctatggttggaacacgataccgacaccgggggcgacgatgaagactagtctgaaacttcaccgactccaacgcggtatgaagcaatccgacctcgccgatctggtcaacgtgcgacgtgagaccataggaaggctggaacaggggcaatactgcccatcattgcgtctggccatggatttggcgcgggtgttcggcaccaccgtagaggacctgttcagttttgacgacgagtacgaatcagaatccgagtagcccgtcggcgtgtcgcagaaaaatttccctgttgtttaccatgcacgtatcgccaatcaccgcaatcgttggaatagcaacgttttcagaatgtcaggagaccccgccgcaacggtaatgcggcgacaatatgttcgaacgttgtcacatgatgtgaccacgttgtcacaccccccttatccgttaacataattaccccttatataccggcaaggggggggtgtatggttgggggctgtaattgaaaaaagaccgattttctattgataagaaccgattttttattggtagtaaccggttctattgtggaggttcgaagttatgaagaagaagattatggccgtgctggccgttatcgccgcagttctgggctttggtttcgcaacgaataccgccatggctgatgattacggtgcaacggttacttacagcggcaccaccgc

SEQ ID NO: 2257 - DNA, 8040 bp, Unknown
  R51_24m  MAG No. k141_67117
ccgaaatcgcctcccgtatgtttatctcggagcgtacggccaaggcgcatctctcctccgcggcggacaagctcaatatgggccgcgtacagatggcgaggctggtggagcgggccgatttgccggcgcgactgtaacacgtcgggttatcgagccatatcagtcataatggagaacatgagtgaagcgattattcgaacgttacgtaaagacgattatccggcgctgatcgacctggtgcgccgcacttggtacgccgaatatgatgagcggaccggcttgctggcagccgaggccgattgggagaactgtctggcacgtgtgaccacggcctttgtcgcggagctggaagataaacccgtcgcattgattgtggggcgtatcgacgagctcgaccatcgcagcccgctgaacatgcaccggcgtcattcgttgcgcaagctattgcaactggcgtttgcccacgacggcatggcagctgcgagcgagattctcgggactcttcatgtcgataggcaactgcgtaagcaggcggcgaacattggccatgagtattcggctgaagtggtgctgttcgtacttgatccggcggcgcgcggtcacggtctgggccggcgcatgttcgagacgatgatgagcgcattccacgcagccggcatacgtcaatacttcctattcacggataccacgtgcgatgtcggattctatgtacatcgcggcctgacgcaggtgtgcgagcagtcactgcccgcatccgggccgggagaaaacccgtcttcgttctacttgtacgaggggtcggtgcccgagccggcgtgatgcgcccgccgccgggcgaacactggtaggcttgagcacagtcggcacgtcggcataccgtccaaaggccggcgacgaagggattggcatggcaatcagcgcgaaggaactaccactcgggaaagtgttcaccccggatttccggttcacaatcccctcattccagcgggcctacatatggaaggccgagaacatcctgcaactggtaagcgacttggacgacgcctgcaagtcacccggtaccccgtacttcctcggctcgctgattctggtgcgcgagggcgacaaccgttatgacgtgatcgacgggcagcagcggctggtatccctgtcgatcatcatcgccgtgctgcgcgatctggagcgagacccggacctcatgcgccaactcgacgcgctgctggtggagcccggcgacaagctgcgcggcatcgtcaccgagcctcgcctcacgttgcgcgagcgcgacgcggcgttcttccgcgaacacgtgcaggaggacaacctcgaatccgtgttcgacatgaacgacgacgatctggcgaccgctgcgcaacgcaacatcgtcgccaacatccgcaagacgtacgacgagatctccaattggtcggcatccgaacgccagcaattcgcgcagtatctggtcaacgaggtgactctcgtcatcgtgaccaccgacgatctcgacggcgcgcatcgcatcttcgacgtgatgaacatgcgcggcctgccgctcaccccgtccgacgtgttcaaggcgcgcgccacggccagcctgtcgaccgccgaacttgacgtgtacgccgcccgctgggatgacatcattgacccgcttggcgacgatccgcatgactgtgaggaattcttcgcctatctgcatctcgtgctcacgcacaagccggccaccgacaagctcatcgaggatttcctggccgacgtgctgcaaccgtacatcgacaaaggcacagtgcccacgttcatcaaccaggtgctggcaccctatgtgatggcatggcggatcatcgcgcgccccagcgacaccatattgcccgccgaagtacgtagccggcttgagggattggacgattaccgcagccacgagtggaagcccgtggccatgtgggcgttggtcaattcgtatcgcgggctgggcgacgccgatttgtcgccgttcgtggttcgtgcctcgcgtaccgacagaaccacggccacgctggaatcgttgggtgcccatgacgagcgtcggctgttggaaattctgaccgcattggaacaggtgacgggcatccgtacgctgaatcgcactggagcgttggagcggcgcggttatgcgaacgccgccatccgtgatcttgacaagggctatttggtccagcgcgtgaacgggttgcatgtctcggacggcgaccgtgaaggcgcattggtccgtttgcatggcgagatgcagggtgacggcgatttggtccgtctgctgctgattcgcgccaacgagcagaaggccggcatgcagttggatcgaccacgccggttcagtgcgctgccgattatgccgttggatatcgaacggtcgaaatcgtttgcggactggccgcaggatcagcatgatttctggatgtaccgactcggcaatatggcgctggtgcagggccctgaggatcagttggacaggttgagtgaatatccggcacgtcgcgaccgcatgctgttgcgcgcggattcgcgccgtttcccgctgaccaatcagttgaaggatttcgctgactgcacacctgccctgctggaggcgcggcaggaagagtcggtccgactcatcgtggaatactggggcatccggtatgacaaggacgcccgtgatctgaccaagcagaatgtcgatgagttgtcgaagacctctccacggccgtctcatagttcgcggcgcgtcacgatccggcaggtgattgacgctggtctgctggtgccgggcgagcgtctggtgtgggagcggccgcgcaagggcgagcgctggttcgccacggtcaccgaaaacggtcgtctccgtctggatgacggctccgaatatccgactccgaccgccgcggcccgtgccgccgccggaggacgtcgcggcggtggtctggacgtgtggaagcgcacgcgcaacggtcagaagctcagcgacatctggaagcagttccgtctacaggcgcagtaggctacagtagccggcacatcattggtggctcccctccgtgaggggagccacacgctcatttattccagcgccgccacgatttcagccggtgttttgcaatattcgggaaaatgactgattaattcggcatccgatgtgaccacacagttggcaccggattgttgcgcggcaacgatgatcagatcatcttcaaaatcccgatgccgtttttgcagggaaaaagcctcatcacatgtcgactcatcgacagcgacgatgtcacacatctccttcacctgctcgatacaacgccatggcacccgtgacgacagaaagccgcgagtgaaattctccacttccgattcattcggtttgaattccctacgaatcgccgatgatgataggtatgcgatatccttcagcgacaatgacgcgcacaacaacgtaacgttgttcttcgcgccaagttccataaccgcttccgccatcttggcgtgatcatcacgatggagcaaatagtccaacagtacgttggtatcaagcaaaatacgctgcatggaaacgtcggtcatcaatcggccctcttcatgttgtaatacgcatcaagttgctcgtcgtacattttgtcgcggaactgcttgtaggtaaggccttccatgaggtcggtgtcttctgagatcagtccggccttgaccagttccttgtgcacgtatccggcaccttctcgaatcagtttcagcttgcgctgcttttcctcctcgcgggcttgctcttcggcggtcgtttccaatgccggcacttccttgcggtcggcgatgtacaaccacagcgaccggattacgtcacttaccgatacgcctttgcccttgaggacttcttcgacctcgttcttcagtttcgcatcaatgcgaacgttcatttggaccatggtcatggcaacctccattccaaagatgctatacagtatagcactttggcatgcatggaaaaggccggtatccgttggcggataccggccttgctcccctcagtcagcttcgctgacagctcccctcaagagaggggagccaagaaggtggttacttcatgaggttgcgcagcacgtactggaggatgccgccgttacggtagtagtcggcctcaccgggcgtgtcgatgcggaccaccgcgtcgaactcggtcttggagccgtcctcgtgggtggcggtgacgtggaccgtcttgggggtcacgccctcgttgagcttctcgacgccggcgatatcgtaggtctcggtgccgttgaggcccagggactcataggattcgcctgccgggaactgcagcggcagcacgcccatgccgatcaggttggagcggtggatgcgctcgaagctttcggtgatcacggccttgacgccgagcatcaccgtgcccttggcggcccagtcgcgcgaggagccggtgccgtattccttgccggcgagcaccacgagcggcaccttgttgtcgatgtagtcgcgggaggcttcgaagatcgtggtcggcttcttggcgaggaagtcgtaggtgaagccgccaggcgtcacctcctcgcccacggaggcgagcagctggttgcgcagacggatgttgccgaacgtgccgcgcaccatgatctcgtggttgcctcggcgagaaccgtaagagttgaagttcttcggctccacgccgcgctcggtcaggtacttgccggccgggctggaggccttgaacgcgcctgccggggagatgtggtcggtggtgaccgagtcgcccaggagggccagcacacgggcgccgtggatatcggcgaccgggtccggcgtggccttcatgccgtcgaagaaggtctgcttgcgcacataggtggacttgtcgttccacgcgaacagctcgccttccggcacgtcgaggcccttccagcggtggtcgccgtcgaacacggaggcgtagtccttgaggaacatctcgcggctcacgctgccgtcgaccacggcggcgacctcggcattggtgggccagatgtccttcaagtacacgtcgttgccgtccgcgtcggtgccgagcggctgggtctcgaagtcgaagtccatcgtgccggcgagcgcgtaggcgatgaccagcggcggggaggccaggtagttcatcttgacgtccgggctgatgcggccttcgaagttgcggttgccggaaagcacggcggtgacggtcaggtcgttggcgttgatcgcctcggaaatctcgggcagcagcgggccggagttgccgatgcaggtggcgcagccgaagccgacgagctggtagccgagtgcatcgaggtcgtcctgcagccccgcggccttgaggtagtcggccacgacctgcgagccgggagccagcgaggtcttgacccagggcttgggcttaaggcccctggcatgtgcgttgcgggcgatcaggccggcggcgatcatcacggacgggttggaggtgttggtgcatgaggtgatcgaggcgatggccacgtcgccgttttcgatgtcgaaatcgccacggaagtcggtggacacggccaccggatccttgacggtcttctcggtctcgtaggcgggggcggtcttctcgaacatgctcttggcttcggacagcagaatgcggtcctgcgggcgcttcgggccagcgatggacggcaccacggtaccgaggtcgagttcctcgtattcggagtactgcggttccacgtaatccgggtcggaagcgtcgccccacagcttgttggccttggcgtaggcttcgaccaacgcgacctgctcttcggagcggccggtcaggcgcaggtagtcgagcgtgacattgtcaatcgggaagatgccgcaggtggagccgaactcggggcccatgttgccgatggtggcgcggttggccagcggcacggaggcgatgccttcgccgtagaattccacgaacttaccgaccacgccgtgcttgcggagcatgtcggtgatggtcaggaccacatcggtggcggtaacgccctccgggatggagccggtgagcttgaagccgaccacgcgcggcacgagcatggagatcggctggccgagcatggcggcctcggcttcaatgccgccgacgccccagccgagcacgcccagaccgttttcggtggtggtgtgcgagtcggtgcccacgcaggagtcgaggtaggcgagcgtgttgccgttggcctcggccttgctcatgaccaccttggccaagtattcgatgttgacctggtggataatgccggttcccggcggcaccacgcggaagttcttgaatgcctgctgaccccagcgcaggaactggtagcgttcgccgttgcgctggtactcgatgtccatgttttgctggaccgcgtcggcgatgccgtacttgtcgatctgcacggagtggtcgatgaccatatcggactggacctgcgggttgatgacctccgggtcgccgccgaggtccttgaccgcgtcacgcatggtggcgaggtccacgatgcagggcacgccggtgaagtcctgcatgatcacgcgggacggcgtgaactggatttcgtggctgggttcggcgttcggatcccagtcgagcagggtcttgacgtgctcgtcggtgatgttggcaccgtcgatgttgcgcaccagattctcgaccagtaccttcagcgagtacggcagatgatcgatgccgtcgagattggcgatgttgtagtaatcgaagtccttgccggctgccttgagggtagccagctggtcgtcgcgtaaggacatgcttcctccgaaatcatgaatcggcttatgatgccgctgattatccgctacacatggtacgggcacgttaccgaggctctggcgtgtcggcttgaagtatgagacaatcgcgccgccgtctcaatgccgacgcgagagcttgcccgtcagtccgcgcacgaacggcgccagccacaggcacagcgcgaagatcagcgcggaaccggccaacgcgatcagcgtggccaccatcgtggcgccggtcggcagaatcagggcgaagaagttcgccacgaacgggacgaacgcgccgatcacgcccgccgccgcgaacaccgccaccagcacgccacgccaaccgttgagtggtctggccacgcgggccagcacgaacacgcccatcgcgaacaggatgatggcgctggtggcgcgcagggcggacaggtccgcggcatcgccggtcacgttccagcccatgaccggcggcagcacccaagcggccagcagcaccgacagcgcagtggcgatgccgcccggcagcgcgaacgtgaccacgcgcttgaggaatcccggaatatagcggcgcgtgttcggcgcgagcgccaggatgaacgcgggcatgccgatggtgagagcgccgatatacgtgatatggcgcggcaggtatgggtatgggatttgcgtcagcactacgccgagcgagatcagcgcggagtacacggttttgacgaggaacaggctggccacgcgctccatattggccatgacctgacggcctcgtgccacgacgtccggcaggtgcgagaacttggaatccaccagcaccacttgggccacggctttggtggcgggtgccgcgttgcccatggcgatgccgaggtcagcctccttgatggcgagcgcgtcgttgacgccgtcgccggtcatggcaaccacgtggttctgcgtgtgcagcgcctgcacgatggccttcttctggtcaggcagcacgcggccgagcacatcgacgttttcgagcacgcgggccagttcgttcacgtcctcgggcagttcgcgcgcgtccatcgccaccggctcatggtcgcctgtcagtttcactctgcgggcgatggcacccacggtcactggattgtcaccggaaatcacacgacagcgcacaccctgctcacggaaccaagcgagcgtccgctcggcgtcctcgcgaatcttctcagagcacaacaccaacgccaccggctcagcctgcacatccagttgcgggccgtccgagacattggctccctcaactgc

SEQ ID NO: 2258 - DNA, 32065 bp, Unknown
  R119_18m  MAG No. k141_452
cagcacggccgtctccggactcggtccatcgtcacgcggttcgggcgcatcgtccaacgcggtcacattcgggcgtacgcgccgcacgcgcatgtagatctgccgtttcgcgatgcccagcagccaggacagcaccttcgcatcaccacggaacgccctcgccgaccgccagcagcccagccagacgtcggcgcacacctcctcggccgtgccggcatccggcacgcgcacgcgcacgagcgcccgcaccgccgcagcgtgacgcccatacagggtctcgaaggcgcgttcgtccccggaggcgacccgcgcgagcagatcctcgtcgcgcatcaccgccccaccgggcgaggtcatgtcatcctgcgtatgcggctccttccacggcacatcgtaaacaaacgttcattgatgtatgtagctagaaacgaaccgacggttcacgacacgagcaacgacacgcccggaaggcatatcggattaagttgtgtagaagaacagaaactcacagaagaaatcgttgcgcgcgtgcattaccgagtcccaagcctggctagttcttggcaggaatgctgacatccagctgccagtgggcttgttcggtgtgggtttggaaggtgccgccgtgtgtttcgatgatggtccggtagcggtcgaggccgctgcccaggccgagtcccatgtcggcgggtgtggtggtgtcgctggcggagacgtggatggcgtccgtgtcgaaggtgacgcagatggcgtaccattcgccccggtcggcgtgttcggcgatgttcgcgtacagttccgccggcaagcccgacagcagtcgcatggtctccggcgtgagcggccggtgtggttcggcgagcaggttgtcgccggtgaatcccggggcttcgagcctggactcctcctcgtcgatcagcgattgcagaccggcacgctgcgaggcgatgccggcttctacgggcacgggccgactgccgcactcaaatcgccatcggccggttcaaagcaggatgtaaacccgctatttgcccaacagttcgtcatggctgccggttcgcatgaacatggcggtaccatcatcgcgaatccatagaagcagccagtcgccggcattgccgatgtggcattccagtacgccgtttaaatcaccggtaagtgtgtgggcgcgatgcctacgcctcaatacttccttggagtccgccgtgtcctcaagaaccagacgaatgacttctttcagcgggcgtaaatcagtgtgcttgcgtttgagtttcttgatatctcgctggaatgccgctgtgtaatccggtttgagcattgatcagattcccaacgaatcgaacatctcatcggcactgttgaaacgaggtttgccgtcggcgagcctgtttttcgcctcgtcaagggcctccatggtttcgggcggcacggtcgtataggaaaggtttagaggaatgcgcctctcccggacaatctgcttgtagaaggcgcgggtgaccgaagacaagtccagaccgagatcctcggctatgtttgcggctttctgcttggtgtccgcatccacgcggactgtgacggatgccatgctcacattaacctccaccatcattacgtaagacaatagtatgtatttgtatgctagtagtcaacattctgcggttgcgacatcttgaccatggtacacatcccgcaagcggatcgtttaccggatgcaatcgatgatcggaatgccgaccatccagctgtcggcgggcttgtccagaatggcttctggttcatcgcaacgccagcgcgggttgcagccgtatggctttgatggccggggcaagagagccgacaagcgaggtgacgatggacgcacaggccgcaatcatcgccgccgtatatgggtatgcgggcggttccagcggcgagtcggcgggcatcatccacagaattgcccagaccagcaccgcggagatgagcaccgcggcgaaggcgatgatgaggccgagcagcacggacgagccgatgacctgtatggctatgctggctctggtcgcgcccagtgcgcggcggatgagcagctcgtgcgagcgttgctcgatgccggccaatccgatgttgatcatgccgatggcggataccgacaacagtaatatcgcggtgacggtgacgccgagttggagaaaaccgatgacctgctcgtaatcatcggcgttgtcggaacggttccatgacgatatgctgccggttccgacgtcgaacaacagatcgtccaacacggttttggcgtgttgatcgtccacgccttcattgggatggacgaggatggtcagcccatccggttcccaggcttgcggccagtagcgttgcagtgtggtcgcgttgacgtagatggtgggtgtgtccgtcccgtcggcgatgacaccgttcacccgtgccggcacctgttgcggatttcctgtccgggcgagtgccacggtgccatcgtgcacgtattggcgggcgctttcgttgactgcggtttccagcgtggcgggttcgtccgctccggtcagccatgtgccctcgatgatgggggcgggcatgattcttgtccgttcggcgtcggtgatgatgatggtgacgcggcgtatctccgtgttgccgtcaccggacgacgcccatatggcgaggtcgttgaggtgatattgcgccgatgcgattcccggacggaaatgcgcgaggcgttcctgcaaagccgtgacgacttgtatgttcaccgatgatggcacgtcgacgatggcgctataggtgggtgacttgcctcccagtcgcgcgttgaccgcttccagatagtcgcgtccgagcgtgccgacgagaacgccggcgatgagggcgatgatgccgatgaacatcgacagggcggtgaggctggtacgcaacgggttgatgcgcagatccttggcgatcatgcggatcacgacagtcgccccctgtcgatcgtcagtcggcgttcgcatcgggcggcgagctgcgggtcgtgcgtgacgaggatgagtgtgaccccgagttcacgaacatgtcggaacagtatgtcggcgaccatgtcgccggtttcggtgtcgagcgcgccggttggctcgtcgcagatcagcagatcgggatcgcccaccagcgctcgggcgatggccacgcgctgctgttcgcctcccgacaggcgcgacggcatgctgcacaccgtccggctcccgagcccgacggtgtgcagcatgcgcgaggctcgtcttctgatgacccgcagggggatgcctccccggtattgcaatgggagtgccacgttctcccatgcgctcagatgcggtatgagggagtagttctggaacacgaagccgacatgccggcagcggaagcgcgcccggtcggcgtcgttccacgcggcgcagtcccgcccgtcataggagagcgttccgtcatagtcgttgttgagcagcccgacgatggaggcgagactggttttgccggatcctgatttcccgatgatggcggtggacgttcccctctcgaacgatgcgctgacatcgtccaccgtcgtcaggcgttcgccgtcgggcagccggacttcggcgctcagatgttccaactggatgagtgtgctcatgattgcgctcccggtgtgagattcggagctgtcgcggacaccatgtcaccttcctcgagaccgtcgaggatgatgatcgacgtgccgtccgatgcccccaacttcacgttcacggtggcgaacgaatctccgtcacgcctgctgacctggccggaggcgagcctgccggcgactgcggtgacaggcaggatcaaggcgtcctcgaccgccgtcgcggtcagtaccacggtggcgttctgcccgggacgcgcctgcacgtcttttgggaacaggcattgcagtgtgcgagtcgattccgtcccatgcgcagtcgtcgccgatccggccgtatcttccgctgatgagggcggagtggcgacgccgtcattcactaccgcggcacagtccgtgggcccctgcgcgtcggtgatctggaatcggcccgtcaacggctggtccgggtctatggtcgccagcagcgcggtcgcgtccacgctggcgctcatgccgccataccgtatcgagaacagcggatagtccgcggccatgtcgttgtcctgcgcgaccgtttcgatcacgccgtcgaccggagccgtgacctgctgatcgccgacggtacccaacacgtcgcccgcatgcacgtatgctccttgatcagtcgtggagtggaaccagcctttcgccggagtcgtaagcgagaacacaggagccacctgcacgccggtggaggaagaggataacggcgtgatgccgcccctacgtacctcgaccgtggatgctggccgcttcgccgtggaggaggcgtcggacgatggcgtccgcgacggcgagcaagccgtcatcatcgcgcacatcgtcgtggccgtcacgcacgccaacaggcatttgaacggtgcgatcgcattcatttcgtcggtccgttctcatgccggtaccatgtgcagtccgtggtgtagaagtcccgcatggtcgaatagtcgccgagttcggatttgccgatcacatcgttctcgtatatgccatccttgtcctcgtagtagttcttgaaccagtcggtatccagcagcttgcgcagctgctggagggcgcctcgggctgcttccgcgttggtctggctgttgtcgagaatgtcgcgttccaccgagcactgccagtagacatacgcctgtccttccccacttcccttggcatacagcgaggacgcggcctgcgccttgggtatattcgctggaaacgcatcgccgttcatcagttcaaaggggaaatcctcgacggtcgccttgtattcctcgttcgcctgctgccaggtcagcatgccgccacttcccgaggtgccgccgttcggagtcgtcccgcaaccggacagcagcagcatcactgcggtcagaatggcggccctgcgtcgtgttcccgatttcatcatcatgctccttcggacgattgcacaactgtcgccaaccattagcccacagacggcgatccgggagcaaaagactgtcatgcgcgcgcatgacaacgatacgtcgaggagcatgggatgcgcatacgatgggtggcatgacagacctatcggactcgcataccatctccatcggggtgctggacaacgattcgctcgccctcaacgccatagccgtgatgacgagccgtctctccccgcggttccacatcatctggagcaccacgtccccggcgatggcattgcagcgctgcatgacccacggcgcgcgacccgacgtgctggtcgtcgacatggccttgggaggcatcaccggcgcggacatatgcgccagaatccgtcggcgcactccgacgatcggcttggtgtgcgtcacctcctatgaccttgatccatatcggcaagacgcggtcgaggcgggcgcgcaatgcctgatagccaaagatgacatcgtcaaagagctcccgcaggccatacgatgcgcggcacagggcgagcccgtccccggcaccggattccccaccgcacgggaagccaatcgcaaactcaacgaaggacacgcgaccgagggccggctgccggaaaacgacaagccatcgctgtcctccagggaacgggacgtactgcgcctctacgcgcatggatcatccaccgacgagatagccgcgctcctgaatgtcagcaagggcagcgtcttcacctacgtcaacagggcatgccgcaagctccatgccgccgaccgcaaggaggccctcgccatatgcgcccgatacgatctgctttgaaccgtatacaccacccagccatactggccgcggggctggtcctcgcagtggcgatccccgtagagatgggcgtgtactcatcccagaacctgctgtcatggtcgaccatacgcatatcgctgctcgtcgccgtcctgtgcgccatgctcggagcggcaccggtatgggccgcctgtctgctgttcgcggtctcaggatacgcgttgctgtggctgttctcgccgttgacgaccatcatgatcgccgcactgacctccatagcggtcctctcgttcgtcaaaccccgccttggagccgcttccgcactggcggccctcgccgccctcgccgcgaacaacatgcagaacaacctcacctcgtcgaacatcgtaggcatgatcatcatgtgcctatgcccattgtcgctggggttcagtctcaacctgctgttcgcccaacggcaggcgaccgcgacactcaggcaacgactcgaccgcgaacacacggcgcgtcacctgcacgacaccatcagcaacgacctcgcctacatgatcctgcgcatcgaccaggcaagccgcagtgattgccccgccgatcgggagcaatatcagcaccaactcaccgatctgcgcgccatcgccgaaacggcgctcgaccacacccaccaggtgatacgacaacttgaacgcaccgacaaaccagacgatcgcagccgcatcgtcaaaacaaataacgacgacaaaaccgacaggaaaatcgaacagcagcgtgaacggcttgacggcatcattcaatcgcaacgacgtcgccttggcggcctcggattccaaggtgacgacatcctcgggacgttcgaccatccactggcggacgacatcctcgaccttctcgaaggactgctcaacgaactgtacgcgaacatcgccaagcacgccgccccgcacgaatggtacgccgtcacgatctccttcgaccggcggcacgtcatcatttcggcaagcgacgtactaaaggacgaagcggtacggctcggactcggcagcggcctcaagagataccgaaccgttatcgaatccatgtccgggacgttcgacatcaccgatgattccgacaactggaacgcgaacatcaccattccattgtctgtaacacgccggtaaagggaatgacggcctcaagctgccagtgggcttgttcggtgtccggctggcttgcgctggtgtgtgttcttcgagcgagtcgatgacctcgtgcgtgtggcccatggcccggctggcggcgtcgcgcaattcgtcgagctgttgctggtattcgtgttcgtcggcgggcatgccgtcggtcccggcgtgaccatcgggacatccagcatgaggattacgcccgtgacaagcgccggccacaggaaccggtccgggcggaacatgccgccgaccaggccggcaagcacagccagagccaacatgatatcgcgcacggtcgcggtgccggggacccgtgccgccatcgagaacacgtactccgcgagcaccgccacggacaatacggcgcaggacgccgcgatcaccggatgcccggcatgccgcaggccaagccggtcggaaagccggggcagagcagatcgtatctggcgcatgcgtccagcacctccttgcggctggcgactcccagcttgtcggccacgcggtgcacgtacgtgaacacgctgcccgtcccgccgctcctgcgacggatgcgccggcacacgtcagcgcccgtgatttttttccccaacgccatatccaacaccggcgcatccggcctggtatgcgggttatggcaatgctcgatcgccaccgcgggcgaacccgtgcccccgcattacataaaagtccttggaaacggccgagatcatcgcgcacatcgcatccagggcgaacggatcattgtccaatacgggcgatacggatcgaccgcgccgcagccccggtcatgtcatcatgtcccatgccgctcatcgtggccacggtcgcagccggacgaaacctgctatcatgcgattacttgacacgatgttgcgcttttggccatgcgcaggttgaatgggattgcgccacgaaaggatatgccatgaacgatctgctgattatcgacatgctgcccacgtacgggctgctgttctacctgctgatctcggtattcgtcttcgtgggatgccgtggtctgcgccggaggacctcggatcgtggcctgctgcgttttgccgtaggcgcgttcttggttgtttccgcgctcggcgccgtgttcgctgcgctggtgtatatcatggcagcgcctttggcgcagccagatatggtcgacttctaccgcacgtaccggccaggagctctgatcttcctgctgggattgttcatcatacaatttgtcttcggcgtcgctgccgtgtatcggggaaagtaacctggtatatcctgcgataaacgcattggcagacacttgctgcctatctgtaaacacaccctagtaaggcttgcggccgttggtcgagcacagtagtagtgtggtctgctgtgtcaacaggaggagtgtgaccaatgcggctgattgagacatggctggcggaccaggaacgcgcgtttgacttgttcgcgaaattcccggcggaggagacgggattcgagaacccagcggccggcatgaatcgtgaacggttcgccgcatatgtgcgagggttgcgtgatgagtcgcttggcgtcggcctgccggacggctgggtgccagccaccaaatacattctcgtcaacgatgagggcgactatgtgggcatcttcaacctgcgtcaccggctcaccgacttcctgcgcaacggtccgggccacatcggctacggtgtcgcccgcgaataccgcggtcacggctacgcgaccgccgggctcaagctcacgcttgccaaggcccgcgagctcggcatcaaggaggcttacctgagtgtccacaaaaccaatccggcaagtcttgcggtgcagcagcattgcggcgcacgtatcgaccatgaagacaagacggaatactacacacgcatcgccacctgcacggagagcgatggcctctatgcgcgaggcgattgacggcgcctcttgcgtgtaaatggccgattatcaatcggttttaatcgatttcgcctcggtcgataaagtcgccgtcgaggaaccaataatcgtgcggatttccgcgtaacgccatgaacggcgtgagttccacgccctgtgtctcagctctgctcagcagataggcgcggataatccacggatactccagcacgcccgacttgagggtgatgatttgctccactctgctgccgctgacgccaaaatccctgccgccgttcggcggtcagacccagccggctcatgttctcctgaaattcgcggatagtcgccgcgcgttgctcactgttcaaagacatggcttcatgaatgttgcattggcaccttaatcatccatagttaaggcaccacgcaacatacgattcgcttacgcagccatccgacgatggttgggatagattgttcggcgaagcggtctatggcgtcggcggtgacgtaggcgtgggcggtgaggcgcaggtacagttcgccgccgaccgcgctggccgcctcggatacccgacgctccgcgtaatcggcaagatcggacatgtaccggcgcacggcatcacagccccacagtcgctcgatctcgcgcagggactcgggcgcggcgatcggaccgcataaatcctgggtgccttgctcatcgaatcgctccgggaacgggtcagcgaaaccccacgagtcgatcagtggccacaaatcctgaccatcctgaccgccttcgggcggaatcaccagcaatgccgtgccacgcggcgcacacgggaacttatgaaaattgccgacccaccaatcggactgcagtccgccggccggatcggccagttgggcgggagcgtgcgcgccatcaaccaaaatgcggatgccgcggcgatgggcttcggcggcgatgcgctgggccgtaaacagcatagcggtggcggaagtaatctggtccaacacgatgaacgacgtacgctcgctcatctgcgcggtcacggcgccgaccacgccatcctcgtcggcgtcaatggtaactggtgcatcttcctcatccatgcgaatgagacgaatcgtctttcatcccaatgatttcgctctcatggctgatacccgcgtgccgtcatgttccgtaccttggaatcagaagtcgagagtcaaggtccgaaaccgaacggagcgggccgaagcagggagcattgaagatgggatttcttaagaacttttccgaaccgtttgcattcgcgatggcattgtggccgtttgtgtccatgctgctgaccgtgccggtgctggcgttgctgtatcaccgcgacaatcgcatccgactgtcgtcggccatagtggcgtatggcacggtgctgtacctgctcggcctgctgtgcttcacactgtatccgatgccggccgatgcggcagcctattgcgccgcgcaccatctgacgccacagctcaatccattgcagttcatcggtgacatccgtaccgatggtctcaccgccgtactgcaaatcgcgtttaatatcgtgttcttcctgccgttgggcttcatcatgggccgtatctggcgttggccgctgccggttaccgcagtactgtcattcgccacgtcgctgtttctggagacgatgcagctgaccggcctcatgggcgtgttcccgtgcgcctaccgtctgttcgacgtggacgatctcctgtggaacacgaccggcgcgctgatcgggttcgcgctggccatgttctcgctgcgcctgattccggcgcgggtcgccgatacgacgccgaccaccacacccggcttcatgaggcggctgatcacgttcatcatcgacatgacgctgatcgggttcgccgtgatgccgacgcatctgttcgtcatgatcgtccgctcaaacctgccctcgggctccaacggctcatggcagtcgatggaaccgtttgactggaccggttcgatcctcttcctagcggcgctcatcctcttcgagggcgtggtgccatggttgcgcggcggctgcacgttcggcggcagcttcacgcacatgacgatagagacccggccgcgcgaagggtggcttcgcgtggcgttctatgtggcgcgcatggcgacgctgatcgccgtggcgtggtggcatagtggcggattcaatctgctggtgttcatcggcctcggcatcttctggctggtcaagcgtcagatgccgtacgacctgatataaaccggcgctccgctgcttggcgttacaggaaaacctccgaccactggtcgggattcggaatgctgcgcagcgggccggccaacgatacggccaatcccgctacggaacagaccacggctacggccatcaccgccgtgaaaccgagatctggctgttgcaacagccagccgaccatcgccgggcatgctgcgcccagtatgccgaccgtggtttcaaatacggcagaagcccgcccctgcatgttgtcgggtgtcttgccgtagagaaagcccagcagaccagcgttcaacgcggggaacggcaggacggccagaatctggcagatcagaatggccgcgtagctgtgcaggaatagcagtggcatctggctgaccacgaacaacgccagcgcgcccgcaatcagtttccctgtgggaaccatatcgactagcttgttggccaacagcgagccgaccaaagtactcacgcccattgccgtgccgagcagtccgatcatgaccgcgttggcgccacgggtggccaacatgatctgcgcgccggtgatactggctacgcaggcgatgttcaccattgcaccgagtatgatcgcgtataggaagacgcgcttaatcagggcccatcgccagccttcgaccaagtgcgtgggaaatggcacaacagaagtgccgtgggcccaaacggcgaccacggcttagcgcgacgagtcaacgcgcattagctgtctgcgaacgacaccaacaccttgtacataacaatgcccctttgcaaaaaacaaactccaattattgtaccagttcgagcatagaaccaggcgcgtcactgggcacaacataatcggccatcaatggtttctcggcttcgaggggctgatttcgtccggtggggacatctacttggctttcaaggggctgttcaaacgccgaaccgcaagtataaacagctatgtggcaacgacatgacgccatttcagagccttgtctacttgggcatcagccccttgaaacgcaagtagacctccggcgaacgccgaatcagcccctcgaaaccgagttaggcattcttttcgcgtttgagctgccgttcgagggcgtaataggccgcataacagcaggcgacgaacggaatcatgcaatacagggtcgaacgttgcgtctcatcgagcaccacgagcaccagcgcgccgatgcacatcacgatggccagccacggcagcaccgggaaaccgggcgcacgatagccgagctcatcggcgctgtgcccatcccgcgcccatttgcgccggaaacggatatggcacacgcatacggagaaccacaccaccagcgtcgccaaacctgacacggcgaccaacaccagatacacggtcgaggcggcgatcacggaagacagcaacgccagcagtgagcccgccatgctgaacagcacggcccacaccggcacaccacggaaattcgtcctagcaaaacgttcgggaatcagccgctccttggccagcgaccacaccatgcgcgaacacacgtacaggccggagttcgcggcggaaagcacagccgtcaacaccacgaagttcatgatgtcgccggcgaacggcataccgattgactggaacaccagcacgaacgggctcgtatccacgccggcctgatgccaggggatcaaggccgccatcaccagaatcgagccgatgaagaaaatcgccaggcgcagcaccgtggtgtgcacggccttgggaatcgcacgcgagggatccttggtttcgccggccgccacgcccaccacttcggtgccggagaacgcgaacaccacggtcagcagagtcgagaaaatcggcgcgataccgcttgggaaccagccgtcagccacgaagttgcccagcaacggcgcggaatcatgaccggcaatcggtatggcgccgaagatcgccagcaggccgatcacaatgaacgcgatgatggcgaacaccttgattgacgcgaaccagaattccgcctcgccgtacagccgcacggacatgatgttgagcgcgaacaccaccacaatgaacacggccgaccacacccaggacggcgaatgcgggaaccatcgctgcatcaacagccctgcggccgtgaattcggaggcgagcgccaccgcccagttcagccaatacaggatggcgatggtgaacgcggtgccggggccgatgaaccgtttcgcgtacatatggaagcttccggcgtacggcatggccacggacagttcgccgagcgagaccatcacgcaatagacgagcagggagccgaccgcataggcgagaatcgcgcccagcggaccggcctggtgaatcgtatagccggagctgacgaacaggccggtgccgatcacgccgcccagggagatcatcgtcaggtgacgcgactccatcttccgttcaaggccggtatcgtccttgggtgtgccggctgccgccatgctcgggtctcctttggtcgggtgaacagttgtgtctcgtgtcggttgtgcgggcggcgctcgatgccgcctaccatatgatagcggtaacacgaacagcgagtggaacacgaggagtttggaatgatggaactgtatatcggatcgcatctgtcgacggccggcggatggaatgcgctgctggaacgttcccatgaggagggcggtaccgcgttcgcgttcttcccgcgttccccgtacggcaagcgttcgaaggcgctcgacccggccggcgcggcggcgttcggtacgcgtctgaaggctgagggctatgggccgttggtcgtccatgcgccgtacgtctacaatctagccggcaaggatgaggccaagcgcacattcgcgatcgaggcgttggccgaggacatcgagctgctgaccgccatccgcgaggccggacaggaggtgtatatcaatattcatcccggcgcgcatgtgggccaaggctccgagaccggctgccggctgatcagcgagggactgaatcaggtgttcgagcgcgcggccggcgtcatggtgcttctggagaccatggccggcaaaggcacggaatgtggccgcaatttcgatgagctcgccacgatcatggatggcgtggagaataaggcgaacgtcggcgtcacgttcgacacctgccatgtgttggatgccggctacgatttggtgcacgactacgacggcgtgatgcgccagttggatgaggcgatcggcttggccaaggtcaaggcgattcatgtgaacgattcgcagttcggcctcggctcgcacaaggaccgtcacgccaatatcggcgagggccagctcggcatcccgtttttcacgcgactggtcaacgacccaatcatggccaagctcccgatgatcctcgaaaccaaggagcagacgcccgccacgcatcgcgacgagatcgagttgttgcgcggattggtgcaaaagtagtcgtagtcgaccaatgtcgagcagaagagacctgtttttgactgatggccatacgaggttagctatcagcggggcgttgattgacccgtcttcatatacagctgcatagccggttccagctgcaagagctcaaaacagacgcatgggttcggcggaatccaatggctgaataagacgtttgccgtcgctgttcagtggcgcgacttcgtgaaattgcagatgccgggaaagcatggtacccgcttcccgcatggaatctaacagtgcggctccgtcaacggagcggtccagccatgaggcaaccatattccgaggaaccagcaggggcatgcgatcatgcaccttgacgaactcgtccgcggcagggcaggtgatgatggttgcggtcagctgccatggcgatgcgggagacggcctccaccatgagtacaggccggccaaagacaatagttcatcatgtggcgcgtgaaaatagaacggcctgcgacctttccattcgtagtagccggaagcggggatgatggctcgcatggattttgtggattcggcgaacgccggcttgacatgcgcagactccacacgcgcattatatgtggggtagctcagcactttgctggcgctccatcgcggcaccagcgaccaataggcaccggtcagatgacggcggccatccttgccctgtgccaccacgccaatgttctgcatgggtgcgatgttgtaggaaggctgtggcagagtgtcaacgcgcacgtcatcctcgtctaccgcgaactgtgaggccacggcatcccaatccaaatcaagcgcgaatctcctgcacatgcgcccagtctatgccatcaatggaatcaatcccaggccgtatgaccgatattcatggcgattttcctttttgttggccgctctggttccgtagcgatacgaaccaacgaggaatagcccagaatgtaggacgggttcggcaatcgggacggggcgtgacctagagtggcgcatgaccgaacaccaacaaagggaggaccatgtcggttttggacgaactggtggcgggagcgctggaggatcagcgcgcccgtgagctcaccgtatcgcttgaggacgtgaagaaggccgcgctggcggccccggctccgattgacgcgacacgatggcttaagcgcgccgacggcatccccgtgatcgccgaaatcaagcgcgcgtctccgtccaagggccacctctccgacatcccggacccggccgcgctggcccgcgagtacgagaggggcggcgcaagcgccatctccgtgctcaccgaaggccgcagattcctcggcggccttgacgatttcgacaaggtccgcgccgccgtgcacattccggtgctgcgcaaggacttcatcgtcaccgactaccagatcttcgaggcccgcgcccacggcgccgacctggtgctgctcatcgtcgccgcattggacgacgcccagctcaagcatctgctcgacctggcgcacgagctcggcatgaccgtgctggtggagacgcacacccgcgaggagatcaaacgcgcccgcaaggccggtgccaaggtgatcggcatcaatgcgcgcaacctgaagaacctcaaggtggacgtgaacaaatacaacgaactcgcggccgatctgcccgatgacgtcatcaaggtggcggaatccggcgtattcggcgcggtcgaggtcgaagactacgcccgcgcgggagcggacgcggtactggtcggtgaaggcgtggccaccgccgatgatcatgaacttgcagtggaacgactagtaaaggcaggagcacaagtgaaagcatccgaaacgaccccgctcagcgaacatcagggaccgtattggggccagttcggtggccgctatgtgcccgaggccctcatcaccgccctcgacgaacttgagcgcgtgtacacgcaagccaaggccgaccccgaattccacaaggagttcatgacgctccagcagcgttacgtgggccgcccgagcccgctgaccgaagccccgcgcttcgccgcacttgtcaaggagaagaccggtctcgacgcccgtatcttcctcaagcgcgaggacttgaaccacaccggcgcgcacaagatcaacaacgcgctcggccaggccctgctcgtcaagcggatgggcaagacccgcgtgatcgcggagaccggcgccggccagcacggcgtggccaccgccaccgtgtgcgccatgctcggcctcaagtgccgcatctacatgggccagatcgacgcccgccgtcaggccctgaacgtggcccgcatgcgtatgctcggcgccgaagtggtcgaggtgaccctcggcgacaagatcctgaaggacgccatcaacgaagccctgcgcgactgggtcaccaacgtcaaggacacgcactacctgctcggcaccgtcgcgggcccgcacccgttcccggccatggtgcgcgacttccagaagatcatcggcgaggaagccaagcagcagctccaggactggtacggcatcgaccatccggacgcgatctgcgcctgcgtgggcggcggatccaacgccatcggcgtgatgaacgccttcctggacgacgagcgcgtgaacctctacggctacgaagccggcggcaacggccccgaatccggcaagcacgccatccgcttcgcccccggcaccggccagctcggcatgttccagggcgccaagagctacctgctggaaaccgacgaaggccagacgctcgacacctactcgatctccgcaggcctcgactacgcttccgtgggccccgagcacgcatggctcaaggacatcggccgcgtgaactacagctgggccaccgacgaggaggccatgaacgccttccgcgacctgagccagaccgagggcatcatccccgccatcgaaagctcgcacgccgtggccggcgcgtacaaggccgccgccgatctgaaagccaagggctatgacaaggccgtgatgatcgtgaacatctccggccgaggcgacaaggacatggccaccgccggcaagtggttcggctacctgaccgacgatcaggccgccgcgctcgatgtgaccggcgcccacggcaatactgtcgcctgaacaagaagaggagattgttgattatgaccaacgaagcaaccacgccgtccggccagccgctgggcatcagccacaagcccagcaagtcggtcgctatgttcaccaagttcaaggccgagaacaagcctgccttcatcggctacctgccctacggcttccccaacccggacgtctcgcttgacgccttcaagacaatggtcgagcacggcgtcgacgccgtggaaatcggcctgccgtactccgacccggtcatggacggcccggtcatccaggctgccgcctccatagccctgaacaacggtgagaccatcaagcgcgtgttcgaggccgtcgagaccgtggccaacgccggcggcgtgccgctcatcatgagctactggaacctcgtgtaccactacggcgtcgagcgtttcgcccgcgacttcgagaacgccggcggcgccggcctcatcaccccggacctcatcccggacgaggcgggggagtggatcgaagcctccgaccgtcacggactcgaccgcatcttcctggtctccccggactcgtccaccgagcgcctcgaaaccgtggcccgcaacgcgcgcggcttcgtgtacgcggccgcccgcatgggcgtcaccggcgaacgcgccaccatcgacgcctcgcccgaactgctcgtggagcgcacccgtcaggccggtgccgagaacgtgtgcgtgggcatcggcgtgtccaccgccgaacagggcgccaaggtcggctcctacgcggacggcgtcatcgtcggctccgcgctcgtgcacaccctgctcgcggacgacaacaagaccgcacgcgacccgaaggaaggcttgaagctgctcgccgccaagagcgaggaactggccgaaggcatccacaacgcccggtgaacacccggtgcgcctcacgcgggttgtgccgtgacacggtagggtagtcacagagcatcaagcacaacccgcgcgtggacacaccatgagcaccagcaagtagaggcacgatgaatctggcttatattccctcgccgaccttctccaagttcgagatcggcccgttcactatccacatgtacgcgatctgcatcctgatcggcatctgcgtggccgtatggatcctcaccacacgttggaagcggtacggcggcaccttcgaccagattctcgacaccacgctcgtcaccgtgccctgcgcgctggtgggcgcgcgcctctaccactgcatcaccacgccggccgactacttcccgcccaccggcaacttggtcaacatcctcaaggtgtgggaaggcggcatggccatcttcggcggcatctccgtcggcaccttggtggcgttcctgtggtgccgccacaagcactatccgttcgcgatcttcgccgatgccatcgcccccgcgctgcccgtggcccaggccatcggccgactcggcaactggttcaaccaggaactctacggctggcccaccacgttgccgtggggcctgaagctcaacgacgcggacgccatcggcaaatccgaaatctgctattccggcgcgcaatgcccggactacagaaccacgctgttccaccccacgttcctctacgagatgatctggaacctcatcggcgccgcgctcatcatctacctcggccacaagctcgccgaccggctcaaggccggccagcagttcgccatgtacctgatgtggtacggcctgggccgcacctggatcgagaacgtgcgcatcaactactccacggtgatcctgggcctgaggaccaacgtgtggaccgcgatcatcgtcttcgtgctcggctgcatcctgttcgtcgtgctctaccagtacggtccggaccccaaggcgcaggcgcgcgggcttgcggcggtcaccgccgacgagctcgaacgccagagcatcgaagaggaacagcttcgccagaagaagcaggccaagcgcactaagtgacaccacaataaacagcgccgaaacagcgcgaaacacgggaccccaagtcccattgcacagataaggtaggaaaccatgagcaatatcgcaatcgcacccagcatcctgtccgctgacttctgcaacctcgaacgtgatctcaaggccatcgccaacgccgacctggtccacgtcgatgtcatggaccatcatttcgtgccgaacctgaccctgggcgagccgatcgtcggccgcatctgtcaggtcaccgatctgccggtcgacgtgcacctcatgatcgaggacccggaccgttgggctcccgaatacgccaagctcggcgccgcctccatctccttccacatgggtgccacccacgcccccgtgcgtctggcccgacagctgcgcgagatgggctgcaaggcctgcttcgccgtgcgtccggccgaaccggtcgagccgatcttcgatatcctcgacgagttcgacatggtcctcatcatgaccgttgagcccggcttcggcggccagaagttcctcgacaaccagatggccaaggtccgccgcctgcgcgatgagatcacccgccgtggcttgaagacccgcatccaggtcgatggcggcgtgagccccaagaccgcgcacatcgtggccgaggccggcgccgacgtgctcgttgccggttccgccgtgtacggcgccgagaatcccgcccaagccatcgacgacatccgcaccaaggccgaggccgcgttcaaggcctgagctccaagcctgaaccgcaatccacctttcatccataaccgcaagaaaagaatctgaatcacatgaagacgtttgaatccctgttcgccgaactgtccgaaaaggcccagacccgccccgaaggctccctgaccgtcgacgagctcgacaagggcacccacttcatcggcaagaagatcatcgaagaggccggcgagacctggatggccgccgaatacgagggtgcggaccgcaccgccgaggaaatgagccagctgctctaccacgtccaggtcatgatgatcaagcacggcctgacgcttgaggacgtctataagcacctgtgagaggaacgcaaatgctgagaatcgcagtgcccaacaagggcatgctatccgaacccgcgtggaacatgctggccgaggccggctaccgtctgcgcaccaaccctcgccagctggtcgtgcaagatcccgacaatggcatcgagctgttctacctgcgtccgctcgatatcgccgtatacgtgggccgcggcgccatcgacgtcggcatcaccggccaggatttgctcaagaactccggtaccgccgcgctcgagcacatgccgctcggctttggtgcctcgaccttccgtttcgccgcaccgaacgaatccccgatcaccactctggaggatgttcagggcaagcgcgtggccaccacatttgataagctcgtacacgactatctggtcgagcacggcatccaggccgagaccatccacctggacggtgcggtcgaatcctccgtgcagctgggcgtggccgacctcatcgccgacgtggtctccaccggcaccaccctgcgcaacgccggcctgcgcgtgtttgccgaaccgctcatgcactccgaagcctgcctgattcgctcgccgcgtctgaacgagcaggatccgcgtctggccgtgctgacccgtcgtctgcaaggcgtgctcactgcgcatcagtatgtgctcatggactatgacattccgatcagcaaggtcgccgccgccgtggccgtgacccccggctttgaaagcccgacgatctccccgctgcacgacaaacagtggaacgccgtgcgagtcatggttcccaaggccaaggtcaaccagctgatggatgatttgtacgaagtcggcgcacgcggcatcatcgttaccgctctgcaagcctcccgcatgtagactgttagtcgatatgaccaaccagaaagtcaacgccagatacagtccggaagcacgtgacatctatttcaccgtgcccaatttgatcagcgcgctgcgaatcatctcgattcctttcatcagcgtgctgatctccaagcatgaggtgattgcggcgctagccctgatcgccatttcctcggcttcggacggactcgacggcatcatcgcgcgcagattcaaccaagtgagcaagatcggtcagattcttgatccgatcgccgaccgactgctcattttctgctcgattctggccctcagcgtcgccggcatcatcccatggtggatgctgattatcgtgggactgagggatctgtggatggcgattcaggtgctatggcttgcccagtacggttatggtccgctgcccgtgcatttcgtgggcaaggctggtaccgcgctgctgatgatttccatcgtcagtcttattttcgccgatttgggcaccagtacgttcttccacttgctctacatcgccgcgctggccgccggcatctggggcatcgccatgtattggctcgccggatatatctataccaagcagggcgtcggattgctacgcaaggaactgggggagaagtatggcgcttgaggccatggccccggtctcgttccccatacccaaggagaatgagccggtacgacgccgcgccgtgttctcccactcagtccgaggcgcggaatcgcatcatgcgctttccccggatgacgccgccgccatccgcaccagacgtcgccgtaaaaccaacgacgattcgcttcagctcatcgatgatcttgtcaatcgtccgatggatccgatgttctccgactcacgactggtccatgagcatcgttcgaccttctccatctggtttaatcgcatcgtcgtattcatcatctgcgtcggcgttggctttgcctgcagcctattcgtgcaacagttgcaatccgatccgcgtaagcaggtacggcagactttggccacgcaattggagaatcgcaactcgcagatagacgaactcaccacggacgtcaataatttgcgatcccaagttgacgaacagtccaagaaaatctccggcagcgtgaaaagcgacacgcttatccaagacgaaatggtcaatggtgccacggtggtcgaaggcgaaggaatcaccatgacgctggccgatccaatcgcggcaagccagtcggatcaatcctcctcgacgagagtcggcacctccacgaacatccgagtcatcaccgatctggatctgcaacaactggtctccctgatgtttcaaaacggagccgaagccattgccatcaacggtaataggctcggcgcgcaaacctcgatacgcaaggccggcgggcatattctcatcggcatgaccgcgatacaaagcccctataccattgaagccataggcgataagagcgccttggccgaagcgatgggggagaagagacttgcaagtctttacgattccttcaaggaagccggtatctacccgcaggtgagcaaatccaattcgattacacttgaggcagcagtcactggcgaagtgaagtacgcggaaaggaatgaataatggcagccgttctgggactgatcatcggcgtcgtcatcggcgtgttcgtcaagccggacattccgatcatcgtgcagccatatctgccgattatggtggtcgctgctcttgacgccctgctgggtgccgcgcgagcctatttcgagcgcagcttctccgaccgcgtgttcgtgatctccttcctcgccaacgtggtgacggcaacactgctcgtgttcctcggcaaccagctcggcgtcggttcgcagctgcagacggccgtcatcgtcgtactcggcatccgcatcttctccaacgtgtccgcgatcagacgcttcatcttccgaggctgacaagggtactgacgtatggcacgtaaagcacaatcagacaacatgctggagaaaatgcgcgaccagcatgcacaagacaaggtcaacgaccggatggaaaccgggtcgttccccacggtgcgcaagaagccccggaaggatctcaaccgggccagcaacaaatcacggctactatcctcgattctcattgctctgatgtgcgcgctgctgggtttcgcctacatgagccagatcaataacactaaatccacgtacgaaacgatggacgagagcgaactggtaaggctgctgaacgagtcgaatacgcaaatctcgaatctcgagcagcgtaaaacccagttgaacagccagctcaactcactgaaatcggcggctaacgagcaggagcaggcgcgtaagatcgccaagcaaaacgaagagaccagcggcttgatctccggcagactcccggcgaagggccagggcgtgaccatccggatcggacgaggctcgacgactaaagtggacgcctcaatcatgttcaacctcatcgaggaactccgcaatgccggcgccgaggtaatcgccatcaataacgtgcgcgtcatcacctccacctacattcaggacgccgaggaaggcttgatcgtggatggcaccaccatcaagcccacatacacggtgaaggccatcggcaatccgcaggagctgtccaacgcagtcgatatcgccggcggtgtgggcgctcagctccaggtgaaatacggatccaacgtcaacgtgcagccttctgacagcatcattatcgacgaagtacgcgaagctacgcaaaaccagtatgcaaagacggtagaataggggattatgaccaacccgattcctagcgcaggcgaaaccaccattatcggcctgcccgcgattaatgtactgcccattaccaccaccggcgatcgaccgctgactcaagaggatctggacaccatcaccagattgtccgagggaacggcattgctgatttccgccaggggagcggtctcaggttctcgttacttgcttgacgaggatgaaatcaccgtcggtcgtgatccgcgagctgatattctgctcgacgactccaccgtatcccgtcagcatgccgtgttccgcagggtcaacggtcagttctttgtggttgacgcaggaagtctgaacggcacctacgtgaaccgtcagcgtgttgatcaggcgtcgctgaagaacggcgacgaaatcatgatcggtaaattccgtctcgtgttcttcacgaaatccgccattatttcccaatagtccacacccagcacggggttagactgattgcagaaattgcaatcatgtgattacaccagtgtgagtcacatgcgagacacgcatgagttaggggagtgccatgggacagacagggctgcatcttcatgtttcgcttgaggaccgtcagaatctgaacgctgacgcgattcagggggagttgttctccaatgtcgatactgaggagatcaagcgcggctaccgtggcactgtggcctccaaggtggccggcatcacgtaccgacagctcgattattgggcacgcaagcagattgttgagccgtccatcacgccgtctcatggctccggttcacgccgactgtactcgtttaaggatgtggtgattctcgctgtatccaagaagctgcttgatgccggtgtgaatctgcagaacgtgacggcggccatcggattcttgactcaacgtagcaccgatcagctggccaatgtgaccatcatgtgcgatggtcaaaacgtgcacgaatgcactaccagcgaacagatgctcgaactgttgcaaagcggtaaggcagtgttcgccgtgtcggtgggttcgttgtggcaccagattgagacggccttggaacaggaagaatatattgatcttgaggctaagccgctgacgactgccacgggccgcccgattgatgaactgactgccatgaggatgcgcaagaagctcgaggcacagcgcttgcaacgcgcaaccgcctgatacatgtatggttgttggcgacttgccggctttggtcggcaggtcgctttgttgtatgtgttgcttttgttgcctgccatcttatgtttttatatgttgcggtgattattatgactgattggaggaccgggtgaacgggattgttgtcggattgttgccgggcgttctgtggatggtcgccgtcatctttgctgtgtccatcatcactataacggtcagccgaggccatctgttcacgccgaaacgccggcgaccgccggtcgatccggtcgactggtcgatggtgaaaacgcatttcatgtcgtttgcggcggcgctgattccgtttcccgtgttgacgtttacagcggatttgatggatgctcgcatgctcgcgttctacgaccacgcgcaattgcccggagcaatcatcatattcgtgctggtgctgctggaactcatcgccatgtatctgcaggcacgcaacgcctcagaaaccgaaatggacaagcgtttgggcgttgcttctcaccggaataaggatgatgttgcgaagtagccgattctctgcggcgaggctaatccgcagctagatactactggttcggctaaaatcaccacatactattaaccgataatgtacgctgtgcgacagtgatttgaccggacttcaggaatggctttatttcaacggtttgaagccatgctaatcagcggtttggaccggagcctgccaaaggtagccaaacccgtatatgacaattggctatgggggtgaagcgacccacggcctcagcttgcattgccctttgccgcgggtcggtttcatcatacccggcactcctgcccggcgagtttcgccaagctggcgtcgggcacatcgaaccacgccccgcgtttggcgggcgacaccagctccgcgcccaacccgtgccccggcgtccatctgcggacgagccccgatgcgtcgcggtccaccatgccgtgctccgacctccagaagccctgccattccggcgtctcgcggctcctgtcgaagtcgaagcagccatccctcagaagggccatgagatcgggttcgacgggttcgccggtcacagggtcgttgacgaccagactcaggtcggcagcgttgcgcctcacggcggagattcgccatgacttcggcagaccgccgggctcgaacgtcacgagacggtcgcccggcaccacgcgccaagtgtccgtcagaccgttgcgcgggtcgcggtcgggcaggtcgggcgtcgggcgcacgtcgtcggggccttggtcttcttggagtgcgatgccatgttcagccttcctgtagctgtggatggctgtgcgaggaaaggcggttcggaaggggcttggcgaaggggccggggtggcacagttttcggacctcccggaaaacgcatgaggcgtttttaaaggtggttttctcaattggttaaatcacttcgcacttttgctcatgagttttgggaaccatggcattttgtgccacgagtggaaaatgagtcaaaactcttgtggcagtaaggctcaggcagtatttggaaccttcggggcaagatgggtgaaaagagtgctgtgccaccctctcagccctactcccataagggttttcggcatttttggggagggcgagcaccccggcgaagaggggtggcacggcggttttcgggccgaaatcgccggaacctcgaaaacgttggaacgacgccgttttcgcgctggcacagcgcttgcacagcggtggcacagcggtgtcgggccctgtttttcgacctttctccgcccgccccggagcgtcccgtcccggcggtcgcgggacagccttccgaaggaaggctggtttgatatgacaccccacatgattctgcaaacggcgctcggcatgctctacgccgcgctcttcgtcaccgcgctcgtcaggctctccgcttggctgctgcgcgtcctctccaagggccgcgtcgatctgcggtgcagttggagggccggcatgaccgtcacgctgttcacgatgttgtcgctcatggcgctctccggtctggccgacctgctggcggcgctcgctctgacactctgacgcgcacagcccaccccggcatgcgagggatgccatgtttcgacagaaaggtacctctagatggaacagatggaacatctgaacgtgaagaaactcgtcaccgcagccgtcgcctccgtggcggcgctcggcatgaccgtgccgtcggcatacgccggcgagatggggcaggcgctcaacccgccggtcgagcaggcgcagggtggctccacccgcgccgccgacgggaccgccgacaacaccccgtatctacaggtggacgggaccgaggacaggttcgccttggccgagggcagccgctacaccctcgtccaccagatgtactcgaagccggccgacacctacaccgtccgccacggccttgagcacgacgtcctgaccaaggacgcctcgcgctccaccgggccggagtaccgcgtcgccgcgggggaccgcgtcgaggccatcggcaccgacgtgttcaccggcaaatgcgccgacggcagcggcatgaccttcgagctgaccgttccctataactactccgccgcttcggagaactccgccaaggcgaccctcggcaacggtctgggcgagatcgcgctgagctatgacgacgccaagaaggcttggaccggcacgaccgcgctggccggggagccggaggcgacgccgaccgccaaggccaccgtctccgtgaagccggagggcgtggacaaggccgtcacgaagacctccgacctgaacgtggcctcctccgaggacggctccacccgccgctactcgctgacgggcgacctcggcctgttcggcagggtcgatgcgaccgccgaggccaccatcaggaagggcgcaccggtgtccggcaccgtgaccatcggcggaaccggtttcgcgctgaaggccgacggcaagggcaactacaccgcgagcggtgccgccgccgatggcaccaaacccgagcgcgacgccaccgtgaccctgacctacgctgacggcacggccatgaccctgaaggccagccgccccaacctagccaagccgaccacgaaggacggcgcttgggtatacaagggcgagaccacctacaccgccgacggcaaggaccgcatcgacctcaagaagggcggcgacggcaattggaccggcgtcatcgacctgaagggcaaggccccggcggacaccttacaggcgtaccgcgagtggtccgccgacggcgttgactccccgctcagggagggctacgagctgacgctcggcaccgacggcatcagggacaccgagcccaagctgggcgtccgccaccacgagggcgaggccaagtggaccggcgacggcaccaccgtgaccgccccggtcaagtacgacgagggcaccgaggtgaccctctccgaggccgacggcaagggcgcgtggaccgccaccgcagccaccaaggccggaagcctgaccgactccaacgagccggtcgccaagaccgtcgccctgtccgatggcaccatgctggacatcgactacgagaccaaggtctcctcggtgaccgaccccaagggcaacgtgttcgtcaccctgaagggcgtcgccaagggcgagaccaaggagggcggcaaggtgaaggtctccgtgaccgcctaccgcgccgagaaccgcagggtctccggcatcaaggtcgagcgctccaaggccgacggcaccagcgaggagctggacgtcaccccggccttcagcgaggacgtccacgagtactccgtcacgctgccgcacgacgccaccggcgactcctacacgctgaacgtcgcgcacggcgttgacgccgacgtggaggccccgaccgccaagctgggcgggggcacgagccgcatcctcacgcaggtgatcgagggcgtcgagtggaaggtcacggtgaacttccaagccgccgacatccagccggactccccggccaagctcaagggcatcttcgtgaactacagcggcgaggccaagaagggcaatctaatcaaggactgggacccgaaccggctcgactacacgatcagcgtgggcgagaaggccccgagcccctacatcaccgccgagtgggacgacaagctcgttgacgcgaaggccggcgacatccgccagaccgccgacggcaccgcccagagcttcgtggtgaccgccaagaccggcggcgcgacccgcacctacaccgtgaccgtggtccgcgagcgttcttggaagaccgccgccgaggagttcaagcccgccgagccgattgtgcgggacgcgaccgtggaggccgattcggactccgacaccaagctggtgtccaccggctacgagaaaggacggcaggtacacgccttcgacggacgacccgatcagggtgccggagggcggcgcgttctccgtggagccgaagaagggccagtccgtgtccatctccggcaagcgcctgagcggcatgacctacgagtacacggtcagcgtgctggcccccgacggggtcacgctgggcacctccacgtacagggtgctctacctgacctcgaagactcaggacgcgaccttgcagggcatcaaggtgaacggcaaggacgtggagggcttcgacccgtcgaagcgcgggtacaaggtgtccgtgccggacgtcgccaaggcgatggtgaccccggtgttcgaccgcacgctcggccagaccgttgacaccaagcgcgacggcgacgtggtgaccatctccgtgacctccgccgacggcctgaacaccgtcgagtacaaggtgacgctggtctccggcgcggtcgccatgagcaaggaccttgcccggaccggtgccgacgtggcgctggtcatggccgccgcgggcgcgttggtgaccgccggcgtgggcctgacactcgcggcccgcaggcgtgggaagaagaccgcgaccgaagccgtgaccgagaccgaggtcaagaacgagaccgcgaccgaagccgtgaccgagaccgaggccgaaaacgggaacgagtgaccctctcccgtgaatcgtgagggcccgcaggagtttccgaacccctgcgagcccacggatagggtttctgcttggctgtggaaaccctttgttttgccgttcctggctttatttcaacgttttctggcgtctttcgctgagagaggcgtttcgccagatgactcacgataagtcagtatagtgcgtagttaggttacgctttaggttacgcactctgacggaagggtcagggcggttatgccgaggagaaaagccatgcgcagtgcgttcggttcgatcatcagaaggaggaatcggcgtggagagattgtgcctcttctggcgcggtatgtgaattcgaaggatcctgccaagcgggtcgcaatgtcgtttcccgccgatgcgaagggccaggcccaggtgtggctggaacgcgaggaaaagctggtcgaggcgtataaaagcggggagtgcgactggggttagcccgcaggagcggaaacgggccgaggaggaggcccataggcggccgtccgtcacgtttgccgattactcgcagcggttcttggaggattaccgcacggcgtcgggggagaggccggccagtgcgacgatgcggaagaaaaaggaggccgtccgccatctcgatgaatatttcggcgacatgctgatcagagagatcggcgagagcgatatcaatagatggcttgatggtggctccatcaagggcaagtatctgccgtaccggtcatggaaccgtccccgcgcgtgggggcgggcccgacggttcatgggaacggccgtccacccgtcgttcctgacggaccgccgagacgatatgggggtggcgcgtcgggtggaagacgtccctcgtcgtcgttccgcgttattctgccttccgcagtgaggggaccaagccgatccgtccggagggaggcgcgcatgccggcatcgtcgaaggccatcgtccgtggttggggagccgtcctgggcctggaggacgtccggaaggcctacgacgcgcgccgccgggcgtcgttcaggggaaggctgctgtccgtcgtgtccgtcgcgctcgtcgtgtcggggctggtggtggtgtccgtgccggtcatgctgcagtcgcggtccgccggggaacagtccgtcacgtccggccgtctggagaaaacggtcgcgggatggccgtatccgcgggcggagaacgaattgaaggaggcccgcgcgtacaaccgcgacctcgcctcgcatggacagtacgtcctcggcgaggccaaggacccgttcacgcagacgaagggttccgtctccgacaagagatacctctccatgcttgacgctggcgggggcgtcatggggtcggtcgacatcccgaggatcggggtcgacctgcccatctaccacggcacatccgaatccacgctcgagctcggggcgggccacctgtacggcagcagcctgcccgtcggaggcaagggcacgcacgcggtcatcaccgggcacaggggc

SEQ ID NO: 2259 - DNA, 4374 bp, Unknown
  R119_18m  MAG No. k141_773
ggccagatcctggttggcgtcgatatccaccttgacgaaggcgatgttcgcgttctccggctcgttggaggccgcctcgaaaatcgggccgaacgcgcggcacgggccgcaccaggtggcccagaagtcaacgaacacgatctcgttgtcggtgatggtcttctcgaaatcggcagaggtgatggcggtggttgccatgatgttcctttcttctgtgttttccttggcgtcgccgtacggccctcgtgcgtggccgccgggcgattgccttattcatgcaatacgtcttggcgcttggagccgtgcggttcgtggccgtcggctccctgctggctaccagcttcccagcaccacccaacatttgtgtcgtattttccgccgccggccaaacgtttcccaagatttcgctggaaggtgacgcgcggcgcgctttgacgcgcaataatgggatgcatgccagtcatgaatgatgaagtgcccgacgagggcgattatgatgccggccgtggccgcggcgaattcgacaacatcacgcccgaggacttcattcacggcggcggttcgggccacggcaacccgccgggatggctgggaccggccgacatcaaccgggcccgccaccagctgcccatcgcgtacgtggagatcgtgcccgtgcgcaccgatgagatgggccgcattgcccaggtcggctcgttgctgcgcgtcgccgaagacgggtcgatcgagcgtacgctgatcaccggccgtgtgctgtatcacgaaacgttgcgcgaggccatcgcccgcaatgtggccaaggatttgggcgatatcgccttgccgctgctgccggtcgggctccagccgttcaccgtggctgaattcttccctacgccgggactaagcgaatactacgatccgcgccagcacgccatcgcactgtgctacgtggtacctatcgctggcgactgcaagccgcaggacgagacgctggatgtggaatgggtggatcccaagagcgacgtaatgaacacgttcgtggcgcagatggtcaacggtcatggtcgcatcgtgcggcaggcgttggcctgggccggaatctgacagttgttctgcttcccgctggtggggatggcgcgtggcgacggagggcggtccgcgttgaaaccgctcccagccgactgagccgacagctccgccagtggggtgcgaatgtgaaggagtaacgacaatggcaatcgaattggccaatcatatctatcgcgatggcgaaggcgtgccggtggtgctgatgaacgcctacccggtggaccaccgcatgtgggacgtgtgcgcgaaggcgctcgccgacttcgccgacctgaacgatgtgccggacttcccgatttgggcgccggatatggcaggctccggcgcatccccggttcccagcgaggtcgattccggcccgcgtatggccaacggcgcgtacagcgaggcgctggatcgcctggccggagcctacgtggacctgatcaaggccgccggctatgagcaggcgatctgggtcgggctgtcgatgggcggctacgtggcgatggacatccagcgcctgtaccccgaaacggtggccggactggccttgtgcgacacgatggccgcgtccgacggtgtgggcggagagaaccgactgaagatggcggacgccgccgaacagacgaactcggtcgaaccggtcatgcacttcgcgcaaccggccgatggcgattccaccgtcaagaagactcctgaattcatcgcgaccatgaccggctggatcaacgaacagaacccggctggtctggcttggcgtcagcgcatgacctatggccggcccgaactgggggcggtgccggaaacgatcagcgcaccgagcctggtggtgtccggcgaactggacccctccagcaatccgagtgtgatgcgtccgctcgccgaacgaatcaccggcgctgaattcatcgacattccggactgcggccatttcagcgccgtcgaacatccggataccgtggcgcgggcgctgctctcgctcgtcaggcgcgtgcagaacgcgcagaaggacgcataggagacctcgatgggcactgacattcatttttcgcccctggcgctgacccatgcgctgccgttcctgccgctcgcgcaaggtgacatcgactatcaggtggaccggcgcggtgaacccggtctgatcgacgagctgttggccgagccgaccaccaaagtcgtgcttacgcgcggcggacttgtcgccgtaccgcgcggccaaggcgagctcgtggactatgagaacgtgaaaatgcggctcgccacgttgccgggcgcctatgtgtccgccgaactggcacgctaccccgaaacggtcgccatgttcctcggctcctatgtcggggcgcgcggcgaatccgtggtcgccgtggatatcacgcgcgtgccggaagccggtgttcccggtgttggcgggattgctggtgtttccggtgctgccggcggcgtgctcggcacccaggattccggcaccgtggacggcgcactgggcaagaacggcatcagcggaggtgctgccgccggaatacggcagccgggaaacgccaagggcaatggcggcgtagccgcagccaaaatctccgggccgctcggtgtaccggattcggcagggcaaggtgcggacgatgccttcgatgattcggtcggcgcgcccgtacagcccttggccccgaagcccacgctgctgcaacaggctgtgacccggttcgactgggtggacctgcgcggattcgcccctcacgccaacgcgcgcgaggctgggcaagccaccagtgccatcaccttaagcatctggcacagccgccagcggttctgccccacctgtggcgcggcggtccggccggcgctcgccggatgggcgcagcgatgcaccaacgaggcggacggcaaccgtgtgctgttcccacgcgtggagccggcggtcatcaccgccatcgtggacgggcacgatcgtctgctgctgcaacacaacgcggcatggaaggattcgaggctgtattcggtgtccgccggatttgtggaggcgggggagaaccttgaacacgcctgccgccgcgaggccatggaagagaccggcatcaagctcggcgaggtacggtacctgggctcgcagccgtggccgttcccggcttcgctgatgatggcgttcaaggcacatgcgatcaccaccgacgtgcatgtggacggcgaggagaccatgaccgcgcgatgggtcacacgcgacgaatacacggccgagctcatcgccggccgtatggcggcgccgggccgcgccaccatcgcccgctacatgattgaggaatggctcggtcgcgagctgtgacggaccgcgaagataggttaagcttatgactatgagtgatgacaacgaaaacgaacagccgctgaacctcgacattcccgaccatctcgaatactccgaggagcatgcttgggtggaccgttcggtcgaccccgcaatcatcggcataaccgaatacgccgccgaccagcttggcgaacttgtgttcgtggatttgcctgagcctggcgcccgtgtggaggccggcgacgagatcgtggagcttgaatcctccaaggccgtccagccgttgatcagccccgtggcgggtacggtcaagtatgtgaaccgtgacgtggcggacgacccgtccgtggtcaacggcgatccgtacggcgaaggctggctgctgaaggtcgagcttgacgacgatgagccggagctgctgagcgccgacgaatacgcgaaggtcgtgcggtagttccacccatagctcccctccctgaggggagccagtatgtggcatcaaacctatatgcatcgtgcctcttatggaggggttgaaggcgttcgccatcaacatgggcgtcaagagccccgaggtggtcacggagaccggttcgggcatgaacgacaagcggcgcaagctcaaccggctattgtccgacccgaccgtgggcacgctgatcgtggagcgcagggacaggctcgcccgcatgaacgcgggactggtggagagcgcgttgaaggcgcagggacgccgaatcatcgtggtggacgacacggagccggacgacgacttggtgcgcgacatgaccgaggtgctgacctcgttctgcgcacgactgtacgggcgtcgtgccgccaagcataagacggacgcggcgttgagggcggcgcgtgatgcttgaggcggtcagggtggcgctcgacccgacgccacggcaggaacgactcttggagtcccatgccggtgcggcgcggttcgcgtacaacgcgggactcgcgcacgtcaaggacatgcttggacggcaggagaagcc

SEQ ID NO: 2260 - DNA, 37163 bp, Unknown
  R119_18m  MAG No. k141_1097
aacatgtacggcggcggtggcggcggcacaggcggcgcgggcggcggtggcggcgcgggcggcgcaagcggcagcgccgcgggtcagtcggaaaacgtcaccctcgatgtgcgggcttccggcattgtggcgggcgactacaacaagggctatgccacctccgacggtctggtcatggatttgcaggcgttgaaggaactggccgccaaagtcgatccagccgccgccaaaaaagccaccgcctatgatcaagtgctggtcaaggccgccgacctcaagtccgtgcccgaagtcgaatcacagatcaaagcgttgggctacgagacctcctcctatgaagacatgcgtaagtcgttggaagaacagtcgcgcgcgattcagctgattctgggcggtatcggtgcggtttcgctgttggttgcggccatcggcatcgccaacacaatggttatgtccgtaaccgagcgcacgcgcgagatcggcattatgaaggcgcttggctgctacgttcgtgacattcgcgtcatgtttcttgcggaggccggcgcgatcggattcttcggcggattgatcggctgcgtgctgagcggactgatatcgctgggcatcaacgttgtcggcgcgttgtatgcgggcggcatgagcggcggcatgtctggcggtatggtcagcggtgccggcgggggctccggcgacggtaccggtggcggaacatctatctggaccatactctggcaggcgatagttggtggcgagaatgtgacccgttattcggtgattccgtggtggctgttcctgttcgccgtgctgttttccacgctgatcggcttgctattcggcttcggcccggccaataaagccgttaaaatcccggccctagacgccatcaaaaacaacgagtgatcgcctctgtcacctgctccaccgttagtccataacgttcgttcagttcgcccagcgacacgcggtcggtaaattccttggctgcgccgaagttcagcacacgaggattacggctgccgtccgagacatgatgattcgcatagtatgcggtcactttctcgccccagccgccttcaagctgcccgtcttcaagggtgatgacctgctggtggccatcacgcaacgactccagtacgtctgaatccagcgacgtgcactggcgcgggtcgataaccgttgccgtgatgccataatcgtcagacaatgcggcggccgtctgctccgccaacggatacgcattgcccagtccgatgatcgcgacttgcgagcccgtctgattgacccgccaatccagcatgtgacgcgcaccggcatgctgagccgttacgctaacggtcccgcggactgttgcggcagatatgcccccgctggcggagctggcggaggctggcagcgaagctgactgggggcggtcagcaatctgcccacccgtcaccggcagcagcgtcgcatcccgttccgccgccagaatcgcctcgcccggcacccgaatcaccgccggaccagcaggggcgtccgccgaaccggccggcgcggtagcccatgccaaatcagccagatagtcgcgagccgaagtcggcaccagcatcgtaacccctggaatattggagaacatcgtcacgtcatatgcgccggaatgcgtattgtccgaaccggacaagccgcccagaaaatcaagtaccgtgactcgcgaacggttcaggctcatctcctggaagaactggtcgtacgcgcgctggaagaaggacgccgtggtggccaccacgggggtgccgcccgcccgtgcgatgccggcggcgtacgccacggcatgcgattcggtgatgcccgtgtccacgtaatgcgaacccgcgcgttcgcggaattcgtgggtgatgccgttggagcccggcgtggcgggggagatgaccacgagtcctggctcggtggcgaaacgcggttcgagcgcggccatcgccattttgccgtaatgcttgcgcggatcgtccggcttgccgattgcggcatccggattctgccaatgcgaggcctcgcactggccttcatgcggttcgtgatcggacaggttgcagtgatccgaatgccacggctcgctgtggttcacgttatcggtggggtgcacgccggtgtcggagactgccggatccagctcatggacgttaccggccgaggccgagggtgcgccggccacgtaatcggcgccgtcgtatcccgcgcccttcagcgtgtggatatggaccaccaccggatggtcgatattgcgcacttcctcgaaagccgcgaccagagcggaaacatcgttgccggccgccacataccgataatccaagccaaacgcgttgaacagattcggcttggcggtgccgccggacgcgcgcaggcgggcgagcgggccgtacatgccgccgaaatcgccggcgatcgacatctcgttgtcgttgaacacgatgatgagattgccgccctgctcagccgcgttgttcagtccttcaaacgccacgcccgaactgagcgaaccgtcgccgatcacggcgatcacattgccgatgccgctgttcgggccttccatatcgcgggttttcgccaaaccgcaagccagtgaaatcgaggtaccggtgtggccgagcacgaactggtcgtgttcgctttcatccggattggtgaagccagtcacctcgctgaaacggtccgggtccagataggcgtcggcgcggcccgtgagcatcttatgcacgtagctttggtgggacacgtcgaacacgatacggtcgcacggcgagtcgaatacgcgatgcagggccaccgtggcctccaccatgcccagattggagccgatatgaccgccgtgccgatggccgtacgccaacagcgtggcgcgaatctcgcggcacagttcggcgagctcgtcgggggcaagggccttgacatcggccgggctggcaatgcggctcagcagatgggagtcgtcgccatgggaaggggtaatgctcggggggatgtcgtgaaggcgcgcggccccctcggcggcaccggagacggcgaaggaatcgcttgaatcaaatccgtttcctgacgcgttgcgcataccctcgaatctcccttcgctagtctttccgaagttgaatgctaacgcccggcattgtccgaggtccacatgacgaatcaatgcccccaacatctccgtaaatgggtgattcgttcgctgcgcgatgtgggacaatgaatgcggtaattccttttgataccaaggagcgcgcaatgaaggccgtatacgcatccaccgtcaaccatgacgatccgcttgccgcgttggcggtgggcgagcagcccgaaccccaggcccgcccgttctggtcgaccgtttcggtgcgcgcggtgaccgtaaaccatcacgacgtctggtcgctacagggtgtgggtctcgccgccgaacagacgccgatgatccttggcaccgatgccgtgggcattctggacgaggacatccccggcaagcatgggctcaaggccggcagcgaagtggtgctgtacacgttcgtcggcaccgatggggcgggcgtggccccgggcgagcgccggacgatcctctccgagaaataccccggcacgatggccgagaagactgccgtgccgtccgccaacgtgttcgccaagcccgcaaacctcaccacggccgaggcggccgcactcggcaccagctggctgaccgcctactcgctgctgttcgatgccgccggcatcaagccgggcgactccgtgctcatccagggcgcgggcggcggcgtgtccactgcggccatccagctcgcccatgccgccggtctggaagtgttcgtcacctcgcgtgacgcggacaagcgcgccaaagcgctgaaacttggcgcgaacgtcgcgctggagatcggtgcccgcctgccgcgcaaggtcgatgcggtgatcgaatccgtgggtgcggctacctggggtcattcggtgcggtcggtgcgtcccggcggcaccatcgccatctgcggcgccaccaccggcgaccagcccggtgccgaactgacccggttgttcttccaggacattcgcgtgcagggctgcacgatgggttcgcgcgaggatttcgcacgattgctgcgcttcgtggagcacgccgacctgcatccggtgatcgattccgtggtcagcgggttggatgccgcccccgaggcgttcgccagaatgatcgccggcgacatgttcggcaagatcgttattgagctgtaagcctcacagaattatgtattgagaacgattcgctgcgtggcttaactccgctatcaggagtacagtgggccttattctcaataactagggagtaaatgataatggcaaatgaatccaagcccgaagtcgcagtggtcatgggatcggccagcgactgggagaccatgaagcgcgcctgcgatattctcgaccagttcggcgtcgcctaccacaagcaggtcatctccgcgcaccgcacgcccgagctcatggccgagttcgcgcacaacgcccgcgccaatggcctgaaggtcattatcgccggtgccggcggtgccgcccacctgccgggcatgatcgccgcgcagaccacactgcccgtaatcggcgtgcccgtgcgctcccacgccctgtccggctgggattcgctgctgtccatcgtgcagatgcccggcggcattccggtggccaccaccgccgtcggcaactccggtgccaccaacgccggcctgctcgccgtgcagatgctctccgccttcgagcccgaactggccgacaagcttgaggattaccgtaacgaactgaaagaaaaggtggctgaatccaatgcccagcttgtctgaggaaacaggcggtcgtgtttcgatgctgatgccgggatcgaccatcggcatcatcggcggcggccagctcggccgcatgatggctttgtccgcccgctacatgggcttccgcgtcggcgtgcttgacccgacgccgaactgcccgaccggtcaggtggccgacttccagatcaccgccgaatacgatgacaaaaccgccatccatgatctggccgtgcagtccgacgtgctcacctacgagttcgagaacgtggacgccgatgccatcgacgaggtgcgcggcatcaccgccaccccgcagggcactgacttgctgcgcgtgacccagcaccgcgtgcatgagaagcggttcatcaacgaccacggcaccgccaccgcaccgtggcgcgccgtcaacaacttcgatgagcttgacgccgcattggatgatattcattatccggccgtgctgaagaccgtgtccggcggctacgacggccacggtcagctcgtgctgcgttccgacgccgacttggagaagatccgttcccgttccgaccgtggtggcggcttcccgccgagcatcctggaaggcttcgtcgacttcgcattcgaggcttcgatcctggtctccggcaacggcaaggacttcgtcaccttccccatcgtgcgtaacgagcaccgcaacaacatcctgcacatgaccatcgcccccgccgaagtgtccgaacatgtggctcgcgaagcgcatgaactggcgattcgcttggccaagggcttcgaactggctggcacgctggccatcgaactgttcatcaccaaggacgatcaggtcatcgtcaacgagctcgccccgcgcccgcacaactccggccactacaccatcgaggcctgctcgatggaccagttcgacgcccacatccgcggcatcgccggctggcccatgcccaagcccaagctgctctcgccggccgtgatggtcaacgtactcggccagcatgtggagccgacgcgcgcgctgatcgccacccacccggagtggaatgtgcacgactacggcaaggccgaagtgcgccacgaccgcaagatgggccacatcaccgtgctcaccgacaaccctgatgccacggttgctgaccttgaggccaccggctgctgggacgacctgaaaaagaaggcgtgaccttatcgatggttgaacatatcgaacgccagaccaagcagaaggacgcgattcgcgccgccttggccgactgtgaggagttcatctccgctcaggacctgcaccgcaggctggaggacgaaggctcgaaaatcggcttggccaccgtgtaccgccagctcaacgccttggccgatgccggtgccgccgacacgatccgcctggacggccagcagctgttccgcctatgcggcgacgacggacatcaccaccacttggtgtgcaagcggtgcggcaaaaccgtggaaatcgatccgcccagcgaggcttggctgcgcaaagtggccgacggccacggcttcaccgtcgaatcccacaccctggaggtcttcggactatgccctgattgccaaaaggagcagaaagcgcagaagtctcagaaagcagtgagcgaataacaaatgggatcggcttcaaagccgatcccatttgttattccgctgctattccaccgacttcagggcgccgagcatgtcgaccgtcttcaaccgccggtagaccagcacgccgagtccgccgagcaccttgatggtcggcagttcgcggatacgttcggagacgttgagattcgtcagattgtagaggatcaccacggccagcagctcagccgcgagaatcagcacttccatgatctgatccggcaagtcgacgattgtggccacctgtttcttcgaagtcgtgttctgcacaatgcccttcgcgccgtccaactttatgagcttggcgctacgcgactccacattggaggtctcatggttcttgagcctcaccatataggcgttcgactggtactgttcgccgaacacgtgcttatagccacccgaagtcatgaacatgaaatgcccgatatgcatttcggtgatgccgtccacgcgcaccttgcgctcggtaccgctcgaatcggtgacggtaatcgtgtgcctaccttggcgtccatcatccccgccatacgttcggagatgatcgcaccacggtcggtgagcacctgcggcttgtgcccggtgcgcgaacgcagggtgatgtagtcgccgaaattgtaggcgtcatcagtggcgatcagggtaatcgactgtttgtcgttctccttgccggccactttcgacatctcctcgtagtagatcggcgcggactcggagacggccccgcccctcatcgccttggccacttcggcgcgctgcgaataatgttttcgtcagctttggtcaggccataatcgctgatgacggttatgtcagcgagattgttctgattaaagaagtcggtgccggttatttgcatgtccgggccggtgacgaacaggcctacgagcgcaaaggagccaagcgtcatcaggctcacgatggaggcgaatcgacccttggatttggccatggtgacgcgggtgtctttccatagcatgcgcttatggaatgacccgttgcgtcggcggttgcgcttggccttgtgcgcgtggggcgttctgccgggcgcggtataggagtcgtttgctgaatttgcggcggaatcggctgcggagtcggtcgcgggcgtaaggttggtcgtttcggtgaaatcattgagatcggtcatactgcttaccactccagatccttgatatccatcgggtgctcgttcacttcgatcgatttgacgcgcgcgtcatgcatgtggatcacgcggtcggcaatcggcgcgatggcggaattgtgcgtcacaatgaccacggtcgcacccttcttacggctctgatcctgcagaatctgcagcacctgcttgccggtgttgtagtccagagcgccagtcggctcgtcgcacagcagaatcttcgggttcgtggccaccgctcgggcgatggccgcgcgccgctgtccgccgcccgaaagctgcgcggggaagttgttgatacggtcctgaagccccacgtcgataagcgcttgggtcggttcctgcgcgtctttcatgatttcggaggcgagctccacgttctccttggccgtgaggttggccaccagattgtaggactggaacacgaagccgaggcgttgcgctttgtcaagcgtgagtatgcgttcttcgacgcactgtcccgttcgggcaacgatatgcagatgtatgaccgggtcaaggatgtgttgaagcagatgctgcttgggcaggcggcccgtgtgggtgccgagctgagctacggcggcattccgcgcgcctatgcgctggaaattctggtctccgccgtctcatcgattatctggctatgggtccggcgcggctgcaaggaggcgcccgagcaaatctgcgccatcatcgagaaaaacaaaaccaccgcgcccgtagacatcatacggtaagcgcggtggttcgtgtcggaatctggctcccctccctgagaggagtcaatccgcaggagaaatcggaaacctaaaactcagacagccagctcggccttgagttccttgaggtcggccaggatctcatcgtggcacttctcgttggtgtcgaaggcaaggtggcagaaggcgcactcgtggccttcgcggttctcgtggcaagcgtgcaggcaagccttgcccccgcactcttcggtgtggttgtgctcgcagccggtgtcgtcgcagcagtcgccggtgaagcagcagccgcagcggccacaggcggccacgccgtgctcgtgcttggtggcgtcgaacttggccagcgtgtccttgcagacggcgaaggtgccctcttcggtaacgatctcgtaagcatgctcatcgatggtcttgatagtcattgttgttcctttcagcgtttgttcgtctgcgactgtagggcggcagacggcagcggcgaaagtgggtgaaagtgattatcaggcccattgctgctattaagagcaatgagacctcatgcagttttgtgtcggtaacgggccgattgttggccgagtgccgacgcctggtataggtggtggcggtaccaatccgaatattggtggaacgacgacgatgagcgtgtctggcgtcggtgctgcgccaagcgttggcaatctaacgatgcgagtggagcttatatcgtcgctattgcgccaaggattggaagggcactgatgctgaaggccagtagcgtcgggactgcgccattatttgttcgagcgccgacggccagtatcgtctggcgtcgtcagtggtccatcctttggtgaggtgccgacgctgagaggcggttcgatggcatgcttcgccgcacacttggggcacaggtcgaaaatctccagttcgtgggcgatggtctggtacttcaactgcttggtggctttgtcgatccactgctcaagtccgggaatctcgatttcgatggtccgcccgcattcgtggcatacgatgtgatggtggtgatgctggtccgagcactcgcggtagagggcctcgccgttgacgtggattacgtcgagctcgccttgggaggccatcatctgcacattgcggtaggcggtggccgtgccgatgcgcgtgccgcgctcgcgcaggatgtcggtgatttcctgggccgtggcgaatcgggatagttccgccaggacctgggtgatgaggagtcggggtcgcgtcacgcgccgagtggtcgcggtttgctcgatgctcatgacgttttgcccctttctgttaacaaatgatattcattatcgttattaaagcaaatcagatgcccggcatgttgtcacatgatttgaatcaactggcagaaatcccgcgtttcaacgaggcctgcgcgggatttctgccagttttgagcagagcccccgcgtacctttcgttgtaacgcgggatttctgccgatatggggcgagtcatggcgcagcgcagtgctttccatttcgggagacgcgtcatttactgccagtagaagtagccggtcggggcggctgcggctttgctggccgaccggacctgcagtatcaggccttggcgctcgtggccggcggagccgtaggcgccctgcttgatgacggcgtcgacggtgacccagtcgtgattgtgcggggtgccggccttgccggagctggctatgaacccgaatggggtcatgtcgagaatgcagcaggacatgaactggcgggacagctcgaactcgtccgcgccgaacgtacgcgacttgctcacaaacccggtgacctgcacatggtaaccgacgtaacgctgcggattatggtcgatctgctcgaaccatgagccgaattcgtcgtcgctgatggtcagggtcttgttcgtcgtgtcgagtccgtgcagctgcgaggcgccatcaggcttgtgcgagctgcggggaatggcgatagcgcggccgccggcgtactcgtcgaagccgccgctgccgctgctgggctggaacggcacgacgatcagcagcgccggaataatcaaggcgatcaggaaccgtaaaaccgaacgctccgtggtgtggaacagtccgagccatgctgcggtcgccagcacgaacagcagtgccgcaccgatgatgagatacggcagcgagcgcggcgtggtcagcgtggtgtatgatccgcccaccgccgcataggcgatggccgcgcccagcgccgcgaaacacagcgcctccacgcggtcggggagtgtgactttgcgcttcatggctacgctcccatcaccagatgggcggcaatcgcggcgaggaagcaggccgccgccacggtcgcgatgaaccggatgatgaaccgtggccggcattccgtggccagcatcagcgtgttcttgaggtcgagcatcgggccgaagaccaggaaggcaagcatggcggagaccggcagcgcgccaatcatgctggcggcgatcaccgcatcggacgtagagcacagcgaacacaggaacgccagtcccatcgccgccagaatcagtacgatggcaccagcgtcatcgagcgtgcttgaaccgttggtcaacgacgacaatgcggtgcgcatgatggaggcgatgatcgtgccgaacagcagaatcggcatcatccgcataaagtcgtcatgcgtatgccgaatgaaatgcgtgaaccgctccaatccgcgccccgtgcccccgccggcgggggctgtcggcaaagccgactgggagtggctctcaggcgaatcacccgtcgcccctgcacaatcctcgcaaatcaacgaccgcccaatcgtcagcggcctctcacgcaccgcaggggagcggagcggccacaccgcgaacgacacccccgcgactatcgccactaccatgcccaaccccatgcgggccgccaccatccatggtttgtcggtgaatgcgaaccatgtggaccatatcgccatcgggttcatcaccggcaccgcgcacagaaacgtcaccgcacacggcagcggcaggcgtttgcgcatcagattcgcgaacgtgggcaccaccatgcaatcgcacaccggtaggcacaggccggccgccaatgccgcggccagtccgccggccaacgatttcggtatgtggcgggccagagaatcggtgctgacgaacgtgctgaccacggccgacatcatcgcgcccagcagcatgaacggaatcgcctgcaggataagccccgcggcaccggtgccgatacgcaccagcggaaccggaaacccacgcgactcgagcatcgcggaagccgcaatcaggaacgccaccagcggcgtgccgataatcagaaacagatagttcgccgaatggtcctgttgcgcggtgttcacctgttccgtgcgctgcgtgcgaggttctttcatgcgaatatcacctgccatatcgccgtcatattagcaccgtacgcatgatagtggtcgagataatatgcgagttccccgcataccgatggtacacatcgatatgcggggaactttgcacatggttgcctgggccgatggcgaatcggtgggccagcatctcggtggccacttcctccttgctcatggatgccgggtaatacgtgggccagttgtccatttccttgagggtttcttcctgtcgttgaagtgacgttgcacggtggcggcggtggcagaaccggccccggccttgtccgcgtagacggcgttgatggcttcggcggccttcagcacggcttccgggctgaaccacaggtgcgggttcgtagcaccatggtggtgatggcggccttcttcgccctcggcgtggtcgtgggaatgctcgtgctcgtcggtggcggtgacgcccatgaggccgctcacgttcacgatggtctggcgtttcttgtcaagctgcgccttttccgcccagccgtcgtagccggcgccgttgagcaccacgatgtctgccttggcgagcttggccagatcggatgcggtggcctcataaaacggcggttcgccccggcaggtgacggcatacggaaggaaatgggagaaagaacgtacgccgccggcctgtggagcggaccgtcgagttgttgttacgagacttgatggattgcggaatccacgatgttggttatggcttcatatacccctttcgtacggctgcggccagattctgcggaacctgaaccacttcgccttcaggcgttctgaccgtggccagctgaggcaccttggccttccagttggctcggcgcgaatgcgtgtttgctcgggacgccttgtacttgggcagtgccatcagccttgcctcgccttccagtgggggttcttcttgttgattacatacagatggccgcgccggcggacgacataggagccatccttgcgggccaatgagcggaccgatgccttgaccttcatgtccgttcctttcttcttgtcttacggtctttgcggaatgtgcggcgaatcacttgcgcccgtaacgagcgttgaacttctgcacctgaccggcggcgtcgatcaccacattcttgccggtgtagaacgggtggctgtagctggacacctccacattgacgagcgggtaggtgttgccgtcctcccagtcgatggtcggcaggtttacggccttggccaccagtgtggacttggtgaggaagtacttgtcggcggagcggtcatagaagaccacggggcagtattcggggtggatgccctcttgcatggttatggacctttggttgtgtggtgttgtgtggtgatatggatgagaatggcgtcggacgcgcgggtggaatccggtgaattgagatggcctgagacggcctgacggccggttgtgccggcccgatcaccagctggatttcaccacgccgggcagtttgcccttgtgtgccttctcacgcagattgatacgtgacaggccgaacttgcggttgtaggcgcgcgggcggccgtcgatggaatcgcggttgcgcagacgggtggggctggcgtcgcgggggagggcctgcagcttgcgcatcgcctcggcgcgttcttcggcggtcagatgagggttgacgctgtcgcgcttgtgttcggcgcggcgttcggcatacttggcgaccatgcgttcgcgctgcaattgtcggttgatcttactggttttggccatgtccggctccttgataaggctccggggcgcgggaatcgcgccggccggagctgggacgagtgcattcgttcattgggcgcatgccgcaaggttcggaagatgagttcatgaaatggtgatagaggaaaccgccggaatgccaacaaggaaacgatttcggcgggtgcttaagcctcttcctcgcctcgcgactggtgtccaatgaacgaacagatggattagcgggtctctcggaagagcacccgtttgcggactaccggatcgaacttggtgagctcaagacggtccggcgtattacgacgattcttggtggtggtgtaggtgaatccggtgccggccgtggacttcagggtgatgaccgggcggattgcggaggatttgcttgccatgagtggtgctttctatgtgtgggtgtcacgctgttatgtcacgtatgtcgcgtacgtcgcggtgccatgtgggtgatgcagctcgttagcgcggtttgttgtgcggttacgcgccggcacagtggcgggcctactgactgcccgagcatgggggtgatgccgtggccggttcagttgacgttctgatcgcggcggatgcgggcgatcgccgcctcgatgccgatgcggtcgatggtcttgatgcccttggcgctcacggtaagcgtgacgtgccgctgcaaggacggcacccagtaccgcttggactgcaggttcggggcgaaggttcggcgtgttttcctgtgcgagtgggagacgcggttgccgaccccggcgcgtgttcccagaatttgacatgttttggacatgcctgcaactatatcataatgataaccattatcaaataagaaaggctgtcatgattcatccggcattgcaatcacagggaaacgcggaggggcgcacgcccgtggtgctgctcaccggcgccgaccgcctgagcctggactccgtggcgttctcgttggtcgattccttcccgtccgtatgctcgattgcttatgacgtgcgcccgaacgaagccgtggaatccggtctcgatatcgtgcgcaacgtcgcgaagccccaggcaagcggggtggtgttcggcgagtccgattcgttcgggctcgaggggtgctgcatgagctgcacggtcaaacatgaccttgaacggacgctcggatcgctgcaagggcgggccggcgcgtttctggtctcgctgcctgtgggccttgaggccacgccggtcgcgcagtatctggccgattccttccgtctcaacgagtggggtgagtcgatgttcgtgggtgcggtggccaatgccgtaggccttgacgaattcgaagagcgattctttgacgacgaccgtttgtgcctgtacggcatgggcgaggagaacggcgtctatgacgagcgttcgaccggcgtagtggtctcccgcctgatccgtgaggcctcgtgcgtgctcgaattgccggtcattggtgccggttgcctggcacgccatttggatacagacggggagtgcgcctgccgcgacatcatccgtgcaatcgccttgcgtgatgcgctggtctgtgaggatgcccacaccgtggggctcgtcgacctggtgcaggcgtcggtctgtgccgcgatgccgttgtgacatgtgcggcaaacggcagaacccccgcgtccgaacgaaggtggcgcgggatttctgtcgtttccgaggccttaaatggcagaacccccgcgcgggtatcgttcggacgcggggatactgccgtttcgtctgccgaaaacggcgggatcccgcgttgtcatcgtcggggcgcgggatttccgccggcagcgcgggtgtgcgcgtgcaacacgccgacgtaaatgcaaatgataataattctcaatacatgttattctgtcgtgttgggggccgggcgatgatgcagcacagcagcatcgcccggccaaacagccgaattagagaggaaaatccaatcatgtccatcatgtccaacgccaagcgcgcgctcgccatcgcggccgccgcggcgaccctgttctcgatggccgcctgcggttccagcaatgccgccggcaacaagtccgattccagcagcgccgcgtcttccggcaagatcgaggtcgtcgcctccatcaaccagtggggttccgtggccgaagacctcggcggcagcaacgtcgaagtcaccaacatcatgaccaagaccaacgttgaggcgcacgattacgagcccaccagccaggatgttgccaagttcggcactgccaaggtggccgtggtcaacggcgccgattacgacccgtgggccaccaaggccgcccagtcgaccaaggccacgctggtcaccgccgccgaaaccgccggcatcaaggaaggcgacaacccgcacgtctggttctccgccaaggtgcgttccaacgctgccgacgccatcaccgccgcctaccagaaggccgacccgagtcacaaggacgactacgccaagctcaacaaagaatggcacgccaaggaagaccagcttgagtccaagatcaaggagacttccgccaagaccgagaacctgccgtacgccgccaccgaatccgtggcctggcacttggccgacgacctcaagatgaccgacgccaccccgaagggctacgcccaggcttccgccaacgagagcgagccgaccccggccgacatcaaggacttccaggacaccctgaagggcggctccatcaagatgctcgtcttcaacagccaggaagccaactccaccaccgaccagatcaccggtgccgccaaggacgtcaacgtgccgatcgtggagctcaccgagcagatgccgaagcagtacaccaacctgctcgactggatgagcgcactggtcgaccagttcgccgccgccgtgaagtaatgcggcggtagccggcaatccgcaacagcaataaggggaataatcaagtcagatagcgaggcgttgcctaggggagaacagaacgcttcgctatcagggaaggctccttatatatcagggtgcttcggggatgtcccgaggcaccctttgcgttagggtgaatagttaggaaacggtaagaaaaatagtggaactatggattttccaaggttcagcggcaacaatatgcccttgaaaagtcccatacggaaacaggcgaatgagcgagaacactagtagtatcaccacagtgaaaccccatttcaagctttgggtcaaaaaggccgaagccaatgaagtcacgccccagcacccccacaagcccttccccggctgggcgtacggcgtgctcttcgttatcttcgacattattgttgtgacggcgctcgaagtgggcgtttcgtccagctccacccgtgtgcaactgtccagtccgaccgtcggattcggcttcgtgagcaagatgtggaccgacggcaatttcgtattcgtactcaacgtgatacttgtcgcgttgctgtacctcatgttgctgatgctgttcaacagattctggacggcaagcatcgtgattcttgcggtcggaatcatcgtggccgccatcgaacatttcaaggtcgagatccgttacgaggccattctgcccgccgacctcggcttccttggctcgaacaccggcaatatgctcaccttcattccggccggcgcgcacgtgaccatcctcgtggcacttggcgcgttcgccgcgctgctcgccctgattctggtgctgcgccacttcgacgggcgcaaaggtcgcatgatccgtacggacaacctgagcctgaacctcacctcccgtctgattctgctgctgctgccgattctggtgttcgcgttgtactgcattcatgtgagcaccaccgattcgctggccaacaagttctcccgcgcctttggggacacgccatccatgtgggattccgtgtatgacgcgcagcgcaacggtccgctcgtggcctttacccgtcagctcaacccgaagatcatggacaagccgagcaactactccgaggagaccatgaagaaggtcgccgctcgctaccagaaggaagcggagacaatcaacgcctcccgcaccaacaacctcactgattcgacagtggtgtacgtgctgtccgaatccttctccgacccgagccgcgtgccgggactgaagaccaataaggattcgatgcccaacatccgcaagatcaaggcgggcaccacctccggactgatgctctcctccggctacggcggcggtacggccaacctcgaatacatgggactttccggtctgagcatggccaatttcgattcctccctgtccagcccgtaccagcagctggtcccgagccagcattggacccccaccatcaaccagatgtggggtgcgcccgccaactcgctcggctaccatccgtacgagtccagcatgtactcgcgcgctacgaactacaagaagttcgggttctcgcacttctacacgctgaccggtccggacgtgatcaagtatcaggacaagattgacgagtcgccgtacgtctctgataagtcttcctatgattctgcgctggaaggcatcaggtccggcaagacgaacaagttcattcagatcatcaccatgcagaaccacatgccctaccacgagtggtatgagaacaacgactacaccgctgaatccaccacgggtacgccgctgggtgatgatgaacagcagtcgattgagacctatcaaaagggtgtggagattaccgatcaggccactcaggagttcctgaacgaactggatgcgctggataagcccgtcaccgtagtgttctacggcgatcacttgccgggcatctactcgtccgccagcgaggatggcaacaactccttggccctgcacctgaccgattacttcatctggtcgaataaggcttccagctcccaaggcaataaggcaagcgatgcagcctactcttcgccgaacttcttcgtggcacaggccgccgatcacatgaacgccaaggtcagcccgtatctggcgttcctgaccgaaatgcattccaagattgccgctatggaaccgcctgtggtcaacaaggtccaaggctgggatcgtattcccgaaggccagaacatctatctcgaccaaaacggcaacccgatgtccaccgatgacttcgacaaggaaaccaagcagttgcttgccgactacaagctcatccaatacgacatcaccgccggcaaaaactacctcaaagacacagattttatgatgttgccgtaaagcagacagcccggccgaaccgtaaagcggatagctcagtgggctatccgtaggtgaggggagcggctgtgccgcgacggagaatccggaggattttcggtctgtaggcaacgtgcgagccgacaggcgagccagcaaaacgcgggcgaagcccgtccaaaattgctgtaccgttgccatagtgctgtgagctccctctgatgagggagctgtcgaacgaagtgagactgagggagagatcccacagaccaatcactcccgccttacaataaagccatgaagcgcatcgatgtgaatcatggctggcggttccgttcaattggcaaggaccgcgatacggcagcgcggcagccagtcacgctcccgcacgatgcgatgattcacgagtcgcgcgaccctcgcgggccgcacctcgcgattcatcgaacgaggacatgacggcgtggccagctggtcatgggcgggctatgagggccgcgacgccatcgtgcatgtcaccgatgaccgccgcattgtggttgatgcaggcgggcatatcgccgtcggaccttctgccgaagctgtggatgtggaggtacaagtggactctgtggccgcacaacacgacctgcctgccaatgccgaactgctcggcgtggccagcgccaatcccatcaccgtcgatgaactcgccgacaatacctgcaccacctacttcggccgagcccaagctatttggcgaataccagccgaaacgtctggtattgcctgcagcacaaacgccctcatgccatcgtcatgacggtacgataggtacagtcgatgcccggaaaaccgacccgggcatcctgcgggaaggatgtgccatggtcaatgcggatttcgctcagttgcgtcacgcctacgaatccgggtgtacgcggccattggcttggcgacgggcgcaattggatgcgctatgccgtctggtagcggacaatcgtgatgctttcgtggctgcggccatggccgatttgggcaaacccgcggcggaaaccatactgatggagctgaatctggtggccggcgaggcgcagttcgtccgcaaccggctcggactgtgggccgcgcgccatcccaaggcgatgcattggatgctgcaacccgccgccggctggacgatcgccgagcccaagggcgtggtactcatcatctcgccatggaattacccggtgctgttggctctggagccaatggccgacgcgctcgccgcaggcaacgccatctgcctgaagccctccgagctttcgcccaacacctcgcgcctcatcgccgaactcgtgccgcaatatcttgaccccgagtccgtgtgcgtggtcggaggcgggcccaaggaaaccggcgaactgctgaaatgtccgttcaaccatatcttctacaccggcggcgggcacgtcggcaaaatcgtcatgcgtgcggcggccgagcacctgacaccggtcacgttggaactcggcggcaaatcaccgtgcttcgtggaccgtacggtggatatcaatgtggccgcacgacgtatcgcatggggcaagttcaccaatgccggacagacctgcgtggcacccgactatgtgctcgccacgccggatgtggccgaggctctggccgagcgcatcgccgtagccatcaccgaattctatggcgaagatccgaaggcctcgcctgattttggtcgtattatcaacgatcgtcattttgaacgactgtgcaagctattgccggtcggcaccgtgccgtctgaggagccgagctcgccgctggtacaggtggcatcggcggtaggcgcggccatggatatggtcgggcggcgcttcaatgtcgtggctgccggacgcggaagcgcgggggagacagccggtggtggcaccggtagcgcgaacaatgcggcgaagccggcggccggttcgaatacggcagccgctgatagtgatgcgactgcctcggccgctgttgagccgagcgagattcacaaggtgcccggcgtattcgatccggccgggcgaatcgtttgcggaggcaaggtcgatcgcgccgcccgatatatcgcgcctaccgtgctatacggcacgtcaccggatgcgccggtaatgaaggaggagatcttcggcccgattctgccgatcctggtggttgaggatgccgagtccgcaatccgattcatcaacaagcggtcccggccgttggctgcatatgtgttctcgcgcgatcacgaggttcggctgactttcgaacgtcagaccagctccggagctttgggatattcgttgccgttgggtcacctgctgtccagccggctgccgttcggtggcgtgggcgcgtccggcatcgacgcctaccacggcaaagcaggcttcctcaccttcagccacgtcaaaaccgtggttaccaagccgcagttccccgacactctgcgcctcgtgtacccgcccttcaatgaagctaaggccaaactgttcaacatcatcgccaaattcagctagcgtgatatcgctcgctgatattgggtgatggcgttgtcatagtgacgttcgctgtcccggcagccacgtcaatcgattgattcgtgtaccgggccagatttttctgtcctggtatttgatttcgagtcattttctgcttaccgggacaaaactgacgccgaaagtatcgtccgcgtattacgaaaatggcggaatagtgcggttttgcatggaatggaattccaaatattcctatattcgaggtgttcaactgtcctggtttgcgaaaaagagccgaaatcagctaccgggacagaaaaatctggcccggtagccacgtcaatcgattgacatggccaccgggccaaaaatatgcggcagatgcgccgcttctgttacttcagggctttgaagccgatgtcgtggcggtagaacagtccgcgcagctcgagcttgtcgatgatcgcgtagaccttgtcctgagcggacttgatgtccggggcggaggtttcgacgagcaggacacggccggagttggcaatcagaccacccttgtcgtcggaggcgacgccggcatagtagacatgcgaatcctcgtcgacctcgatctcgggcacacgggcacccttgatgacgttctccgggtagccgttggaggcgatgaccacgccgagggtggcgttggactcatcccagatgaattcgggggtttcgccgtcgagaatggcggagatgccggcaccgaggtcggaggtgagcttcgggagcacgacttcggtttccgggtcgccgaaacgagcgttgaattcgatgaccttcggtccgtcggcggtggcgatcaggccggcgtacaggatgccggtgaacggcgtgccttcctcggccatgccttcgacggtggggcgcacgattttctcgatggcctcgtcgaccacggactgcggaatctgcggcaccgggctgtaggcacccatgccaccggtgttcgggccttcgtcgccatcgtgggcgcgcttgtgatcctgggagatcggcatcggccagaaatcagtgccgttgacgaagctcatcagggagaattcctggccgtcaaggaagtcctcgataacgaccttggcaccggcggagccgaagcgatgatcgatgaagatgtcttcaagcgcacgctgggcggtgtgctcgtccatggccacggtcacgcccttgccggcggccagaccatcggccttgatgacgatcggcgcgccatgctcgtgtacgtaagcctgagccatgtccaagtctccgaacgtcttatatttggcggtcggaatgttgtgacggtccatgagctgcttggcgaagtccttggaaccctcgatctgggcggcggccttggacgggccgaacgccttgatgccggcggcggcgaaatcgtccacgatgccttcgatcagcgggacttccgggcccacgaacacccagtcatagccattgttcttcacgaattcgataagtgcggcgtggttcgactggctcagctgcgtggtgtggatgccgtccttgagcatgcccgggttgccgggagccacggtgacttcgtcaatgctcggtgccttgagcagcgtgtaggcaatggtatgctcacgcgcaccggagccgatgaccaatactttctgacccatgtttttccttcctaaagtctttggctcccctctttgaggggagccggtatctggagctacttcagtacgatttgcgtgtcggtggtgtcggtggtgatctggccgagcacgtaggcgggttcgttgttgtcggcgagcagcttcagcgcctcgtccttgcgggcggggtcgatggccagcaccatgccgatacccatgttgaagatgttgtacatctccttgtgatcgatgttgccagccttctccagcacgtcgaaaatcgggagcaccggccaggtaccgagctcgatctcggcggccaggccgtccgggatcatgcgcgggatgttctcgatgaagccgccgccagtgatgtgggccacgcccttgaccacgcccgccttgaacagcggggagagggccttgacgtagatcttggtgggggtgagcagcacgtcgccgagctttgcgccgcccagctcggcgagctcagtgtccacggtatagccagcctgctcgaacagggccttgcgcaccagggagaagccgttggagtgcacgccggtggaaggcagaccgataagcacgtcgccctcagtgatggtggaaccgtccacaatggcggacttttcggcaacgccgaccgagaaaccggccagatcgtactcgtcctcgtcgtacatgcccggcatttcagcggtctcaccgccgaccagtgcggaaccggcctgcacgcagccgtcggccacaccggccacgacctgctcaagcagggccgggtcgttcttgccgcaagcgatgtagtcaaggaagaacagcggctcggcaccctgggcggcgatgtcgttgacgcacatggccacgcagtcgatgccgatggtgtcgtgcttgttggccagcttggcgaccatgagcttggtgcccacgccgtcggtgccagagatgagaaccggctctttgtatccaagggaagccaggtcaaacaggccgccgaagccgccgatgccgccgaccacaccggggcggttcgtgcgggctacgtgcgacttgatgcgcttgacgacttcgtacccggcttcgacgctcacgccggcgttctcatatgcttttggcatttggtggggcctttctgttctattttcaagctcccttgccggggagccacctgcaaaaagcggattttcgtttgtactaagctccccttgtcaggggagctgtcagcgaagctgactgaggggtagtcgtaaagaccaatgactgaggtgtagtcgaaggaccggccgagcctactgcacgtccggctgcacggtgttgtactcgttgccgatgtacttgctcttgtacagcgcgaattcaggcagacgcacacggtcctcgggcgtgagggacttcaggaagtcggcctcgtagtcgtcgagcgcggtggggtagtcgccgttgaagtaggcgacgcacaggccaccgtatggggcgtcggcgttcagtccgatggattcgaccagaccgtcgagcgaaaggtaggccaaggaatccgcgccgatgtattcgcggatttcctccacgctcatcttggctgcgatgagttccttggtggtggagatatcaatgccatagaagcaagggtacttcagcggcggggagctgatgcgcatatgcacttcagcggcgccggcttccttgagcagctgcacgatgcgcttggacgtggtgccgcgcacgatggaatcatcgataacgataacgcgcttgcctttaaccacgctgcgcacagcagagagcttcatacgcacaccctgctcgcgcagttcctgcgtgggctgaatgaaggtgcgagccacatactggtttttgattaggcccatttcgttgggcaggcctgctgcttccgcatagccggatgcggcggacaatgaggagttcggcacgccgataaccatatcggcctccaccggggattcggcggcgagacgtgcgcccatgcgcttgcgggcggagtgcacgttgacgccatagatatcggaatccgggcgtgcgaagtagatgtattccatcgagcagatggccagctgcgtgttgttggtgtactgcacgatcttgtagccgtgatcgttgaccaccacgatttcgcccgggcgaatattgcgcaccagctcggcgccgacgacatccagtgcgcaggtttcggaggcgagcacgtaggcgccgttcttcatcttgccgagggagagcgggcggaagccgttcgggtcgagtgcgccgatcatggcgtcttcggtcatcagcaggtaggcgaaaccgccatgcaccgtgttgagcgcttccttgagcttgtccataaaggtgcgctgcatcgaacggcgaatcaagtgcatcagcacttcggtgtcggagttcgaatggaagatggcgccttcgtcttcaagcttgcggcgcagtgacgggcagttcgtcaggttgccgttatggcacagagccacgtcgccgtcatggaagcggaagatgaacggctggatgttgtccgtggtgcccgagccggccgttgcgtaacgcacgtggccgatggcgcaattgcccttcagtcgttcgatttcgcgctcatcgccgaacacctgggtgagcaggccgagtccgcgatgaccgatgagatgaccgttatcgttggaaacgatgccggcaccttcctgaccgcgatgctgcagcgcgtgcaggccaaaataggtgagtcgtgaggcgtcggggtggccccatacgccgaagatgccacattcctcatgaatgtcttcgagttcagccgacaagccaaagctcctttttcaaacaggggattaactatctgccaaccctaccaatcggcggctacatcgcgtgttgtggggtggtggaacttgttggggttcgcggacgcggtttaagcaccagatcagttgagtatgaatagtggcttaggattttggcctttcgtcgtatgaatccggtgcttgtttttcggcttcgtctcagtgcctgaaatggctgaagaactcgatggtctcgggatcctgcgactcgtccatcacctcggcgggtgtgccgttctcggcgatgacgccgtgacggagcagtacgatgcggtcggccgcttcgtgggcgaagctcatttcgtgcgtggccatgaggattgtggtgccttgggcctttaactcggcaaccatgttgagcacttcgccgaccagcatcggatcaagagcagatgtgatctcgtcaagcagcagcagttccgggtcggtcatcagtgcgcgcgcaatcgccacgcgctgctgctggccgccagagagctgatcagggtaggcgctggctttatcgcgcatgccgatgcgttcaagcagttccatagcgcgggtttcggcgcgatccttgctccagtggtgaaccttgattgcggcaagggtcacgttcttgagcaccgacatgtgggggaagaggttgaactgctggaacaccacgccgatacgtgcgcgaatcttgtcctgatcggcacgcgggtcggtgatatcggtattgcccagccaaatccggccgtcatcgacctgttcaagcaggttgacgcatttcatcaatgtggatttgcccgaaccggaaggccccagcaaagccaccacctcatgttggtgaatgtcaaaggaaatgccacgcagcacctgcgtgtttccaaaggatttgcgcacgtcatcaagacgcagcaccgtcttgttgctcacgggggagtcactcgcctcggtggtgatattggtcatttcgctcataccgttcctccgctgagttcgcgcttacgcagacgttccgtgtaccagtcgttcagcaggatgaacggcacgctcatcaggatgaacagcaggctggcgaccacatacggcgtgaagttgtaggtgctggccacgtcgatctgtgcggcgcgcacggcatccaccgcacccagcacggaaatcaggccgacgtccttttgcatggagatgaagtcattcatcagtgcgggcgcgactttgcgcaatgcctgaggaatgacgatcagtcgggtcgtctggccggaggtcaggcccaacgagcgggccgaggctcgctgagaaggatgtacgtcgttaaaaccggcacgcagcacctcggagacgtaggcgctgtatcccattaccactgcaatggtgccgagtaccgagggatcgatacggccgaacaagcctaggccgggaatgccgaaaccgattagatacagcacgacgataataggcacgccgcgcatcacagtcgtgtagatcaatgccaggatacgcagcgggaacagaataggggagcggctggtgcgcaccaatgcgatcagcgtgcttagaatcgccacgccgaccactgcgacgagcagaacgcggatgttgagccataggccgtcaagcacatggggaaacgatttgacgaagtattcgccggagaagaaggtctccttgactcgtggccagccgggggagagcttcaggccgatgacgatgaccacaacgaacacaatggtgctgatcagactggtaatcgtcgattgaatttgctgatgaacacgatattggcgtcgtttgagctcgacctgacttacctcgtgtccgtcaggggcattgtgctgcctggtttcggttggtgctgcggtcatgtgatgaatgtcgctcgcttcctgaatgccggaatggccgggtgtcacaggaaaatttccgcagcgcccggccaaggtgttgtgaccttatgatgtgagcctactccacttacttcttcagttcggtcaggtcggtggtgtactcggccagccacttgtcctgaagcttcttgatggtgccgtcggcgttcaggtcatccactgccttggtcacggctgcagtcagcttggaatccttcggcagcacgatgcccatgccgctcttgtcttcggagtcaggcagacggccgagcaccttggcgtccttgacctgctcggactgcaccatgtacacgcattccacggtgctggtgaccagtgcgtcgatctgaccggcgtcaagtgcctgagccagtgcggcatcatcattgaacgtctggatgtcgtccttgatgttcgccttggcgtagtcgtaggcaagggtgccgaccatgacgcccacggtcgcattcttcagatcggataccttggtggcgttggcgaacttgctgtctttcttgaccacgacggactggctgtcgttgtagtagctggacgagaagtcaacggccttcttgcgctcgtcggtgatgccgaactgctggatgttgagatcccagtccttggcgccgggagcgatggcggtgtcgaatgcggtgcgggtccacaccacgtcgctcttcttgaaaccgagcttgtcggccactgcgtaggcgacggccgcctcgtagccctcaccgctttccggcttgtcgttcataacccacggctcgtaggccggctgtccggtggcgatggtcagcttgcccggcttgtacgtctgctgggtgatgtcgttcgaatcggcggaattggatgcggtggactggccggaaccgcaggctgcggtgaacgacagagccaggatgctggcggtggacgcaatggtacggacgatgtgttgcttactgaacatgggcttcctctcctcaagtgttcgtcatgcacacggttcaaagtcgtgcttgatgcatgcgcgccaattgtatggctattgggttactacaaaacagcgatattctcggatgctggttatctccattgcttatggccggctagagccgcgcaatctggcgcgtaagcgaacgaatatctcatattggcgcagagcgaaatggcgttcactgttcgagtgtgaagccgtcgaatacgaatcccggactgaccacacaggagaccagcgcatcgccctggccaggcactgtgcgctgccagacgccagccggtacgaccgcatgtcccgatacggtcacgtcggcctgatcggtggtgatgccggaacccagggtgattacggttcgcttggattcgtcggattccggagtctcgccgctgccgccgagttccagcttgaccgatgccgggccatgccacagccagacctcatccgcatcgaccttatgccaggcgctggcatctccctcgggcagcaggaagtaaatcagtgacgatagcggtcggcttgaggcctcatccgtgtgcggggattgccagtcacgcgtgtaccagccgccttcggggtgggcttccagtccaaggcgttccactatggaccgggcgtatggactcatgtcttgcaaagcgacgctcataatgagatctcctgttcttgacgggtttgctggtttttggcttcttgatatcaggtcgggtcaggtcagcggtgtcaccaggcgttgttgtaggcttcgcgcccggatatcaccgtggctcggttcgtgcctgcgccgtgcttcaccagtgtttccagcgtttcttcgatgccggccggagatgatgtgtcgacggggatgtcgaagaacgcgaaatcagccaatgcgcccgcgttgatctgtccaatgcggttgcggcccacgtgcatacccatggaggcggcaccgcccagcgtcatcatacgaatcaggcgatgtgtcagatcgtcgctggcatagccttgttcgcgggccaggtcgtaaagcatcgacacgtcatcaagcagatcgagggtcggcgtgctggagagcgaatcggtgcccacgcttaccagattgccttcctcgaggtattcgcgcaccggtgcatctttgccggtgttggtaatgcgattcgatcgggggcacaatgccacgcccacgccgcgctgacgtagaatacgccgatcctcgccattggcccacacgccgtgtgcaatgtgcacatccgggccaagcgagccaagctgatcgacgaactggatggcggaggcacctttgcccacgtccttgagctgccggtagctttcccaatcgtggtcacgccagtcggacgccgaataagtggtgagcaccggcggataagtgccggcctcgagcggggtctccgccagatggatatgcagtcgcatgttcagctgacgagcaatgtctggaagatcaacgaacggttcggactccagcgtatacggagcatgcgggctgatgccgaggttcggcagctgctcctcgttcatccggcgcaactgccggatgagctcggtgcgacccttttccatccattcgtcgttgtgccagcccattacctcccaataagcgatgccgtgcatgccctgcgaagccagcgcgccggcggcgtccaaatcggtgacgatgtctgcggcggccgtcgttcccgattcgaccatctggcgagcaccgtcctcggcccactgcttccatggctgggtcttctgcgcctcggcgtacacctcgttgaatgccagttcccaggcgcggaaccgatcgtaggtgccttgcccgacctgcaccatgccgctgtactgcagatgagtgtgcgcgttgaccaatccgggggtgagcaccccatcccaatgccgttcgcggatggtgccgtgagacgtcatttcctgcttcagcgcctccagcacccagcggcgtttacctacatgaaccacgcggtcgccatgtatggcaactgcgccatcgatgatgacggggcccgtcacggggatgatgagtttggcggaatacagtgtcacatcatcgataagctcggtatcgacggtcggccaggtgttgtcggtcatattctcctcgctgcgttgtgttcggtgccgtgtctatggctatcggtcggcgttctctcggtcgttttccgcgaatctggtcagtcgccaatcgtagccgttgtcctccacggcatggctggctcggtatccgcgcgccttgagcgcgctggcggcgatgcgctggtcggtcgctgcgtcaagtctgataagcgtgtgatccagtgtgcctcgatgttccagaagatatgcgacggcgctggcctgtacggcgaagctcagatccatgatctcgattggattgccgcctcccaccgtgtagttcacgccatcgccgtcggcgattagcgtgagcgttggtccgtcgggaacaatgagttgcgcggtgtccctgttgacctgtgggatgaagtcgcttacctcgtccaaggcgatttcgttggcgatgccgccgatcactgtgagcgccgcgccctcgtgcattgcgcgcatgtgctcaagtgtgaccgtatgtctcacgccagtggcggacaccaccatatccgcgcaagggagtgcctcgtcaatgtcttgtgcggcgaagccgtcgaacaccgctttgagtgaagccactggatcgatatcgcagatggtgacttcggctccaagcgcgcgaatacgccgtgcgaagccttggccgaccgggccgtagccgatgacggtgacgttcttgccgtcgaatgcatgctcgccgagaatgcgctgcatggtggtcacgcatgtctccccagtgccgtgggcgttgtcgaatccggttttcagcacactgtcgttaacggctacgaccgggtaggtgagcgctcccgcttcctgcatctgctggaacgcgcgtacgccactggtcgtttcctcggccactccaatgagattcgccgtgagctcggggcgttcgagcgaggcgaggcgggcgaagctggcaccatcgtcgatgatgatgttcggctgtatcttgtccagcaggcgcagggctgcctcgtgcgcctgttccgcggtccaggctcggctggattcgaccgtgattccttctcggcgcagctgttccgccactcggggatccgtggaatccgggccgcaatatacgccgacgattgcgccggtggccttaagcttgcgcagcagaatcgcggtttttggctccagtatcaggcagacggcaatacgaatgcctgaaaaatcgatgcgggtggtgaggtcatccatggtgtcgcgtaataccggcatgtgctgttccgcgtactccattgcctccagcccacttgccgtgcgcatgtcggcaatggaatcaatgctttgtgtaccgtcacataggaattcctcgctgtgcccgtcggtcatcgtggcatcttcgacggtcatgccccattgctgggcctgagacttgatttcggcatgcttctgcggctccggaatcgcgaggcgggctcctgccagtgatcgattcgttttctgggatcgggctgccgcccacgccgcaaaatcgctgtctgccgtaatgcttttcttcatattcccatggtacgcatgcatgtcgctgctctgccgctgcgcgtgtggtgtgggtgaagagcatgcttgggcgcgttgcgtgcgtcgatttcggcagcttcgaacaggcatgttgtatcgaacaaatgttcgaccgtattgatatgctggtcgggccggcggtggtaaggaggtgatggcgatgggcagcggaacggtatcgacgcaacgcgagcatacctatattgccattgatctcaagtccttctttgcctcggtggagtgcgcggcgcgcggactcgacccgttgaccacgcatctggtggtggccgatgaaacccgcaccgataagacaatatgtttggcggtctcaccctcgctgaagaactatggcattcccggtcgtgcgcggctattcgaggtaaaacagcgcctgaatggagtcaacatcgagcgcgcggtccatgctcccggcggccgattaatcggggagtcctgcgatgcgcgcgacctggaacgctcgccgagactcaaagcctcgatggtcatcgccaagccgcgcatggcgcactatctggaaatcagcgggcggatctacggcatctatctcaggtatgccgctcccgaacacattcatgtgtattcgattgacgaggtgttcatcgacgtcacgccatatctgcgctcgctgggtatggggccgcatgccatggcgcgaaccatcgtgcgcgaaattctcgatgaaaccggcatcaccgccactgccggcattggctccaacatgtatctggccaaagtcgccatggatatcgtcgccaagcacatgcccgccgacaaggacggcgtgcgcgtggccgaactgaatgaaatgtcatatcgtcggctgctctggagccatcgtccgctcaccgatttttggcgggttgggcgcggctatgccaggaaactcgagcacgccggtctgatgaccatgggcgatatcgcccgatgctcggtgggtcgtgcttcggattactacaacgaagacctgctatatcgcatgttcggtgtcaatgccgaactgctcatcgaccatgcgtggggctgggagccgtgcgaaatcgcggacatccgatcctatgagccggatgcgcacagcatcagcagcggtcaggtgctcaccggtcccgccgattggcatacggctcggctgatcgccaaggagatggccgatgcgctcgccctcgatctggtcgataagggggtgatgacgaatcggctgacactggcggtcggctatgacattggcagtctcgatgcttcgaagcttgattcatgcgcagaccgggcgatgaggcgtgccgccgaacgcgcggcaaagacctatcaagggccggtgaccgttgaccgtttcggtcgtcgggtgcctaagtcggccgtggggtcgattggattgggcgattttacgtcgtctgccgcacgtattcgcgaggcgatgaccatgctgtacgagcgtattgtggatgcgcggttgctggtgcgtcgactcacagttgttgccgatgatgtggccacgcccaaagaactggcggcgggcaaacgctatgagcagcttgatttgttcggtgatgatggcgatatgcgatatgactgtgatagcacggaatccggtggcgacggaagcgggcgtatgccggcttgtggggacgatgccgccgcacagacgttggctcgagagcatgatatccagcgtgcgctgctggatgtgaaacgtaaattcggccgcaacgccgtcatcaaagccatggatatggaagacggtgccaccggtcaggctcgcaaccgtcagatcggaggccatcgcgcatgaccctgcaagaaacccatgcatacgacgacatcatcaacctgccacaccaccaatcacgcaagcatccgcatatgtctcgtcaccagcgggccgcccagttcatgccgttcgcggccttgaccggatacaaccaggtcattgagcaaacagcaaaaaacgccgaaaccgccatcgcccaggccgaggcccaaggcgataccgatttcggcgcttaacaatcgctcccgttggaggaagtctcagattcgtcagcccacgtgacgcgagaaccggccggcagcggctggcccttgcgatacttgccggtcagcagaccctgcgcgagtggggagaacgtggtgataccaatgccgagcttgcggcaggtgcccatgatctcatgctcgatatagcgatcctgcaggttgtactgcggctgaaccacggtgattgggtacaggttgtagcggtcgataatgcgctggacttcctcgaggcgggccgaaccccactcttcggaaacgccgtaatacagcaccttgccctgggcgaccaggtcgctcatcgcgcgcaaggtctcggtaaggtcggtggtctcgtcaaaacggtggcaaaagtacatgtccagataatcggtctgcatgttcttcagcgtctggtcgatgctttcgaaaatgtgcttgcgggacaggccgcggtcgttcacgccttcgccggtggggaagtagaccttgctggagatgacgagttccttacgcgggtactgcttgagcacttcgccgaggaatcgttcggcggcgccgcccgagtaagcgtccgcgcagtcgaagaagttgacgccggaatcgtaggcgagcttcacggtctccttggtcacgttctcggccgctgtgcccttgagatccgtgacccagctgtccagcgcgacctcgctgatcttcagtcccgacttgccgacgctgcgatacttcatgtgtactccttgatgattaatcgtcaccgccgtctcttcatggccggccgtgaacgctaacaattcgattaaaacagttcaaccccacttgaacgcaagttggtggctaccgcgacacgccggttgtagtcccgtgaccaatttgccgcaatcagtaactgctaatatatgagtaattattggctttttaggcataaattgctaatatattagtatgttttctttgttggatgagcctatgcctggggatgtttcggccgctattgccgaacgcatggttgccagacgcaaagagcataagttgtcgcaaacggctctggctagaaaatccggtgtgagtcttggctcaatcagacggttcgagcagcagcacgaaatctcattgacggcgctcatcaatatcgcgtttgcgctgagttgcgagcaggattttgagacactgttttcacagccgtactatgcaactatcgatgatgtcattgctgcgcgggagagggaagcgcgatgagcgagacagtgccgttggatttatcggttgatcgggtacgggtgtttttggatggtgaaattgttggctcgctgacactgtcgccggcaaaaacagtggcgttctcgtacgaaagctcgtggttgtccagtggattcagcataagtccgctgagtctgccattgcgtgagggggtctttgtcgccaaaagagatccattgcatggtttgtttggggcgttcgatgacagtatgccggacgggtgggggcgtttgctcacggatcgtcttctgcgtcagagaggaatggacccttactctatcggaaccttgacgaggctgtccattgtgggatcaagcggtatgggagccttggaatatgaaccagcggcggacattgaaaatggtgttgcagctactgacttggacgatatagcgagagagtgcgcgaatcttctggaaactgatttttctgaggatttggatcagctttttgcccttggtggctcgtccggtggcgcgcggccgaaaattctgactgaggttgatggagaagaatggattatcaaattcccctcatccgtagactcggcgaatatcggagaacaggagtatcaaatttctgtacttgcgcgcgagtgcggcattgatatgccggaaactcgtctgttcgcatcagcgcaatgttctggatattttggtgtccggcggtttgaccgtacgcgggatgacgatggcaccgaacataaggtgcatatgatttccgccggcggattgctggaaacgtcgcatcgtattcccaatttggattacggactattgatgcggctgactatgcgtgtgtgcaacagcgcagaggagtgcgagcggttgtaccgtctcatgtgctttaacgtgttcatcggaaaccgcgacgatcatgcgaagaatttctcttatctctatgatcgttctcgccaagcgtggagattgtcgcctggatatgatttaacggaaaaccctggaatcaacggcgagcacactacttcggtgaacggaaaggggaagaacatcactgttgcggatttgactggtgtcggtgtgaaggctggtatttcgcgggcgcgctgtattgctattgccaatgagatgcaagataggattcgtgatgctgggtttgccgtccgagattgatggtctcgccatacttagtttttccaatacgcattctctagtacgtttgccttttgaaaagcttcgcgataggcggtgataaggtccggcaaacgcattgaggcgttggctgggctggtggagggcagttgggtcatgccgatggcgataccggcttcggtcaggcgcggctcgataagtttgcggtaaagttgcgctgatttcgcgccggttgtgaagatgtgggcgattggagctccgcgcaagattggtgtcaagtcgttgggcgcggcattgcggatgctggcatcgctggctccggtgatatcgcaagaagcaatgacatcccataacgcaatgtggtggcgcagagcaaacgcacgacgggactcaggtgaatcgccgacggcgtcggcaggatcagcggagttgacaaacagcgcctgcatcaccggccaaaaccggttctgcggatgcatatagtaaaacgccgccgctcgggatttcggactcggcatcgatcccaaaatcaaagcccgggactcaccatcccacaccggcccaaacccatgctccacatgttcgctcat

SEQ ID NO: 2261 - DNA, 18532 bp, Unknown
  R119_18m  MAG No. k141_2355
cgttcctcctgttcgagttgtatgggcggggaactcgaggtcggccagaatgtgtgtccggaatggccggtcaggccttgcggcacaacggttgagtgactttcgagttggcgtggcagattgggtggatgaacacaccttgttgcgccgtgtgcggcgagccgatgaagcggaacggaaggacgagctcgggacggatcaggtggcggtgccggaacgccggctgcgggagctcacgcacccagtcgcgcgacaacagcgcccgtgatctgcggtgcggtctggattggctgttctcgaagcagtcgcaggccgagcaccggctgccggcacgcacgctgcgccgccggtgcgagctcatgtggggcctgtggccgcccgtgcccctggtggacgaggtgcatcatgtggtgcatgtggacggcatccacctgcaccgcgacgcggtggtcctgatcgcggtggccggcgggcacgtgatcggctggcacgtcgccaaaagcgagaaagcggcggcatggcagtgcctgatggcgcgcatcgcgccgcccgacgtgctcgtgtgcgacggcgggggcggcgtcctcaaggccgcgaaggccacgtggccggatacgaggatccagcggtgcctgttccacgtgcaggccaacatcctcgagctgaccggcaggcggcccagactcgaggcgggcggacggctgcgccgggtggccctgtccctgccccgcgtcggggacgcgggcggcgcggccgaatggctggtctcctacaaccagtgggagcaggacttcgcctcgttcctcgacgagaagagcgaatacgccgacggcggcgtgaacgacatgcaccaaaggctcgtcaaggcacggcgcatgatccgcagacgcatccgcgagggccacctgttcacgttcctcgacgaggggctcgcgtccgtcggcccggtgccgtccacgaacaacctcgtcgaatcatggaacgcgcgcctgcgcgacatgctgcgccgccaccgcggactgcggctggtcagacggctgaaggcgatctgctggtggtgccaccagcacacggaacgtcccgaggccgacgcgtggctcgcggccaacgcgatgaccgacgaacgactcgagcgcctctaccggcaggcatgggaaaggagcccgcaaggccagtacgagacgttcggcatccccgcaagatacggcaccggcatcgactggaacgagttccacacacgggtcgaatggcagtcgaacgactagaccgccggacacacattttggcctataacccatgttgtctgaaaacggaaaagccccggaaagcaaccactcagaagtggcggaattccggggctaatcggtcgggccggcgggatttgaacccgcgaccccttgacccccagtcaagtgcgctaccaaactgcgctacggcccgatggtgcaaaagcaccgagtagataatctaccagatatatgaaatctggcaaattacgcgcgtgtcacttccgcttcttcttctcgcggatgttcacggagatctgaatcggcgtgccttcgaagccgaattcctcgcgcagggagcgttcgatgtagcggcggtagccgtgctcgaggaagccggtggcgaagatcacgaaacgcggcgggcgcgtggacgcctgcgtggcgaagaggattcgcggctgcttgccaccacgcaacgggtgcgggtgggcggcctggatcttgccgaggaaggcgttgagcttgcctgtaggaatacgctgatcccaggattccaaggccttatccatggctcgcgtcagacggttggtgtgccagccggtcttggcggacaggttcacacgctcggcccacatcacacggtcgaattcggtgttccacaggcgttcgagacgctgcttgtcgaactcgtccatcgcatcccacttgttgaatacgagcacgattgcacggcccgcatccacggcggtggacatgaccttcaaatcctgatcggataccggctgcgaggcatcaaacagaatcagcgccaattcacagcgctcgatggcggcctgcgtgcgcagagaggaataatattccgcgcctgtgagcttgtgctggcgtcgcttgatgccggcggtgtcgatgaacagccagtcctcgccatcgatgttgacgatttcgtcgacggggtcgcgcgtggtgccggccaaatcgttgacgacggcacgttcttcgcgcgccagctgattgagcagagacgacttgcccacgttcgggcggcccaccagagccacgcggcgcaggccggaaggcgtgaggtagccggaagtcttctcggcctgcttgagcttgtcgagcgcgacgtccagcaggtcgcccactcccttgccgtgcatggcggaaatcgagtatggttcgccgaggccgagtttccagaattcggcggcaaggtattcgctggcctggtcgtcgatcttgttgacggccagcacgacaggcttgccggcggcacgcagcatcttgacgatgcgctcatcggtggtggtcatgcccacttgcccatcgaccacgaataccacggcatcggccaaggtcacggcaatctgtgcctgtgaggcgatggcggattcaatgccttccacgtcggcttcccagcctcctgtgtccaccagcttgaagtcggtgccggcccattccgcgtcatagctcacacggtctcgtgtaacgcccggcgtgtcttccacaacggcggcacggcggccgaggatacggttgaccagggatgatttgcccacgttcggacggcctacaacagccagcacgcccaccggcttgggaccggccttgcgcgcgccttccgtgaaaccacggccggaaatcagatcctcatcgccttcgtccagctcatagccttcgagattggcggcatactgctcgtattcttggttctcgatggcgtcctcgaccacaccgatgagcagatcgagcgtgtgggcgaagtccagatcggaattgtcgatggtggtaacgccatcggcggcggtcaggaagctggtgaccttggaatcggccttgtcgcgcgcggccacatcctcagcgcccacgcccttgacagcctggccggtgcgacgggcctgacggacctcctcacgggcggtcagcagcacgcgcacctcggcgtccggggacaccacggtggtgatatcgcggccctcggccacgatgcccaaccccccggagaaggagtcggccgacgcctcgcgggcgatgtaggcgcgctgggcggcgatgagcacgttgcgcaccgggatgacgttcgacaccttggagacatggctggagacttcggaggaacgaatggcctcggagatgtcctcgtcgtcggcgaatacgcaggggttgtccgggtccacggagatatcgaaatggtcgccggtgaagaactcgcccaccgcttcggtgatgacacgctcatccacggtttcggcgtccagatcgatgccctgcttcaggcaccaccaagcgcaggcacgatacatcgcgcccgtgtcaaggtaggcgtatccgaaatacttggccagcgccttggacgtggacgacttgcccacgccggcggggccgtcgatggcaacgcgaatcacaggccaacctccttggacagcgaacggacttccgtctgggacagcacgcggtaggaaccgggcttcaaatcaccgagtttgatcgggccgatctgggtgcgcaccaagcgcttgaccgggaagccgattgagccgaagatacggcgcacgatgcggttcttgccggagtgcagcacgaccttgaccatcgtgtggtcgcgtgaggagtcgatgatcgcgcagtggtcgagcttgatccagccgtcgtcgagctgtacgccggtggtcacgagtcgacggcatacggtgccggagatcttgccttccagtgtggcgacgtaggtcttttcgacctcgtacttggggtgcatgacgtgctgcgagagttcgccgtcgttcgtcatgaggataagaccctcggaatcgtagtcgagacggcccatgtggaagatgcgctcgtacttgtcgcccacgatgtcgcgcaacgtgtagcggcccttcgggtcgtccatggcggagagcaccttgcggggcttgttcagtgccagagtgacgtggttcggattgacgcgtacgcgcgaaccgtctacgcgcacctgctgcttatgggggtcgacgcgagttccgagctcggtgaccagttcaccgtcgacctcgacacggccttcggtaatcatgtcctcgcacttgcggcgggaaccgaatcccgcttgggcaagcagcttctggagtcgaatggaattggaatcgtcttgcgctttcgcagcgcgggaatatgcgtttggcatcgttctcccaacgtggccggacagactctgtcatcgcagagactgtcgatttgtatacatacttcagagttggcggactggaatcccagccaattccaacctatatatcataccgcaacgtaggactgctgctagactggcaaccgtttgtgcgggttcgcccgtcttccaacagatgaaaaggaatgaacaatcatggaagaaaccaagcaacagccgctggccctgcgcgtgtgcgccgaattggccggcagcttcctgctgtgctttgccatttacgccttctccacatggggttcggcagtgtatggcatcaatatcgtgttcttcgcgttggctaccggcttggcatatgccgcagtcaccgccatcttctcccgcgtgtccggtggccagctgaatccggccatcaccgtagcctccgtgctggtttccaagacgaaaatcctggatggcatcctctatgtgatcgctcaggtcatcggtgccatcgccgccggcttcgccgtggtcaagctgctgcccacatccgagcaggtagctgccaaagtgtggctgactccggccgttaacggtttcgagaacggctccgtgtcttactcgctgctgacccagtatggcattacgttctcgattacgctggcgattgtcgtcgaggtcgttgcctctctgattgtcgttgccaccgccatgtcttctctgggtgatcacggcgagtcctcggaccgtcatgtcattgccatgggtcttgcctatggtctggccgccgccatcagctacccggttaccggtgccggtctcaatcccgcccgttccaccggtatcgcactggccgcgatgaatgagggtcttacgcaaaatccgctgcaacagctgtgggtgttctggattagcccggtcttggccgccgctgtggtggcgttggtcatgatcatcgcgcagatgatgaccactcccaaagtgccggctgccgccgatcttccacagacggatgccgatgcgaacgcggacacgctcgacgatggcgaattcttcgatcaggccgcctcgtctgatggcgattcagcggaaaaagatgttgccgaagagtccaaagaagctgaagtaggtaatcagcaggccgattcccaaggcgatgccgatgaaggagtcgaacgccactgagcgcactttccatgggcttttgtcctgaagaatcaggcgaacaagcccggtgatgatggccgtcacggcaagtatgaccgtggcggccatcgtatatccgaaagcaaccagcagtgtgatgacggcgacgacgccgagtacgcaccattcaaaccatggcttgccctcatgcgcttcggatacatagggatggttgtgcatgttgcgattccttctgtcgaacggttacgtgaccacaatagcaggcgaatagcaaaggtgggattccgcttggacccgttgacgggtcaggcggaatcccacctttgtgcgttttggctgagctgctcccctcagagagtcccgatcagtggaagaagtggcgggtgccggtgaggtacatggtcacgccggccttcttggccgcttcgatgacctcctcatcgcggatggatccgccgggctgcacgatggccttgacgcccgcgtcgataagcacctgggcaccatcggcgaacgggaagaacgcatcggatgccgcgaccgcaccggtggcgcgatcggcaccatcggccagcgtgttggcgcgctcgacggccaaatggcaggagtccacgcggttgacttggcccatgccgatgccgaccgtggcctgatcgtgggccagcaggatggcgttggacttcacgcagcggattgcacgccatgcgaacacgaggtccttcagcgtgtcggcgtcggcggcatcgccggccacgagcttccaggcgtccggatcgtcgccgacggcgttgatcagatcggtgtcctgcacaagcaggccgccatcgatctggcggatggcctcgtggcccttcggtggctcggccaccttgaggatgcgcaggttcttcttcttggtctgcagcagttcgagcgcggccggctcatagtcgggggcgacgatgacttcggtgaaaatcgggcgcacgctttcggccatctcaagagtgaccttggagttgcaggcgatcacaccgccgtaggcgctcatcgggtcgcaggcgtgagccttcttgtgggcctcggccgcggtcgcgccgatggccagaccgcacggattgttgtgcttgactacggccacggcaatggcgggagccatatcccatacggtgcgccaggcggcgtccgcgtccacgtagttgttgtagctcatcggcttgccgccgagctgctcggcgtgggcgaaaccggtctggttgagcgggtcaatgtagagggcggcctgctggtgggagttctcaccgtagcgcagggtgtgcgcacgatcccaggtgcgggtgaactgggccgggaacttggcggaatcgacttcagtgccctgatcgtccttgtccacctcgacggcgtccagagaggccggcttgggccagtgcttggcggtccactcgttgatggtggcgtcataggcggcggtgtgcgcgaaggccttggctgcaagccacttgcgctcgtccagagagaagccggtgccgtcggccacgcgggaggcgaccagtgcataatcggccgggtcggtgacgatggccacggtggcgtggttcttggccgcgccacgcaccatggaggggccgccgatgtcgatcttctcgatggtgtcggcctcgttggcgccggagcgaacggtgtcggcgaacgggtacaggttgacgaccaccagatcgaacggcttgatgccgaagccgtcaagctgcttggcatgttcggggttggtcatatcagccagaatgccggcgtgaatgtacggatgcagcgtcttgacgcggccgtcgaggcattcggggaatccggtgacatcggacacctcggttaccttgacgcccagctcggcgagcttcctggcggtcgaaccggtggaaacgacttcggtgccggccttcacgaacgcttccgcgagtacttcgatgccttccttatgaaagaccgagaccagtgcccgacggatcggtcggttcgtgtttgtcatcctgttcctccttggattcttgtggttgtgacgccagggaccgcgcctgacggacgatgacggtcttcggggtcgcggcggtggtgcgggaatcattgatcctcccaaccaaccagcctatcgaaaaaacgagcgctgtgccaatcagcgcgagcagccatgccgcggtaaatcccaatgcggtcgaatgaccgacgactctggtggaggccatgacgtcgacgccaatgtgagcgagacgatgatcgccaagcgatccattggacagagcgaacagcaatgtggatgccagtgagatcagcatcgcgctcaggcagaatgacccggcggagtagatcagcgaaaccagtactgggccgcgggtggacgcattccgtatattcaacggtctgcaggcgaatccttgcggcaggaatacagccagcaggcccacgagcgcagcgatggcgagaggcgcgttcaaggcaacggtacgccatagttcgctgctgaccggttcgggcagaataccgaataccggtattgcaggaagctctttggattggccgagccataacgtgaaactggccaaatcaccgatggcgaatccgccgccgaagagccaggaaacagcccagagcatgacgttgggtagccagatcagcatggcgacggtggtgagaattcgtgaaccggtttccatcccggacaattcgaacaacgatacgacagcggcatggttgcgtaccgaccatacgatgacggtaatcaatccaattgccaggtatatgcccagtatcgcgacagccaagtcgacgccgattttcaggcagtggcgtatgtccgccggcacctgcttgcgagtccagtccctgaatgctcgcatcttggctgattccggtacggctgcgcataggaaaccgatcgagaatacgatggctgctttcagcaacaccagccactggtcatcgacaagacctaggtgtacggattgccggaacgcctcgttcaacccgagccaaacattcaatccggcaacatacgcatgcggcccgtatgctttgattcgcatggtgagtgcattgatcagccatatcagcagtatggtcaacatcaatggcgtgatggtgagggtgaacgaatcggttctagagcccgatccctcactcagaagcacaacggcctgtgtcagcgaggttgtgccgacggtgagattgtcgccgccctcttccatggagacaaccaataacatcagcgctgtatagcaacctaatgcaacggcatagatggccatggatgcgagggcgactatggctccccgcacccattggcgaatcacggctttcatcacgattggttggaaccgatcagtcgatgttggccttggcgagtatgtcgcgcatgatttcagcggcctggcccggggtcttgcccacggggatacccgccgcttcgagcgcgttcttcttgtcctgggcggtgcccttgcctccggagacgatggcgccggcgtggcccatctgcttgccttcgggggcggtgaaaccggcgatgtaggcgacaaccggcttggtcatgtgctccttggcccatgcggcggcgtcctgttcggcgaagccgccgatctcgccgatcatcatgacagccttggtgtcggggtcggcttcgaatgcctgcagggcttccagcagcgtcgtgccgacgatcggatcgccgccggcgccgagacatgcggtgaagccgatatcggacagttcgcccatgagctggtaggtgagggtgccggatttggagaccagtccgagcgggccgcggccgacaatgccgtcggggatgatgcccaagttgacgccagggttgccgagcgtgatgaaaccggggcagttcggtccgatgatgcgcacgcccttcttgagcgccagttcgacgaagtatgcggaatcggccaccggaatgccttcagtgatgaccacgatgagttcgatgccggcttcgacggcttcgaccacggcggacttggcgaacttcggcggcacgaacaccacgctggccttggcgccggtggcttcacgtgcttcgccgcaggtggcgaacacggggatgtccacgtcggcaccgttcttggcaccggggaaggtgacggatgtgccggccttgcgcgggttcacgccgccgacgatattggtgccggccttgagcatgcgagccgtgtgggtcatgccctgatggccggtcatgccctggacgataacgggagcgccgtcttcgatgaacagcatcagcgaacctccttggactgggtcgcctcaccggcgagctgcgcggccttggctgccgcgccttccatggtttcggacacatggatattcggattgttggcggaagcgaggatatgcagaccctcggcggcggcgttgccatcgaaacgcacgacgatcggcttggaaccgccgagcttggcgaccgcttcgaggatgccgttggcgacttccacgcaggaggtgatgccgccatagacattgatgaacacggattcgacctgagggtcggacagtacgatctccaggctttcggccatgacggctgcggaggcgccgccgccgatgtccaggaagttggcgggcttgatgttggtgccctgttcctcgccagcgccggagacggcatccagggaactcatgacgagtcctgcgccgttgccgatcacaccgacctcgccgtgcaggtgcacgtagtgcaggccgtgttcgcgggcgcgctgttcgaaggggtcgggaacgatgagatccacgaaacgcgcccagccatcatggcggaaggaggcgttgtcatccaaggagatcttggcgtccaaggcgctcagctgcttggtggattcgtcatccgggtcgccgatcttggcgagcggattgatttccacgagcgtggcatcgttgtctttgaagcagcgccacatcttgagcagaatctgtgcggcctgatcgacgtccgcgtggtagaagccgatgctctgtgccatttcggtggcagcggccaggtcgaagtcgccgagcgcatcgatgtgcaggcgcttgacggcctccggatgttccttggcgatttcctcgacttcggtgccgccgttggcggtggccagcacgtcgaagtcgcgcgaggtgcggtccacggagatggacacgtaatattcgtgcaggatgttcttggcttcggccacaagcacgccggaaaccttgtgcccgtggatggtcatcggcaggatggactcggattcaagaatcgcctcgtcgcggttatgggcgatcttgacgccgccggcctgaccacgatgaccgatcttgacctgcgccttgattacgcagggatagccgattttgtccgccgcttcggcgacttcatgggagttctgggcaaagatggcgtccggggtgggaatgtcctgttcctcgagcagctgacgcgcctggtattcgtaaagatccatcgatccttccctgactatgtaattggtccggcatataactgtacacagtacatgccggaccttgaaaactaactgtacgttgggtgagacggaatctcaggccggcatcgcgatcagcgagctgctgggcttgccgccgagcttatccagaccgtcgagaccatcgagccgcatcacaaaactgaagcccaccacagtgccgcccgccttttcgataaggtcggcgccggctttggcggtgccgcctgtggcgatgagatcatcgacaatgagcactcgctcccccgcctgtacggcgtcggtttcgatttcgacgctggccgtgccgtattcgaggtcataggattcaccgatggtttcgggcggcaatttaccggccttgcgcacggcgatgaaacccttgcccagatgggcggccatggccgggccgaacaggaacccgcgcgattcgagaccggcaatggagtcgaattcgctcggggacaccggcagagccgtttcaagcgccttgagcagaatcttcaagcccttggggtcggcgagcactggcatgaaatcacggaagataatgccttccttgggaaaccccggtatggaacgcaccaaggacaccagatattcggcttcctgttgccctaccttgctcaatgcgtcgatggtgatgtccgactgtgccatagtgctcgccccttttatgcctttgcgatgcgatactcggatggtgctaccgaatcgaacagcttacttcgtcttggtttcgttgtcgtcaccggtctcgtcagcggtgtcttcctcggacacgacggacgcctcgatcggaacctgaccagcctcatcgttagccggagcctcggtgtcttcgtcgggcagcgggttgccgttctcgtcgacctcatcatcggacacataggccgggcgggtgtactcacgggcgatggcgttgaagccgaaacgcagcttggagccttcggagtcgatgacgatctcctcatactgctcgtcgacttcgacgaccttgccgatcacctggccgatggtgatgacctcggtgccgggctgcaggttgcgacggaagtcctgcttctcctgctgttgctgcttggccttcttggactgccaccacatcatgccgccgaacacgacgacgatcacgatgagcataatgtactgttgttccacgaaacaactccttcaaacgagcgacattgacgaaacgccgccaagtgtgcaaacaggagaaagtctagaagagcttgctgacatcatctttgggcgtaattcccaaatgctgccatgccttctcggtagccacgcggcctttgggcgtgcgaatcataaaaccttcgcgcacaagatacggctcgcacacggtttccacggtttccgattcctcgcccaccatggccgccagattgttcaggcccacgggtccaccgttgaagttgcgcacgatggcattgagcacggcgatgtccagccggtcgaggccttcggagtcgatctggtacagggccagcgcctccttgacgtcgtccggccgcaccacgatcaggtcgtggacgatggcccagtcgcgtacacggcgtagcaatcggttggcgatacgcggcgtgccgcgcgaacgcaacgcaagctcatgagcggaacccgcatcaaggtttacgcccagtacgttggccgaacgttcgatgagcttttccaactcctcatgcggatagaagtcgagatgtgcggtgaagccaaagcgtgcgcgcaacgggcttggcagcataccttcgcgcgtggtggcaccgatgacggtgaatcgcggcagggtcagcgggatggagcttgcgcccgggcctttgccgaccatcacatcgacgcggaagtcctccatcgcgatatacagcagctcttcggcggcgcgcggcagacgatggatctcgtcgatgaacagcacttcgccgacgtcgagggagctcagaatcgaagcaagatcaccggcatgttgaaccgcagggccggaagtcacgcgaatcggcacttcaagctcattggcaacgatcatggccaacgtggttttgcccaagccaggagggccggcaagcagaatatggtccggtggcacatcgcgtttacgggccgcgtccaggaacagttgcagctgggccttgagccgtggctgtccgataaagccttcgagaacatgggggcgcagctcctcgtcgctgaccggctcgttgccgatcggctgggaggagaccatgcgcaacgactcttcgttggcaccggtgtttgaggtaccgtaatccgttgtctcgctcatcagcggcccctatccatcagcgccaaagccagacgtagcacacgcggcacatcgtcggtggcaagcggcgtgggaatatcgttttcggcgcaagcctcggcaacggcctgctgggcgtcctgctgacgccagccaagtgaaatcagtccttcgacaacctgttccgtaccggtatccaccggagacttggatattgccgcctgagcggaagcaccctcgatctgactcaaatcaatagagcccttaagctcgaggatgattttctgtgcgcccttcttgcccagccccggagccttggccagcgcggtggcgtcgttgtcggcgatggcgtgggccagctgactcggcgtcagtgtggagagtaacgattgggccactttaggtccaatgccggagaccttgatgagttgcagaaaggttttcttggcgtcccgatccaggaatccatgcagggtaatggcatcctgagagaggttcatataggtgaagacgcgggtgtcttgcccggcgtgcagacggctcaggtcggtggcggacatgcgcacttcgtagcccactcccccaacatcaatcaatgcggtatcggtttcgaccgattcaacccgcccggtcagcatgccgatcatacaggtactccttcagggctccaggattcaagactcgaacaactgttcgaaagtatactacatgcctcggtcgtggttgatgcggcggcgcgtggatttctgtgcggcctcagcccactggcgttgcgcggcggtcagatgttgttcgcgttcgccgccctgcaatgcgcctgccgggcgcagcgcatggcaaatggccaaagccaaggcatcggcggcatcggcgggagtcggcattttggtgaggttcaaaatacgtgtcaccatacgctccacctgaatcttctgcgcctgcccgttaccggtgatagccagcttggcttcggtaggcgtatgcaacgccacgggaatattgcgttgcgcggcggcgagcatggcgaggccggcggcctgtgcggtaccgagtacggtgttgcggttggattgtgcgaacactcgttcgatggatacggcatcgggtgcgaagcgatccattttctcggacaggccgttgtagatggccagtagacgcagatcctgggtgatatccggtgaggaccgcaccacgtccacgtgaataaacgaaagccggcggtgctcgccggcttcgatcacgccgaccccgcaacgtgtgagcccggggtcgacgccaaggataatcacgaggattactcctcgtcgagctgggccatcacctcgtcggaagcggtccagttggagtagatgttctgcacatcgtcgaggtcatcgaggttgtcgatgagcttggacaccttgcgggcatcgtcgaggctcaactcgacctcgttcttcggctgcatgacctggtcggcggaatcgtagtcgaagccggcgtcctgcagagccttgcgcacggtgaacaggtcggacggaccggtcacaacggtgaacacctcaccgtcatcggtaacgtcctcggcaccggcttcggcggcggtttcgaacagcttgtcgaagtccacgccctcggacggcaccacgatctggcccttgcgctcgaagttgaaggacacggagccggaggtggccagggagccgttgcccttggtcagggtggaacggacttcggcggccgcacggttgcggttgtcggtaaggcattcgatgatgaggccaacgccggcaggagcgtagccctcgtagacgatgtcttcgtagttggcggcgccgtcttcagcaccggcaccacgcttgacggcacgagcgatgttgtcggccggcatggaggccttcttggccttgtagatggcatcgtacagggacgggttgccgtccgggtcgccaccgccgaggcgggcggcgatttcgatgttcttgatgagcttggcgaagagcttgccgcgcttggcgtcgatggcggccttcttgtgcttggtggtcgcccacttggaatgacctgacataatgctcctagcaattattgaaacggatgatgtcaaacgaaacgattgtaggccgttaatcagacatacccgtgatgtttccgatgattgtcttgttatgcgtaccgataagaccggtcacgcggggtgccgcacctgtgttaggcaagcggcagatgatactgcggagccagctgttcgaatgcctgggcataggcttctcgctggtcggacagcagaataggcatggtgcgtgtctgggcgacgatgggcatgaagttcgcgtcaccattccagcgaggcactacatgctgatggaggtgagcggcgactcctgcgcctgctacttcgccctgattaatgccgatattgtaaccgtgcggacgggagacggtttccatcaccttcatggcgagggtggtggccttctcgaattcgaacagttcggcatcgtcgagttcggtgatgaatccgacgtgacggtacgggcagatcatgagatgcccgacattgtatgggtagaggttcatgatggcgaacacgtgcgtgccacgccaggcgatgaggccgtcttcgtcggatttcttgggtccggcgcagaacgggcattccttcgtcttgggcttggttgggcgatcctcgctgttgcgcagcacataggtcatgcgctgcggagtccacagtcgttcgaccgtgtcctcctgaggcggaaagtccgccggattatcgacacgcacgtcagtcattttcgcaccctttcttggctcccctctctgaggggagctggccgtgaaacggactgaggggagtgcgagccatgcaggactcccctcagtcgcctacggagccagctcccctcagagaggggagccagtaccattcacatcactcagccacagcggcgttgaagtcgtcggcggagttcacctggacgcgcttcttgatgacagtgaggatctgctcgcgggccttgtccaccggaacgccgttgagctggctgccgtcacggaagcggaagctgaccgcgttgttgttcatgtcttcctcaccgacgatgaggatgaacggcaccttggacttggaggcgttgcgaatcttcttgccgaagcgatcgtcggagtagtcgatctcgcaacggaccatctcgtcctcaagggacttgacgaaaccggccagatgcggggcgaactcgtcggcaaccggcacgccgagcacctgcacgggggccagccacgccgggaaggcgcctgcgtagtgctcgagcagcacggcgaagaagcgttcgatggagccgaacagggcgcggtgaatcatcaccggacgctggtgggtaccgtcctgcgcgatgtactcgagctggaaacgctcgggcaggttgaagtcgagctggatggtcgagacctgccaggtgcggccgatggcgtcgcgggcctgcacggagatcttcgggccgtagaaggcggcgccgcacggatcgtcgacgagctcgaggttggattccttggcgacctcggcgagcgtgttggtggcctcctcccagatctcgtcggagccgacgtacttgttcgggtccttggtggacagctcgaggtagaagtcggtcaggccaaagtccttgagcaggttcagcacgaaggtcagcaggctggtgagctcgtctttcatctgctcgcgggtgcagtagatgtgggagtcgtcctgagtgaggccgcgcacgcgggtcaggccgtggacctcgccggacttctcgtagcggtacacggtgccgaactcgaagaggcgcagcggcagctcgcggtaggagcgctgacgggacttgaagatcaggttgtgcatcgggcagttcatcggcttcaggtagtagtcggcgcccggcttggtgatgttgccgcccgcgtccttttcctcgtcgaggtgcaagggcgggtacatgccgtccttgtaccagtgcaggtggccggaggtctcgtacaggccgcccttggtgatgtgcggggtctgcacgaagctgtagtggtgcttgcggtgcatctcacgggagtagtcctccatcgcgttgatcacggcggcgcccttcgggtggaacacggccaggccggggccaatttcatccgggaaggagaacaggtccatctcggcgccgagcttgcggtgatcgcgcttggcggcctcctcgagacgggtctggtaggccttgaggtcttccttggtggcccacgcggtgccgtagatgcgctgcatggtcgggttcttctcggaaccacgccagtaggcggcggcggaacgctcgatcttgaaggccttgatgtagcgggtgttcggcaggtgcggaccgcggcacaggtccttccaaaccacattgccatcacggtctacgttgtcgtagaagctgagctccttttcggagatctcggtggcggcggccgggtcgaggtgtgcttccttgtcttcgatcagttcgatcttaaagggctggtcggcctcttccttcagagcctcttcctcagtcacggaacggcggcggaaggactgggaggacttgatgatgcgctgcatgcgcttctcgatgtccttgaggtcgtccggggtgaagggctggtcgacctggaagtcgtagtagaagccgtccttgatgacggggccgacgccgagcttggcgttcgggtagacttcctgcacggcctgggccatgacgtgggtggccgagtgacgcatgattgcgaggccgtcttcggagtcgagggcgatggggtcgacggtatcgccatcgttcagcggcgtgtacaggtcacggttctcgccgttgatcttgaccgcgatgatgttcttgtcttccgcgaacagttctacgccggtggtggttgcttccacctccttcgcttcgccgttgacggttatggagatggtagcttgcgccatgatttgtcctttgctatcggggcccacggtactaatgtgcaggcctggactggttaatcaacgtaggacacgataggttgggcgtgcgacaaataccaccagcatctgaaccaatacgaaaaaaacctcgccgaagcgaggtttcgttgtggagcggacaacgggactcgaacccgcggtctcaacctaggcaaggttgcgctttaccaactaagctatgtccgcaaagaacttccgccgtgagaagcggaaattcagtgggtgatataggaatcgaacctatgaccc

SEQ ID NO: 2262 - DNA, 3858 bp, Unknown
  R119_18m  MAG No. k141_2800
acatcaccgtgaccgacaaggccaacggcagggatgtgaccgaccggttcaacatccaggccatcgacggcgtggcatacgtgttcgccaaaaccgttgacaccgaggttccggcgacgggagagaccatcaagggcgaccaccggcaccaacatcgccggcctcatcgccgtcatcctcgtcctcgcgctcctcggcaccggtgcaaccgccgcgatccgcctcacccgcgccaacggccgccacaccgggcacgagaacgacgcgaatgatgatggcgctggccgtgatggcagtcccaatggagatggccccgagccggacttcgcccaactcgtcaccaccatcaatcccaaggagccgcccatgaactaataacaaccacccatctgctgcttagagccaactttcgtattccagttggcagtcagacggtgataccatgcaactgtcccggcaaaacggggcagtgcatactaggcccgcagtcgtagtcctgcgggcctatttcgtctgttccccatcggctttagccaacgttcccccatgacagcggactatgattcgctgctttaagcactggcaagtgaaactcgatgccaggtttctctccccacggcactctagctaaatcggttatgttgcctggccattcaggcaccttattactagaactgagatcaaacaaagtgaaagcgaatggcggtatcctgatacatgccattttgcagcacgtgtaatcagcaaatatgggaaccatccatccggtgaacagcttttgttcacgcaggttatcgactataaacatatggagtctgtatcgctgggggaaaacagtgctctccctatccaagagatagtccttacagtcatgcatatcaccagctgatacacagaagttcgacatcacctgcttcacaaatgcaagaggcatgagcctatctgtcttgaaatgaatggatttatccccttcctgaaagtcagagacaaggatttgctgtccagttgcacgatagaactcactgaatggcttgacgtagttttgaccaagataactattgcatgagctgcaaatcgtcttgaatccttgacctctttgcaattgccgatacttcaggccttccatgtcatcctgcccggtcaagctgctcttcacggcgtcaacgcctgaatagagcttcaccgtgtgatcattacccacagattgaggagggatgtgttcaaagctcagcggcccttctttaccgcagattcggcaaatgtcatctgccatttcacgtcatctccaaacgttattgccacaggccgaggaatgctgcggcaatgaaatcgagaagcgcagcaccgaccagaatcaatgcatataggttgaaataactgcgcatcaatttaagttttgcaacatgaagtttctcgtttgttgattcaaagtattccatcgatcccgacacgactttttctatcgcaggaaagaccgcgccaatgatggcgagcgacgaagtcacgagtgtagcctttgcgccgtcttgcagaatggtgaatgagagaatccccacaccaatagctaatccgatggcgatgattgcgtaccatgctgctgctttccgaagggagactcgatcggcttcgtctagttcttcccagtttgaagcggcgctgagagattgcttaatccaaagatcattctgctgctggtcgttattttgcattcttttcccttttccgggcatcttttggcgaatactatagcgtcttgatttacctatttctgtaagtatgctgaacgaatgctgtgtgaatttgtccgccgctgattccacgggactgcacgaggatggccgtatgcgtaggcatggcggtgggccgtgccgttcctgtgcggaggagtgcggctgtggatttgatgaaccaggtgctggagttgttcgtgaagttcgcgacgattggcggtggcttgtggctggtgtggggcgcggtgacattcggtggtggtttgaaggatcataacgggccgcagacgcagtcgggcctgtggcagatcgtgggcggcggcatgattatcgcggcggcgcagatcttcagcgccgtggcgttgggctgagccggtttgaggcatcggggatcccggcatggaggatttcatcgttgcgatgctcaacatgatcgggggcggtggcgccggttcgatagccactggcatgctgtcgcaggggccggagacgtggaatccggcgctttaccagttggccgtgaacgtgcatgacgtggcggtcaagccgttgacctcggtggttctggcggtggtgtttaccttggagttggcgcgtaattccacgcgcatcgagtccgaccgcgagttgggcgtgaagatcgtggcgagccgttcctgcaagtccggccaagcctcgtagtcggcgatggtctcccaatcctcgatggacagctgggccgcgcccacatgtgagcgcacatcatcgtcgatggccgcgaccttgagacggcggcgcaccagcgacaccgaacgaccggtcttgcgcgcggcctcctcgacgctcgaccccaagtccaacaatccttggtagccatcggcttcctcgacgacggtcaggtcggttcgctggctgttctcgaccagcatcagctcgcgctgttcccgttcgtccagctcggccacgaccgccggaacccgttccaatcccgccagtttcgcggccgccagccgccgatggccgatgaccagcgtgaaccgtccctccggcgcgggcacgaccagcaggttctgtcggatgccttgggcgcggatggaatcggccagctcgcccacatcgcccacatcgcggcggggattcgccggattcgggtcgataagcgccgtttcgagcatgaccaccccgccggcggctggcgcaaggccggtggtttcattgatggcggcgatggtgtttgcggtttccatgatgggtttcctttcgaaaaagagttgtctgagtgattgaagtgggaagcggcgggccgcgcccggcggcccgccggaatcatgtcgttgttcagagcgcccaatcgggcagcattccgtgctcgcaggccgtgaccacgagggcggccagcgtgcattcctcgtccgccagcagggccttgagcccccattccgccgcgcggccgacatggccggccgaccacgacaggtaggcgcacaccgtcagcaactgggcccgcctgctctggggcacgcgctcgacgaacccggcgaggatgtccaccgcgaggtcgaggcgtgacgtgtcgggcttctggccggcgtggaaccaaccctccaacacgcgctccagcagcgccgtcgatttcagcgaatatcgttcctcgaccatgacgcgcagttgcttcatggaaacctccgggctgattgcggtcacgataagcgtgtcgcgagaacgaaggtcggcgtccagcgtcacggccaacgccaattgctcgcgggccgtgaagccctcgcctttgccgcccagcagcctgcgccacttcctcagcaagggcgtgaaccattcggccgccgcctcacgcggccccatatcgatgcgcgcctgccggtattcctcggccagtcgctccgccagccgctcgtcggccggacgcgcttgggcaatggtgccagtcatatccatcggtcctttccgtggtgtccgaacccccaagtccgcttccacgcggcccatgcccgcgagccatgcgagcggccaagcgcaatgtcatgcgctgcaagcgcatgacccagggccgcgatccgcccgacgatggaggagagtatgtcgcgcagccccgcctgaagcattctctccgcaatcggcgggcgccacccga

SEQ ID NO: 2263 - DNA, 3378 bp, Unknown
  R119_18m  MAG No. k141_4141
caatccttgattcgctcctcgacggggcgttcggccagttcgcgacgggtacggaccttcaggaatccacgtggatctcccatgtcagcgcgctccttccataacctgctcgtacacctgttcccagacgccgggcgtattgaaatcgatattgttctcttcggcgttcttcatcgccttctgcatggcgaggaagtgcttcggcacgatgtgcgtgaatcgcttggatacattcttccagtcggcgagcagtccggccgcgaatgcggagccggtctcttccgcgtgctgcttgaccaggccgtgcacgatttcgtccgactcactgtcgagcggttcgaacagcagtgcgccgttggtggcggctgccgggttgacctgcttcatatcgagatcgagcacgtacacgtggccgccggagaagcctgcgccgaggttgcggcctgtgggaccgagaatcacgacggtgccgccagtcatgtattcgcatccgtggtcaccgacgccttccaccacgaaggtggcgccgccgttgcgtacgccaaaacgttcgccagcgcgtcccgccacgaacatctggccagaggtggcgccgaaaccggtgacattgcctgcaatcacgttctcatgcggatcaaaggtgatgcccgcttccggacgcacgaccatacggccgccggacaagcccttgcctgcgtagtcgttgacttcgccgtatatgcggatggtttcgccgcgtgggatgaacgcgccgatggactggccgcccgcaccgtggaaggtcatgtcgatggtgtcgtccggcagaccttcctcgccgtagcgcttggtgatctcgtagccgaccatggtgccaagcgtacggtacacgttgcggattggcatctcgatgcgcaccggctccttcttctcaagggctggctgcgcaagctcgatgagcttgttgtcgagcgccttgtcgagctcgtggttctgctcgatggtctgatgcaagatggttcccggaaccggtcccggctgcatcagcacgttgctcaaatcgatgccgtcggacttccaacgcttgatcgcttcgttctgatcgaggcattcgacatggccgacagcctcctccaaggtgcggaagccaagctgtgcgagcagttcgcgcacttcctcggcaatgaacatgaagaagttgataacgtgctccggcttgcccttgaagcgtgcgcgcagttcgggatcctgggtggcgatgccctgcgggcaggtgttcttctggcaggcgcgcatcatgacgcagccttcgacgatcaatgcggcggtggcgaagccgaattcctcggcgccaagcagggctgcgatcaccacgtcgcgtccggtcttgagctcgccgtcgcactgcacggtgatgcgcgaacgcaggccgttgagcacgagcgtctgctgggtttcggacaggccgatctcccatggggtgccggcgtgcttgatggcgttgagcggagccgcgccggtgccgccgtcgtagccggagatcagcaccacgtcggcatggcacttggccacgccggcggcgatggtgccgacgccgaattcggagacgagcttgacgtgcacgcgagccttcggattcgccatcttcgcatcgttgatcagctgcttcagatcctcgatggaatagatgtcgtggtgcggcggcggggagatgagctctacgcccggggtcgcgtgacgcaccttggcgatccacggcgggaccttggctcccggaaggtggccaccctcacccggcttggcgccttgggcgagcttgatctgcaaatcagtggcgtgcacgaggtaatcgctggtcacgccaaaacgcgccgatgcgatctgcttaatcttgctgtagcgcagcggatcgttgatacgatcctcggattcgccaccttcgccggagttagaacgtgcaccgatggtgttcatcgcgatagcgagggtctcatgcgcttcctgggagatggatccgtagctcatggcgccggtggagaaacgcttgacgatctcgctggccggctcgacctcgctgatgtcgatcggcttgcggtcggacttgaacttcatcagtccgcgcagcgtcatcagacggttggaggtgtcgttgatgtgcgccgaatacttcttgaacatgtcgtaatcgccgcgctgggtggactgctgcagcaggaagatggcctcaggatcattgaggtgatcctcgccggtgcggcgccacttgtactcgccgccggtgcgcaggttgcggtgcggacgggcggtccactgcgacgggtaggcgacgcggtgacggatggcgacctcttcggccagctcgtcgagtccgacgccgccgacgcgggaggtggtaccggtgaagtattcgtcgatgacgtccttgttcaggccgatggcttcgaacagctgcgcgccacggtagctcatgatggtggaaacgcccatcttggccataatcgtgagcacgccagtggacagcgcgttggtcaggttcttcactgcggtttcggcatcgacgttgagatagccattgcgggacaggtcttcgacggattcgaacgccagatacgggttgactgctgccgcgccgtaggcgatcagcagagcgacatggtggatttcgcgcacatcgccggcctccacgaccatggagatctgggtacgcgtgtgtctgcgcagcaggtggtgctgcaccgcggaagtgagcagcagtgatggaatcggtccccacgtgtagttggattcacggtcggagagcacaaggaagttggacccgtttgcgatggcctcatcgacttcctggaagatttcctcaagacgttccttcagtgccttgccgccgcctgcgacctgataaagacccttgacgacgaacggcttgtagtagccgccgaggatcttggcgcggtcgaggcgcttgagctgcgccatttcgtcggagttgagcaccggcaacggaatgaggatcttcttggcgtgcagttcggaatcggccagcaggttcggctcggggccgatggcggattcgaggcaggtcacgatcttttcacgttcccagtcgagcggcgggttggtaacctgcgcgaacttctgggtgaagtagtcgaacagcatgcggctgcgggaagagagcgcggccataggcgcgtcgttgcccatggatccgagcggttccttaccggtgttggccatcggggcgagcagcagcttcaggtcctcttcggtgtagccgaaggcgcgctgacggcgctgcacggactggccggagtggttgacgtgctcgcgcttgggcagctggctcatctcgacggtgttgccttcgacccactggcggtacggatgctgggatgcgagaga

SEQ ID NO: 2264 - DNA, 54046 bp, Unknown
  R119_18m  MAG No. k141_5435
ccacattgctgtgtgattgatgccgctcgataggcatgtcaggccggacacaccacggtgatgccgaatgggcgacgggccgacgacccgcatcatcgcagcagccgggttttgccatccttgacaagcagggcctgccggttggtgaggggcttgagactgagatcggcaccataccggtcgagaatgcgttgtgcggcgtggcccatggccgttgcatgatggtgggggaccacgcggaaatcagccaagcccaatcctgcgtaatcggtgagatcgggggctttgtccgtgcggtccatgagcttgatatagccgatgtcaggtgccgtgatgaccgagcccgcggactcgccgatgtacggcgtgccggcgcgcacctgctcgatgatggcccagtcggcaccggtgcggcgcaactcctgcaggagaaagaacgtgttgccgccgcccacatagatgcagtcggcctcggcgatgctacgcgtgacgcgttcggcggacccgctcggcacatcttccacatccagttgctccacctcgaaaccgaggcgttgcagcgcgtgtttgctcaacgccgagtgaaccggcccccacggttccacggcgctcgccgtcgggatgaacgcgacccgcttgccttgcggatgcggttcgacttcatgcacggcggacgaggcgttgcggaatatcgaagtcagcagcatcgtaaccataaaagccttcttcacatatcgactaggcgactatgcggcagtgtcggccttgaatatacggaagtgttcgtgcgctcgctctgggtatatccggcctgatcagcgggactcggccaatgtgatgccggccgccgtcatctgtttgcgggccgcgacaccgagctcctcgctgaccggtacggtcaggtcctcgaacacggtgacctcgaaaccgaacttcctggcatcgagcgcggtgtccttgacgcaatgcgattcggcgatgcccaccacatccacgcgactcacgccggcggccttcagcgcattggccagcgtcttgccggcggattgctcggccgcaacctcctcacgggtctggatacggtcggtattgtcctcgatgccctcaaaaccggaatatgccgccgaatactggcccttcttgaaatgatgatggataatcagcgccttgatcgccggatgcaattcggcgttcggcgtgccggccgcaccatgcttcggccacgtgtccacgaaatccggttccgccgaccagtgcgcgcccggctcgatatgccagtcctgcgtggttgcgatatacgcgtactcgctgcgatgcgcgttcacataatcggcgatccgctcggcgaccgcgttgccgccttcgactcccagttcgccgccttcacagaacgtcggctgcatatccaccacaatcagtgccttggtcatcatcattcccccctattgccttggattcgttttgaatattgtctcgaactcgacgtgcgattgctctcatcatagccatgcgcggccctgtgggaaacgttcgggcttacactgcaagcagcaatcgaatacaagaaccaggggagggtgaccaagaccatgctggaccatctgacgttgcacgtgaaagacatcgaccgtagcatcacattctacaaacaggcgctcgcaccgctcggctatatcgtcaaggcgcatcatgagcccacgctcggattcggcgtggatgacggaaccctgcactccgatttctacgtgtcgccgattgacgggccggaggcggaggcttcgccggtcacgccggtcacacacatcgcgttcctggctgacagtcagcaagccgtgcaggcgttccatgcagccgcgctcgccgccggcggccgagacaacggcgctcccggtccgcgcccgtaccatcccggctattactccgcattcgtgctggacccggatggcaataacatcgaagccgtcgtggattgggctcattcgaacgagtaaaaaacatatccgtgtcgtgcctcaggcagcatcgacggcgtaggctccagccagtcggatttgtggtcgcaacggcggtataggtcacatcacgcaagcgtgacggtgacggtctgctcggcggtttcggtgccggtccatgtgccggctctgcggttccaatccatgccgtccgcgtgcagtgcatcaatgccgtattgatgcgcctgtgtgaccagccaccctgccgtctgccagcaaagttgagtgcggttgtcggcggacaggccgtccggcagcgtgatcgtcaacgttgtgctggccgtattggtcgcagcgccgttgttcgtgccggttttgccatttaggggcataaccgagaccttgacattcggcagtgtagcgcttatggcggcaaccaacccgtccgcgtccgaggaggttgctggctccaacgcgcacgtgacgcccgccgaccgttcgccggtcagccccgaggcccaagcgcgtgccatcgcatcccatgtggcatatagttccgggtagcctgagcgctgcacctcctgcgcggcgtcctccaccggaatcgtctcccaatccggcacctgcagcagatggtcgtagaagatgtttgtcgcataggtcatgtcggacacctgctccgccgtgccccagccttggctgggccgctgttggaacaggccgagcgaatccaagtcgccgtagtccagattcgtcagcctcgactcctgcatggccgtggcgatggccaccgtcgccgcgtgatccggcagtccgcgcgtgacggcgatgttcgcaatcagcgccgcgttctgcgcctgatcaggcgtcaaggtgcggcgggctccgtcgggcgacaccgccgcgcaatatgcttcctcggccgtgcgcgcggtctcgtgaggcgtgaatagccgtggcagcagcgtccatgccgcgatcagcgccgcaacaacaagtatgacggctgcaatcagcgcgcccgcgccatgggagcggcgtctgccgcaccgcacctgttgtcccattgcgcctccaatatttcggtgtcatggctgaccgtgaccggctggcctatgcagcatgcgagatttgccgtgttccggctcggccgtcctcatgacagcgtggcatatccacctgaacggcggctgcgccatcacgcgactttgtgacaattcttcacgcttcctgacatccgcgcaatcagaccggggaatgatacaccgacatctctattgcaagttcgacgcggctgataagtcgattcgcaatcgtctatttgcgtttcaaggggctgatttgctcgttccgagacatccacttccgtttcgaggggctgatggccgagtagcgacagctccaaaacggcgaaatgacgttggcatgaagccattcgtacttgggttttggccaatgaccagccccttgaaacggaagtggatgtccccaaaccacgaaatcagcccctcgaaaccgagaatggcggtcgggattgctccgacaccaggggagctgctgccgctattgtgtgaaaggcgatttgtaccgggttgaaggagaggaacacatggcacaattgcagccgtactgcgcgattgagggcaatgatgatggattgcccgtcgtgttcgtgcatggcatgggtgtggaccatcgttcgctgatgatgctcgacaaggcgtttgacggcaatgattcaattcgccgtatatatctggatctgcccggtttcggccgtacgccggcattgcccgagcatgcctgcgggctgccggaaatggcggattggctgcaaacggccattgacggccttgtcggtaaaacggctccattcgccatggtcggcaactcgatgggcggtgcgcttgtccgcgaagtattggcgcgcgaacctcgccgagtggccggtatggcattgatcgcgccggtcgtggacccgcagcatgccggccggcatgtggccgaacatgtggttgcacagcccaatcccaagctgacgcactccttgccacaggaacaggtgttcgatttcattaccatgggcgtcaaccagtcattcgacgcgtggcggcgctaccaacggttcatcctgcccggcgtggcgttgtgcgaccgtgcggcatgcgagcgactggatcagcgttattggctggccgataatcccgaggaaatgctcggcacatatgctggtccggtgctcatcgtcaccggcaagcaagaccagatcgtcggatacgaagaccagcaagccctgttgccgcactatcccaacgccaccttcgtgactctggataatgccggtcacaacgcgcacatcgaccaacccgaagccgtcatcacgctcgtgcgcgaatgggtggctcatatggcgttcgttccgttgagctgacggtctgctgacagtctgccgaagcctatatgcatatgagcgaccaatgccggttgacgcaatacgccttgcaaggtatatcgtttttcgatatagtcatatcgatgttcgcggtgtcgccaaaaacgtcggcacctgaaaggaccgggctatgaaaaactacatgaaccgatgggtgttgctcgcgttgaaagccatcgtgattctggtctggctggcctgcctatggggccaactattcgccgtaccgggattgagcggcgcgctggccggcctctgcccgagacagacgtcgatgcactggtcatatctcattatgggcgtgctgttcctgctctgcatcgaagcggcgttcgtggccgtatggaaactgttctccttgtctggatcgggcgcgaacttgagcaggtgatttgagatgacgattcgcatcaatctcgacgtcatgatggccaaacgcaagattggcgtcggcgagctcgccgaacaaattggcatcacgcccgccaacgtgtccattctgaagaacggacgtgccaaagccgtccgcttcaccacattggacgccatctgcaaggcactcgactgccaacccggagacatcctcgaatgggaagatgtcgattgatcgacacgccaccggctcgaactcatggttcaacttgtagtctctctcaaaatcaatgatgccctatcatcctgcaagacgatagggcatcagcatgtgattatgcgcagctgatatgtcgcgttgttatcactcggcgtccgcggccggtgcctccttgggcgcggagaggaagtgctcctcgctgggcagcacggcgttcaggattacggccaccacgaacgacacggcgatgcagttcgaggcgaagatttgttggaacagtgccgggaactgcgcgaagatgtcgctcacctgggtgaagccgatgccgatggtcagcgaaagcgccgcaatcgtgatgttgcgctgcgtgaagcccgcttcggcgatcatctggaagcccgaaagaatgatgttgccgaacatcatgatcgtgcagccgccgagcaccgcctgcggcagcgagttgaacacctcggcgatggccggcacgaagctcgccagcaccagaatcagtccgccggagagaatcaccttgcggttgacgaccttggtcatggccaccaatccgatgttctgcgcgaacgaggtcagcggcaggcatccgaacaggccggatacggtggagatcaggccgtcgccggcgatggcgcccgcggtctcgcgttcggtgggcgtacggttcaggcccaccttggtcagcgcggcggtgtcacccagcacctcgaccgaggagacgacgtagagcaggccgatggagatgatcgaaccccagtcgaactcaggcttgaacggcatgaactgcggcacggacacgatggcgaggttctggaaaccggagaaatcgaccttgcccatgcagatggccgccacatagccgaccaccaggccgaacagcacggacagctgcttggccgtgcccttcatcaacagctggaacgccaggcaggcgaccaaagatattagcccgagcgtcaggttctgccagcttccgaagtccttggctccgctgccgccgccgaagctcgtggcacccacgttaagcagcgagaagccgatcgacgtgaccacgatggcggagacgatgggcggcacgaaccgacgccaatacttggccgtcaaacccagcacgagttccagcaggccaccgaccattaccgcgccggccactgcgccatagcccttgtctgcgcagatcgccacggcggccgccacgtaggtgaaggagatgccggtgaccatcggcagacgcgagccgatgagccacgcgccgtacagttgcaggcaggtgcccaggcccgccaccagaaggccggcctggatgatggtggccgattgggccggggtcattttcgcggccgaggcgacgatgaagatcggggcgaggttcgccacgaacatggccatcacatgctgcaggccgaacggaatgcccttccagaaggatactggcgcgttcagcgaagacagcgccttaaaggatacggaattcttggttttcttctctgacatgattcttttcttctctctgttgctcccgctggcgggagcagtcaatgtgctcagtgcctaaatgtgatttcgccggtctcgggattcatggactcgacgatggccagcgaatccacatcgtagccttcggcacgcagcgcgtcaccgccgccctggaagcccttctccacggcgatgccaatgccctcgaccgtgacaccggccgcctcgcacaggtcaatcagaccgcgcaacgccttgccgttggccagaaaatcgtcaataagcagcacatggtcgccggcgttcagatacttcttggccacgatcaccgggaactccttctgcttggtgaaggaatagaccgtggtggtgtactggtcgccgtcaaggttgatggactgcgccttcttggcgaacaccaccggcacattgccgaaatgctgggccgccacacacgcaatgccgatgccggacgcctcgatggtcagaatcttggtgatgtgcttgccggcgaaatgagcggcccatgccgaacccatgcggtcgaacagacgcacgtcgcactggtggttcagaaacgcgtccaccttgagcacatcacccgccttcaccgttccctcgctctggattcgctcctcaagttcctgcattagacctcccattgctgtatgtcagtgaatgatatggatacttgtaagtgtacgttgtcctgcgctgacccgtgcatgtggtaaacatgaatgtcgcgattcaaagggaggcaacagtgtacgacgagccggaagtcatcgcacgcagcgcgcaggaactcgtaggcgatctgaacccgcagcaggcggaagccgtgcaataccgcggtcaggcgctactgatcggcgccggtgccggctccggcaaaacccgtgtgctgacccgccgcatcgcctggatcttgagccagttcggcgcatggccgagccagattctggccatcaccttcaccaacaaggccgccgccgaaatgcgcgaacgactcggctcgctgatcggcccggtggcccagcgcatgtgggtctccaccttccattccgcctgcgtgcgcattctgaggcgcgacggcaagtccatcgggctcaagtccggcttctccatttatgattccgccgactccgagcgactcgtcaaaatcatcgccaccgaattcaacctcgacatcaagcgctacactccacgctcgatcctcggccatatctccgacctcaagaacaatctgaccggttggaaggaaaacctcgccgttcacgcgcccgacttcacgcctggccagcgcggctaccagttcggcacggtgggcgaccttgaagccatctatgcggtgatctacgccgaatacgagcatcgcttggccctggccaacgccgtcgacttcgacgatctgatcggccgcacggtcgagttgctgcgcaccgacccggccgtcgccgagtactaccatcaccgcttccgttacattctcgtcgacgagtatcaggacaccaaccacgcccagtacgtgcttgtgcgcgagctggccggcgtggacacgggggagaaggccatcccgggcgcgccgaacgccggcaagtccggccccgcctggatcaccgtggtgggcgattccgaccagtccatctacgcgttccgtggcgccgacatccgcaacatccaggacttcgagcaggacttcccgaacgccaagaccatcatgctcgaacagaactatcgttcgacgcagaccattctggacgcggccaacgcggtgatcagcaacaacgagggccgcaagcccaagaaactgtggaccgcgctcggcaagggcgagccgatcgtcggctacgcggcggacaacgcccagcaggaggcccagtgggtggccaccgaaatcgcgcgcctgcacgccgaagagggcatctcctactccgacatggcgatcatgtaccgcgccaacgcccaatcccgctcgctcgaagaggcgctgatcaacacgaatcagccgtatcagctcgtcggcggcaccaagttctacgaacgtcgcgaaatcaaggatgcgctggcctatttgcaggcgctcgtcaatccggacgacgatgtgaatctacgtcgtattctcaacgttcccaagcgcgggcttggcgaccgcgccgaaggcgtgctgctcgcctacgcgcgcgagcatggcaccagcttcttctacgcactcatgcacttggatgagatcgaggtgccgacccgcaccgccacctcgctacgagcattccgcgatctgatgggcgcgctctcgcagttcacgcacgcgcacgactccaagcccagcgagatcgtggccgaagtattggagaagtcgggcttaagggccgaacttgagaaatccgtggatccgcaggacgcctcccgtctggagaacctctcccagctgcagtccaccgcagccgaattcgaacagaacacgcctgacgccacgttgtccgcattcctggagaccactgcgctcgtggccgactccgaccagctgcccggtgaggcggaggactccggcaaggtgacgctcatgaccttgcacaccgccaagggcctcgaatacccggtggtgttcctgaccggcatggaacagggcaccttcccgcattcgcgttcgatggaagacaccactgaactgcaggaggaacgccgactcgcctatgtgggcatcacgcgtgccaagcagagactgtatgtcacgcgcgccgccgtccgctcccagtggggccaggccgccgatatgatgcccagccaattcctcgacgaaattccggattcgctgattgattggaaacgccgtgaagccggcgtggagcgtatgcgcgccaactgggagaccgatggattcgccgacgatttgggcggctgggatgatgacgatttcggcggtgccacgtttggcgggtcgtcgacgttcggctcgcgtggttcgtccggttcgggttcgtcctatgggtcgcggtcgcggtatgggtcgtcgtatggctcgggttccggctcctcgtcgtatggttcccgttcaggttcttcgtacggttcccgttcatcatcatatgattcccgctccggctcgtcctcctacgggtctcgctcccgttcggggtcgtcttacgggtcgcgttcccgttccggttcttcatccggttcatatggcggcacccgtggcggcaaggtcaccacgcgccgcaccacaccgaaatccggttcgaccggctctgccgtgcccagctcgaagctcaccaaggacaatggcctgaatatcgccgacttcgccgtgggcgacatgatcagccacgaccagtacggtctcggcaaggtcaccgacgcgcaagacaagggccgcaattcggtaatcaccgtggacttcggctccgccggcgtcaaacgcctcatgctccgcgtagcacctattgagaagttgtagatagattggcccctctgacgaggggctgagttatataccaaataaattcacaaaaaacaagacttgtgttcttcatcactatctgggcataatgcggaggttgtgcctacgagccctgggaacaggggagaggaaaaagtagttatgaagaacaagctgtttgcatccgtgcccaatattctgttcggcgcgctgatcaccatcgcgccccagacctttgcgcacgcctgcaccggccatgacatgccgggtgcctgccactactcgcagcaggcggccaccggcatcggcgtcgtcatcctcgtgtttggcgtcgtggctttgttcgtcgccccgcagattcgcatcggcctcaatatcgccgccgcagccaacgccctgctactactcgccgtacccaccttcctgatcggcatctgcaagggcgcgatgatgcactgccgcatggttatgctgcccacgctcatcgtgctcggcgtgctcaccatcgtgttcgcggccatcgccatctggctcgactctcgcgccgccaagcgcaactgatcgagcagacggccggagcccagccattccgaacgctggactccggtctcgcttattgcaaccgcactataagcaacataaggactcatcgtgccatcccatatcgcattgcgcggccttccgattgaaaacctcaaacgcaagccgttccgcaccggcgcactgctcgccgtcgtcaccatcctcgcgctgacgttcttcggcggcaccatgctgaccatgaacctcaacaccggcatgaccagtatggagaagcgcctgggcgccgaccttatggtcgtgccgcaaaacaccgcgcagaaggctgaagcgctgctcaccagcggcaatcccagcactttctatttcaccaaagacatcgccgacgaggtcatgcaggccgacggcatcgcacaggccaccgaacagacctatatatcatcgctggccgccgcctgctgtgccgaaaagctgcagatcatcggttacgacccggacactgacttcgtcatcgaaccatgggtcgcatcccagttcgaaggcccccttgaagacggtcagatgattgccggcgcaaacgtcaacgtgtccaccgacggcaccatcgaactctacggccataagtggccggtcgtcgcccagctcgccaacaccggcaccagcctcgacaattcggtgttcatcaaccaaaacaccgtgcctgatatggtcgccgcctcggccaaggtctccaagcaggtcatgcccgccgaatatgcaggcgaagccgtctccaccgtgatgatcaagacgcagcggggttacgaagcgcagaccgtggctgaaaacatcaagcgtcttgactcccggttcgccgatttggggtacgtataccccggcggcatcaccgccaacaccagaacttcgctgaccgcgcttgtcacctacctcaagattttcgtggcggtgatctgggtaatgggcgtgattgtgctgctcgccgtattcgcctcgtcggtgaacgaacgcaaacgcgaattcgcgtccctgcgcatcatgggcgccacgcgcggcatgttgaatgccatcattctgaaggaatccgccatcatcggtctgatcggtggcgtaatcggcgtcggcgcggccagcctggtgattttcccattcagttcgctgatcggcaaacaacttcaattgccgtatctgcaagccagcccggttgcggtgatcggattcattgccgtgaccattgtgtgctctacggtcatcggcatcatcggttcgctggccaccatgtggcgtctcggccggcccgaagcctacctgaccctgcgagagggggagtgatatgactgagacaactacgccgactcagctgaccacggttgagccgaccaagctccagccgaccacgccagctcagccgaacgcgccgactgcgccggattcgccgcacgtaaccgagacgccctccccggaccatctgctgaccttgacggacctgacccgccagttcgtccgccgcggcacgccgttcgacgccgtcagccacgtgaacctcaccgtcgatgccggcgaattcatcgccatcgtcggccggtcgggcaacggcaaaagcacgctgatcaacatggtcgccgggctgattcgcccgacctcgggaaccgtgagcgtggctggacgcaatgtggccgacttgggcgataaagcactgtccgtgctgaggaatcgcaccatcggattcgtgacccaaagccagaccctgctcggcaacctgaccgtgctcgacaacgtgattctgcccgcaacgatgtttccggagccgctgccgttcgcccaaaacgcagaagcaacggatgccgttgctcaggtggacgctgttgcgtcgaccgatgccgtggcacaagccgctgccaccaatgatgaagcagccgccgacctgttcatgccggatgtcattgcgccaatcacagaccgggaaaacacgccgtcaaacacggctgcgagccgtccggacctgttcgccacccgagctcgcatgctgctcacccagcttggtgtcgccgatctggcagacagctacccgcgcgagctgtccggcggtgaaatgcggcgcgtctccatcgcccgcgcgctgatgaaccagccgagcctgctcatcgccgacgagccgaccggcgacctcgaccaggagagcaccgacatcgtaatgcgtctgctcagagaccaagccaacaacggcacggcgattctcatggtcacccatgatcccgatgcactcgaatacgcagaccgggtgtatcgcatggacgccggagtgctgtccatagcctcggtgtaatatggtctgctggtgtctgccaacaggtagataccgtctggagtcatagcccatcagcgggtcggcggtaggtgatcgcaagaaaaccaacccgttcgtgttcgttcacgacgaagcgctggggaggcccggctcagcgcttgccaggcatatgcaaggcaagcgttccgttcagataacgacagaaggattaatccaatgacgaacgttcagcgttctcgccgtcaggtgcgtctgtctcgcgccctcggcatcgcactgacccccaaggctcagcgcatcttcgaaaagcgtccgtacgctcctggcgagcacggccgtgaccgccgccgcaccgagtccgattacgcggtgcgtatgcgcgaaaagcagcgtctgcgcgctcagtacggcatctccgagaagcagcttcgcgccgcttacgagaaggccacccgtactgccggccagaccggtaacgccatgctgaccgacctcgagacccgtctcgacaacctggtgctgcgtgccggcttcgcccgcaccaccgcccaggcccgtcagttcgtggtgcaccgtcacatcctcgttgacggcaacatcgtggaccgcccgtcctaccgcgtcaagcccggccagaccattcaggtgaaggccaagagccagaccatggttccgttccagatcgccgccgaaggcgtgcaccgtgacgtgctgcctgcggtccccggctacctcgacgtgaacctgccgtccctgaaggccactgtgacccgtaagccggaggtcgaagagatcccggtgcaggtcaacatccagtacgtggtcgaattctacgcccgctgatccgggccctctggtcaacaaatccaggacataccgctcgaaccccgcgcttctttcgagaagccgcggggttcctgcgttgtagggcgattactggccgcacaccgcctgacgaatcatcgtcgcgtacgcataggcaccggtcatattcggatgaatgccgtcatcgttgaggtattcgctatgaccttcgctatacccatgccaatcgatgatgcccacgttcttgttcttcttggcggcctcacgcagcatcgtattgttgttgttctcctgccacgggtatggcatacggatggtgatgaagtatgtcggcttgccgccggtcaggtcaatgagctgttgcacttcctgctcattcgaaatcacgccgttcgtgccgaggccaaacaccaccacactgccactgtggccggcagcggtgtcctgctgatacacatccaccgcctgcggcatctgacggttcggcaggccatcgataaaagcgttcgggaatgcggcctggatggcgtccgaagtacccgacgtcactgaatcgccgaccatcatcatatccgcgttgcagctttccgttaccggatcataggcgtacttcgaaatgtcaagattgtttggcaccttttccgcaatcggtttgatggtgggcggctgagaatccgaaccgttcttattcgcgtcagcggtattggtttcgccgttcgcggcattcgtggcagaagactcgggctcgggcttcgccggtttcttgaccggcttggcgggtgccgcgagttcggggcgcagctgaatggctcgcgcttgagcgatgccattccaatccaccggtgcccacgtcagcaccacaacggtcaccaatccgataaccgacatgacccacgcgcccgggcgcagctggtagccggctttcggcagcggcttggcatgttggctgcgaggcatctgcaccgatttacgggccgcctcgaccagctggtagaaggcttccgacgccgccaacaccacgatggcctcaagaacccaaccccaccacggcaacgcctgcgttcgtgtcgccgggttcatgaactgcagcagcggataatgcatgacgtacagcgagaacgatcgcgacccgatatagcgtaggggagcgcaacccagcacgcgcgaccagattgagtcattgttcacggcacaggccaaggcgcacaacgatatgaacgcggtaatcaggtacccgccttggtacatgtacgacagatacccgttggcgaaccagaatccggccagcagtgccgccaaagccgcggtgccaagaacattgcagacgatagtgagacgggcgcccgtcttgtcgccggcctgacgtccgatctgcactgtttgcgaagccgctccagcttccgcaacttccgtacctcgcgaggaaggcgcaatccagatagccaacagcgcgccggcggccagctcggcgagacgagtatcggtaccgtaatacacgcgggaggtattggccgggtcaaacagcagcaccatggcggcggtggaagcagccatgatgacaagaatcgccatggagcgcacccatttggacttggtgattttgccgagcaccaccatcagcaacggccaaatcagatagaactgcatcgtcacgcccaagaaccacagatgggtcagaggagaaggcaatccggccgcctcgaaatacggcaccttgcggaagatgtacacccaattgctggcgaacaaggcgctcggcagcgaatcggaaaccactttctgcaacaggctgggagcgaacatccaagtgagccaaggcaccacggcaatggtcgccagcatcaccggccataaacgagtaatgcggcggatcagatatcggccatatccaaaggacccggtgcggtccaccatgttcagtactgaacgtgtggcaagaaaaccggtgataacgaaaaacatcgtcacgccaatgaatccgccctgcaatagcgacgggcgggtgtggaatgctatgactccaagaatcgccagagcgcgcagtccatcgatacccctgaaatgggcaggctcagacgattgagatggtgcaggtttcgaggttatgctcatagtaccctaagtgtactctcaggaatcgtcaggtatactacccggattacgcatatctcaggtagtgacctatgccgttatgacttatgacttccggcagcccgcaccgaaaccgccggaatggtgacataatcggaaccatgattcttcatctgcatttggtccgtcacggacagacctatttcaaccgatacaaccgtctgcagggatggtcgaattcgccgctgaccgagtcgggcgtcgctgatgccgtcaaggccggtgagcgactgaaaggattgacgttcaccgccgcctactgttcggacaccacgcgtgcccggcagacggccgagaaaattctcgacatcaacgaagccgcgggtaacccgcgccccgcactcgtgacggacatgcacttccgcgagcagttctacggctactacgagggacttgacatggccatggcctggtacgccgcgggagcgcctcacggcgccaaaacctacaaccaaatcgtcgagaagttcgggttgggggcctcgcgtgattttctcaaggaagccgatcccttccacgatgcggaatccgatgaggaatattggacgcgcgtcgaaggcgcgttccgtcttatcgccgacaacccgaatctcaaggatggcgacgatgtgctgcagatttcgcatggcaacacactgcttagcctcggccaccggttcggcggccctgacctcgatctgaacgaacgcccggccaatggttcggtaaccgtgctcgacttcgacaccgacaagccgttcggcgaggccgtgaccatcgtttcgtacggcaagtagcaaatagcaagcaatacatatcgaatagcacgtacggtccacggcggcacgccgcaaacgaaagcgtcagcaggacacctttcgcctatagtcgcatgcatccacgcgcacggttttcgccctgcgcgtgcaatggtatgccaagaaatagggaaggagtgctacccttaggcgagtaagtgtgaccgcaaggaggaaacaatgggagtcggagagatcgctggcctgatcgcggccatcgcgttcgcagtattggccggtttcatgatctatccgctgatcaggctgggcaagatgtttgatcagatatcgcagacggtccgggagtccggcgaacacgccatccccgcgctggacgaaggcgtgaccaccgtcaagcaggtcaacaagtcgcttgaagacgtgaacaagatttccgccgcggcttccaccaccgccaacaacgttggtgcgttgactgatctgtatggctctttcctcggtaagcccatcatcaagatcgcttccaccttctacgcgctgaaaaccacgggtcagtccttccttgcgaagaacgccgcgaaaaccaccgtcaacgacaccgccgagaagggggagtgatgttcaaacgcatcttctgggtcggcgtcggcgtggccatcggaatcgttgccgtcaccaaggcacaggcctatgtcaaggccaatacgcctgatgcggcacgccagttcctgcttggccccgatcaggacaatgtgccgatgaaaacactcgaagggttggtcaacgagttcaatgccacccgtcgagcccgcgaggctgagctcaaccgtcagtacatcgagcgcgccaactgacacgcgcatgccgccttgccatctagtcactgaaccagctagaacaaactagtcctcataatccagtctttttccaccaataccaggcgcaactgcgcccattacccaaacaaggagttcatccgctcatgcgcactgcggacatcgcaaagcgatacctcgattactttgccaaacatgatcatctcgtcatgccttcggcatccctgatttccccgaaccccaccacgctgttcaccatcgccggcatggtgccgttcattccctaccttcttggtgagcagaccccgccgaagcgccgcatgacatcgaaccagaagtgcgttcgtacgctggatatcgatgaggtcggcaagaccacccgccatggcaccttcttccagatgcttggcaacttctccatcggcgactacttcaaggaagaggccatccactacgcctgggagctgctgaccaccccgcagagcgagggcggttacggctttgacccggaaaagctgtgggtcaccacctttaccgacgatgaagaggcccgttccatctggaagaacgagggcttcgatcccgagcacatgcagattttcggcatggaagacaacttctggaccaccggtggccctggccctggtggcccctgctccgagatctacgtggaccgcggccccgaatacggtcgtgatggcggtcccgcggccgatgagacgcgcttcatcgagatctgggacctcgtgttcgagaactacgaggtcgacaacgtcaagtccaagaccgacctgcacatcgtcggcgagcttgcccagaagaacatcgataccggtgccggtctggaacgcttggcctacctgatgcagggcaagcagaacatctacgagaccgatgaggtcttcccggtcatcgaggccgccgagcgcttgtccggccgcaagtacggcgaggacgaggccgcggatgtcaagttccgtgtcgtggccgatcacgtgcgttccgcgctgatgattatgtccgatggcgtgcgcccgtccaacgtcggccgcggctacgtgctgcgtcgcctgctgcgtcgcaccgtgcaggccatgcgtgtactcggtgtgaccgatccggtgattcccgagctgctgcctgtctccaaggaggccatggtcgccagctacccggagcttaacgacaccttccacgatgtctccgaagcggcctacggcgaggaagatgcgttccgtcgtacgctggagaacggcatcgagattctcgacgtggctgtcaagaaggccaagaagaccgccgacccggtggtctccggctctgatgcgttcactctgcacgacacttacggcttcccgattgagctgaccctcgaaatggccgccgatcagggcgtgaaggtggacgaggccaagttccgcgaactcatggccgagcagaagtcccgcgcccgcgccgacgccctcaagaagcgtcacaacgtggatctttccgtttacgacgacttcaagaagacgctcgtcagcccgatcgacttcctcggctacacggatatgtccgcccgcgccaaggtcatcggcatcatgcaggaaggcaagggctccgtgcccgccgtcaccggcccggccaacgtcgaagtcattctcgaccgtaccccgttctatgcggaggccggcggccagcttgccgatcagggcgagatcctgtccgacgacggtgcagtgctcgaagtcgacgacgtgcagaagcccatcaaggacctcatcgtccaccagtgccgtctgaccgaaggcacgctggtcgtcggcgccgaagtcaacgccaacatcgacctggcccgccgtggcgccatcgcccgctcgcacaccgccacgcacatggtgcacaaggcgctgcgtgaggagctcggcccgcaggccacccagcgcggctccgaggacgccccgaaccgtctgcgcttcgacttccagtggtccaaggccccggccaagtccgtgatctccgcagtcgaggagcgcgtcaacgacaagctgcgcgacaacctcgccgtgaccaccaaggaaatgaagttcgacgacgccatcgccctcggtgccatgcacctgttcggcgagaagtacggcgacatcgtacgcgtggtctccatcggcgaagacggctggagccgcgagctgtgtggtggtacccacgtggaccacgtcggcaagatcggcatggtcaacatcctgtccgaagcctccatcggctccggcgtgcgtcgtgtcgacgccgtcgtgggccagggtgcctatgacttcaacgctcgtgagcacgcgttggtctcccagctgtccgacaagctcaacgctcgcccggacgagctcgccgagcgtgtgaacgccctgctcgccaagctcaaggaatccgatcgtcgcttggcctccatgtacgagtcccagctggccgcctcggttccggcgctggttgctgacaccaagaactccgcggccccggtcaaggtggccgtcaagaacgtgggccacttcggcgcggtcgacgccctgcgcaagaccgtactcgacgtgcgcgcccagctcggtgaagacgcccccgtggtggtggccctcgccggcgtgaacgaggatgacaagccgatggtcgccgtggccaccaacgaggccgcccgcaaggtcggcatcaaggccggtgatctggtgcgtggcgcagccaaggtcctcggcggcggtggcggcggcaagccggacttcgcccagggtggcggtgtcgatgcctccaagatcgacgaggccctcgaagcgctcgagcacgaggcgcagaaagcctgattccgccagtggtgtggttaggtgttgatttgggtaatgcccgggtcggactggcactgtccgacccggagcttacctttgcacaccctgctggcaacattcatgttgccggcgactatttctttgctattgacgaggtcctgaacgtcatcgaagacgaacatgtggaccatgtaatcgtcggactgcccctgcagatggacggtacagaaggcaaaagcgccaaaaaagcgcgcaggtgggcggccaatctggagaagaggctgcaagcagagagtgaagacagtgattctacggagtatcagattccgcaggtgtcattgatagatgagagattgacaacagtcagtgcgcatcgtcaactgttcgaggcccataaagcttcgaacaagcacaggccggtggttgaccagcagtcggcagtggtgattttgcagacggcactcgaccgtacccgggagcagtgaggtatcggttatgaccgatgattttaacgagttctttgatgacaacacgcattgggtcgaacaggggtcagaaccaatgcgcgggaccgagccgccagaaccgccgaaatcccgcaaggagatgcgcaagcgacgtgcacagcgcaagcgcaagcgcgtcagtggcattatcatcgctatcgccatcgtcgccctgcttatcggcggcggctatttcggcgtaaccaagctcatcgcatggcgcgacagccggagcaaccagtcgacggccatcgcggactatcggggaccgggctatggcgaggtcgaattcaccgtgagcgagggccaaggcgcggcggagatcgccgataatctgctcaaggccgaagtcatcaagtctactgccgcgttcaccagcgtggtcaacgccaatagcgcgacactctatccgggaacgttcacattgaagaagcatatggccgcatccgatgtgatcgccgttctctccgacaccaaccaggcggcgggcttccttgaggttcatcccggtgaacgtgccaccgatgtgttcgccgacgccgcgaagctttccggcatttcccaaagcgaattcgacacgattatcaagaacaagggtaaggatattctgcccaatgaagcgggcggtagctttgagggatggctggagccgggaacctacaacgtcaagagcatgaagagcgcttcggaaatcctcaaggccatggtcgataagcgtatcgccaagttggatgaattgggcgtgccgaccggcagtgaccgcgaacgggtgatgatcatcgcctctatcgccgaggccgaggtcaacaaagccgattactacggcaaagtgacgcgagtcatcgagaaccgtttggagcagggcatgtcgttgggcatggattccaccgtggcctatggcaataacgtcaagcccgcgcaggtgaccaccgagatgacccaagacgagtccaacccgtacaacacgtacaagatctccggcctgccgcctacgccgatcagcaatcccggcgatagcgccattcaagcggcactgcaccccgaaagcggcaattggctgtacttctgcacggtcaatctggacaccggcgaaaccaagttcgccgcaaccgccgatgaacatgaccagaacgtggccgaactacgcaagtggcaagccgaaaaccagtagtcacctcattggctcccctcgccgaggggagctgtccgcaaagcggactgaggggagtaatacgggattaagccccaaccaccaccgccacaatcgcgcccgccaatatcaccggcacatacggcaccttgcccgcatgtgccggtgatgtgcgttgtgggtcgaatcgcgtccacagggcaatccatgtgatgccggcaacgcccatcgccagccaccagaccaccacaggcaacaggccaaacagtccgacagacaatcccataggtatcaaggcggtcacatcgccgaatcccaatgaccgcggcaccagcaacgccaacgcgaactggatcaggcaacatagcacggtgaacaacagcgcctgcaacagcacgaacaggtcgttcgccaccactccatgcgcgaaatcggcggccaactggattaacgcgcccacggccacccatgcgatcggcacccgccgatgacgaacatcctcaatggacagtgcaagcccacatagcagaccgggtagcgtgaacaggtatggcatggcttaacattaacccctagttagacgtacacatagacgtacacacatgaaacgagggaagttatgctgcgttggcagacggcaggggagtcgcacggagaagcattggtggccatgattgaagggttgccggccggcgtgcgcattagcacggacgatatcgtttccgcactggcacgccgtcgacttggatatggccgtggtgcccgcatgaagttcgagcaagacaaggtccgtctgctgaccggtgtacgccacggcctgaccctcggctcgccggtggccatcgaaatcgccaacaccgaatggccgaagtggaccgaggtcatgagcgccgatgcactcgaccatgacctgccgcgcgaaggccgcaatgcgccgctgagccgcccgcgcccgggccacgccgatctgaccggcatgcgcaagtatggttttgacgacgcccgcccggtactggagcgctccagcgcccgtgagaccgcctcccgtgtggccttgggcgaggtggccaagcagttcctggatcaggcgttcggcattcgcaccgtagcccacgtggtggcgctcggtggcgtgcagaccaaccctgatttgccgttgcccacacctgacgatctggaagcgttggatgcctctcccgtgcgtacgttggataaagaggccgaggcccgcatcatcgaacgcatcaacgaggccaagaaggccgccgacacgttgggcggcgtgattgaagtgctggcttacggcgtgcctgccggcatcggcacctacgtggaatccgaccgtcgtctggacgcggctctggcctccgcgattatgggcattcaggcgttcaagggtgtggagatcggcgacggcttcctggaagcctcccgccccggttcgcaggcgcacgatgagatcgtggtcaacgccgacggccgcatcgaccgtctgtccaaccgcgcaggcggcattgaaggcggtatgtccaatggccaggtgattcgcgtacgcggtgccatgaagccgattccgtccatccccaaggccctgcgtacggtcgacgtgctgaccggcgaatccgcacaagccatcaaccagcgttccgacagcaccgccgtgcctgcggcatccgtggtggccgaggccatggtgcgtctgactttggcgaagtacgcgctggataagttcggtggagacagtgttgccgaaacacggcgcaaccttgagtcgtatctcgcctcgtggccggagcacatgcgctgaacgaagtggagtatggttccgagacgactgccgcggaaccatcagcaactgtacccaccaatcgtcgagaggattcgtagattatgaccgcacgcccccgcgccgtcatcatcggcatgatgggagccggcaaaacacgtgtcggtaaggaagtggcgcatatgttgcgtctgccgttcgccgatgccgatgtggagatcgaacgtgaagtgggcatgaagattcccgcctacttcgatgaatacggtgagccggcattccgcgaggtcgaggccgatctcatcgccgatatgcttgaggatttcgacggtatcttttcgctgggcggtggcgctcccatgacgccatccacccagcatgccctcgcctcatacatcgaccatggcggtcgtgtggtctaccttgacgccgatccggcggaggccatggaacgcgcgaaccgcgggggaggccggcccatgctcaatggcaatgccaactcccgttggaagaaactgttcaagcagcgtgacccggtattccgcgaggtcgccaacgttcatgtccatacccgggggcttacgcctcagggcgcagcgaagaaagtgattgatatggtatctgagcgagcagtgcatgttaccggatcggcaattgagccgtatgatgtggtcattggcgaaggtgccatgaatcatctggtcgacgtgctgggacccaagcccgccaaaatcgcgcttatccatacccagccggtgcagcgacactccgatcgtgcccgcgccctgttgcgtcagggcggctatgaggtttccgacatcgtgattccggatgccgaacccggcaagaccattaccgtggccaacggcatttgggaacgccttggcaacgaaggtttcacccgatccgatgccgtggtggggcttggcggcggtgccgcaaccgatttggccggtttcgtggctgccacgtggatgcgcggcgtgcgctatgtaaactgcccgacctcgctgctggccatggtcgatgcctccaccggtggcaaaaccggcatcaacaccccgcagggcaagaacctcgtcggctcgttctacacgcctgccggtgtgctggccgacaccaagacgctggctacgctgcccaatgacatcttcattgagggtctcggtgaagtcgccaaatccggtttcatccgcgaccccgaaatcctgcatatcctcgaagaccacgcagctgaactgcgcgctttcgacggctctacattcctcggctcgccgctcgaagacgtggttgccgagctcattgagcgcacggtaaaggtcaaggcctaccacgtctcctccgatttgaaggagaagggtctgcgtgaattcctcaactacgggcacacgatgggccatgccatcgaaaagctcgagcacttccgctggaggcatggcaatgcggtggccgtcggtatggtgtatgccgccgagctggcccatctgatcggttacatcgatcaggatctggttgactatcaccgttcgttgctcgcttcgctgggtctgccgacgtcgtggaatggcagctcgttcgacgacgtgctcgcattgatgcatcgcgacaagaaagcccgtggcaacgaactgcgtttcgtggtcctcgacgagattggtcacgtcgtacacctcgacaacccgcccgccgaagccgtagaagaagcattccgtcgtatccagcagtaattgaacggccgtaggccgtgccgttcgccatcccctcagaaaaagtacttggctcccctctaacgaaggtgccccggagtcggatttaccttctacctccctctgatgagggaggtgccccgaaggggcggagggagagaagcacaaacaaaaggagtcccaatgaccaaagtcattgttgtcaatggccctaacctcggacgtctcggcgtccgccagcccgacgtctacggtcgtcaagacctcgacaccctgcgcaagctctgcgccgaatggggcaaggacctcggcctcgaagtcgaggtgcgccagaccgacgacgaagccgaaatggtgcactggatgcaccaagccgccgacgagaaaaccccggtggtcatgaaccccgccgccttcacgcactattcgtatgctctcgccgacgccgcgcacatggtcattgatgagaacctgccacttatggaagtccatatttccaacccgtccgcccgcgacgagttccgcaagcgttccgtaatcagccctgtggccaccggcaccatcaccggcatgggtttctacggctacaagctcgcgctcgatgctgtggcgcacttgctgagcgaatagaaccaagccctccagccaatcccgggtatcagtcgacgttgagcccgggattcctgttccgacgaatcggaccagaatcctcgtcctggtacgccttatggacccgaagtacgccgtgtattcgaccatatgctggccaaggcagaacgagatgggctgcctacgcacgactacaccggccacgtcatgaacacgccgggtcatacacggatgatagagtgaaattccatggttagaagaacacatggtaattctcaagaacacgtcaccaagcatattttcgtcactggcggcgttgtctcctctctcggcaagggcctgaccgcatcttcgctcggtcgtttgctgcgcagccgcggtatccatgttctgcagcaaaagctcgatccgtacatcaacgtcgacccgggcaccatgaacccgttccagcatggtgaggtctacgtgaccgaagacggtgccgaaaccgatctcgacatcggccactacgagcgtttcctcgacgtcttcctgagccagaaggccaacgtcaccaccggtcagatctatcaggaagtgctgcgcaaggagcgcgccggcgaatacctcggccagtgcgtgcaggtcatcccgcacatcaccaacgaaatcaagtctcgtatgcgcgcccaggcttccgatgacgtggatgtgatcatcaccgaaatcggtggtaccgtcggcgacatcgagtcccagcccttccttgaggccgcccgcgaagtgcgtcgcgatctcggcccggacaactgcatgttcgtgcacgtttccctggtgccgtacatttccgccgcccacgagctcaagaccaagcccacccagcactccgtgatgatgctgcgtcaactcggcatctccccggacgccctcgtgttgcgttccgaccgcccgctcaaccagtccatcaaagacaagatctccctgatgtgcgacgtcgatgccgaaggtgtggtcaactgcgtggatgcgccgagcatctacgatgtaccgaagatcctgttcgaagagggccttgatgcttacgtggtgcgtgagctcggcctgccgttccacgatgtcgattgggatgaatgggcagacctgcttgagcgcgtccaccaccccaagcacgaggtcaacatcgccatcgtcggcaagtacatcgatctgccggacgcctacctgtctgtcaccgaggccatcaaggccggcggctttgccaactgggccaaggtcaacgtcaaatgggttgctgccgaccgttgcgaaaccactgaaggcgcggccgccgctctcgacaacgtcgacggcatcgtgatccccggcggctttggcattcgcggcatcgacggcaagatcggcgccctgaagttcgcccgtgaaaccaagctgcccgcccttggcctgtgccttggtctgcagtccatggtcatcgaatactcccgccacgtgctgggcattgaagacgcgaactcttccgagttcgagcccgattgcgccaacccggtgatcgccaccatggaagagcagaaggacatcgtggccggcaagggcgacatgggccacaccatgcgtcttggctcctacccggccgagctggaggaaggctcgctggtcgccgaactgtacggcaccacgcatgtcaccgagcgccaccgccaccgttacgaagtcaacgtggcctacaaggatcgtctgcgtgaaggcggcctgcgcatctccggccagagcccggacggcgagctcaccgagttcgtggaactgccgcaggacgtgcacccgttctatgtggccacccaggctcacccggagttcaagtctcgcccgaccaagccgcacccgctgttcgccggtctggtcaaggcggcgctcggccatcaggcggcacgctgaccgtggatcccgcgcggtcggtccgcgcacgatgaaggcgtgacggcacggcatctcaggatgcttcgccgccacgccttcgccgtttggcgccatccgtgatgccgcatggcccgatggcgcccgcatgtaatcaagcccacagccaatatgcgtcaggacagctagtgtttgcacttgggttctgctaggttttcataggattaagtgtgatacaaggaaggcaggatggtgaccgaaaacacagcaccaaacgccgccgctgacgtggagatgagccagtatgtggctgatcgtacccgcgtcaacgaggacaagatcaagaaggatgacgagatcatcagccagttcggcgactacaactatggttggcatgattctgatgccgccggcgaagccgcaaaacgaggcattgatgagaacgtcgtacgcgcgatcagcgccgacaaaggcgagccgcagtggatgctcgacatgcgtctgcgtggattcaaggcgttcctcgaaaagcccatgcccgattggggcgtggatctctccggcttcaacgccgacgacttcaagtactacgtcaagccgatcgagaagcaggcgaagtcgtgggaggagctgccggacgacatccgcaacacctacgatcgccttggcatcccggaggcggagaagaaccgcctcgtctccggcgtggctgcccagtacgagtccgaggtaatctacaactccattcgtgaggacctgaagaagcagggtgtgatcttcgtcgacacggacaccgctgtgcgcgaataccctgaactcgtcaagaagtacttcggcaccgtcgtgcccccggaggacaacaagttcggcgccctcaacaccgcggcatggtccggcggctcgttcgtatacgtgccgaagggcgtgcacgtggacatcccgttgcaggcatacttccgcatcaacaccccggccatgggtcagttcgaacgtacgctgatcatcgcggacgaaggctcctacgtgcactacgtggaaggctgcaccgccccgatctggtccgaggactcgctgcacgccgccatcgtcgagatcatcgtcgagaagcacgcccgcgtgcgctacaccaccgtgcagaactggtcgaacaacgtctacaacctcgtcacccagcgtgcctacgtgcgtgagggcggcacgatggagtgggtggacggcaacatcggttccaaggccaccatgaagtacccggcctgcatcctcgccgaaccgtacgccaaggcatccaccatgtccctcggcttcgccggcaagggccagtaccaggacacgggcgcgaagatgattcacctcgccccgcacaccagctccaccatcgtcgccaagtccatctcgcgcggcggcggccgctccgcctaccgcggtctggtcaaaatcgtcaagggcgcgtacggttcgtccaactcgaccgtgtgcgatgccctgctggtcgacgacttctcccgctccgatacctacccgcacgtcgacgttcgcgaagacgacgtctcgatggcccacgaagccaccgtttccaagatctccgaagaccagctcttctacctgatgagccgaggactcacggaagaagaggcgcgaggcatgatcgtgcgcggcttcgtcgaaccgatcagccgcgagctgccgatggaatacgcgcttgaactcaacagacttgtggaacttcagatggaaggatcggtgggctgattccgatgaccgacaacacaacacccgtcaaggaaatcaagattccggtcgccgaccccaacgacccgtacgcgattccggccgccatgccgtcctccgtggaccatgccgtgcgttcgttcaacgcaggcgactatccggagcccagccgcaagcaggacgaatggcgctacacgcctatcgagcgcatcaacgagttcttcaccgtgttcaagccttccggcgaaacgcagatcgaagtctccatgattgacggctcgccgttggccgaaggcgtgaagctcagccagatcaagctcggtgagggcctgtccggcactgtgtccaagcccaacgaccgcgtctccgcagtcgaatgggaatccggccacaccgcaaccattctggaactgtcaggtgagatcgcccagcccgtgctcgtcaaggtgcacggcgcgggggaggacctcgacgccttccatctggtgatcgccgccgccgacaaggctcatgcggacgtcgtcgtggaacacgacggtgacgcacgactggccgaaggcgtggaaatcaccaccggcaaggactcgcacgtctccaccacgttcgttcaggaatgggccaaaaccgccaagcatgtggccaaccaccgcatccacgtcggcgaaggcgcatccctgcgccactccgtcgtgaccttgggcggcgacatcgtccgcatccgcatggatcaggacttcggcggcgaacagggcgacctcaacatgctcggcatctacttcgtggaccccggcgagcacatcgagcaccgcacgatggtggtacacaaccaccccgactgcaagtcccgcgtggtctacaagggcgcgcttgacggcaagggcgcgcactccacttgggtgggcaacgcgctcatccagcccaccgcccccggcaccgactcctacgagctcaaccgcaacctggtcctgaccccgggtgccatcgccgattccgagccgaacctcgaaatcgaaaacggcaacatcatcggtgccggtcacgcctcttcggtgggccgcttcgacgacgaggaactgttctacctcgaatcccgcggcatccccgaaaccgacgcccgcaagctcgtggtgcgcggcttcttcggcgaactcgtcgaggagatcggcattcccgccatctccgaacatctgatgaccgtgattgaccgccgactggcccgtggcgaaaacgacgccatggcacaggtcctcgaagacaagtaagaacagcatttttaggagcacaacaatgtcaacactcgaaatcaaggacctgcacgtccacgtcgaaaccaaggaaggcatcaagccgatcctgaagggtgccaccctgaccgtccactccggcgaaacccatgccatcatgggccccaacggttccggcaagtccactctcgcctacacgttggccggccaccccaagtacgtggtcgactccggcgaggccctcctcgacggcaaggacatcctcaagatgactccggacgagcgcgccaaggccggcctgttcctggccatgcaatacccggtcgaagtgccgggcgtgtccatgaccaacttcttgcgcaccgccaagaccgaaatcgacggcgaggctcccggtattcgccagtgggccaaggacctgtccgcagccatgaagcgcctcaagatggacccgaagttcgcctcccgttccgtgaacgaaggcttctccggcggtgaaaagaagcgcgccgaagtgctgcagctcgaactgctgaagccgaagttcgccatccttgacgaaaccgactccggcttggacgtggacgccctgcgcatcgtgtccgaaggcgtgaaccgtgccaaggaagccaaccagttcggcatcctcatggtcacgcactacacccgtatcttgaagtacatcaagccggacatcgtgcacgtgttcgccgacggccacttcgtcaagaccggcggccctgagctggccgacgaactcgaagagaacggctacgaccagtacctgcccgaaggcgccgactccgagtccgcgctggcctgagtccgtgaccgtgggagtctgacatgccctattctcgacacgctccgggccactcaggccaagtctttacggtcgcgaacaggccatgtccgactcccactcgtttcgtacaattgttacgtaagtaggggaacataatggttgattttaaggagattcggggcgagttcccgattctggatcaggagattcacgggcatccgctcgtgtacctggattctgcggccacctcgcagaagccgaatgcggtgatcgacgccgaggcgaacttctaccgtacgatcaacgccggcgtgcaccgcggtgcccacgagctggcggcccgtagtaccatggctttcgaagaggcccgtgccaaggtcgccaagctggtcggcgcgaatgcagcggaaggcgaagaagagatcgtcgccaccggtggtgccacggccggactgaacctgctcgccaccgcgttcggcaatgcgtcgctgggccgtgggggagaagccgccaagcgttttgccctgaagccgggcgatgagatcgtcgtctcgcgcgcggaacatcattcggtgctgctgccgttccaggagctggcctaccgtaccggtgccaccttcaagtggatcgacctgaccgaggacggtcgcgttcgcacggacaacctcgacgaagtcatcaccgaacgcaccaaggtcgtggccgtcacccacgtgggcaacaccacgggtgccatcaccaacatcgcccctatcatcaagcgtgcgcatgaagtaggttcgatcttcatcttggacgcttgccagtccgtaccgcacctcaaagtcgatttccatgcgcttgatgtggacttcgctgcctggagcgcgcacaagatgtacggtcctaccggcgtcggtttcctgtacggtaagcgcgaactgctcgaagccctgccgccggccaacttcggcggctccatggtcgagctcgcctacatggaccacgaggcccaatacatggcccctccggcccgcttcgaggccggcacccagccggtcgcccaagtggtggccgcaggcgtcgccgccgaatggatgatgaacatcgggctcgagaacatcgaggcccatgagaagaccatcgccgccgaactgctgaagctcggcgacatcgatggcattcgcatcctcggaccgcgcgaaaacgtggaccgcatcggtaccgtggcgttcgacgtggccggcgtgcacccgcacgatgtgggccagttcatcgacgcccagggcatcgcgattcgcgtgggacaccactgcgcccagccggtgcaccgccacttcggcctatacgcatccaaccgtgcctcctccggtgtctacaattcggtcgaagatgcccaagcattggtcgaagcggccaagggcatccgtaagttctttggagtggagtaaaacagaacaccatgaacgaattcggtatgagcggggatgacctcgaacagatgtaccaagaggtcatcctcgaggcgtcaaaacatccgcatggcaaggaatcctttgcgcccaacgcggcggtcgaacagtccgcggacgcggcggccaatgtcaccgtgcaagccagccacgaatactgcacgcccggtgaatcgcaccagttcaacccgacctgcggcgacgaggcgaccatccatgtcgaagtctccgatgacgaaccgcacaccatcaagcgattggtgtgggacggccacggctgctctatttcgcaggccagcctgtcggtgatggtcgatctggtggacggcaaaaccgtggacgaggccatggatctggaacagacattccacaagctgatggaatcgcgcggtgccggtctggacgacgagaacctggaagaaaagctcggcgacgccgtggtattccaaggcgtgtcgaaataccctatgcgcatcaaatgcgctctgctaggctgggaagggctgaaggactccatcgccaaagccctcgctgcaaagaactgaggaaatatgtccaacgataatttggtccccgaaccacagccgtccgttttcgatgccgtcaacggcgtcctgcaggacgaggaggccgctcgccgcgtgatggccaacccggccttggccaagggcttcccgaacggacgcccgatcgagcactctgctgcgtccggcgatgacacctgtgcgtgtggcggtcaccatggcaaatgcggttgccgggatgacgaacagtccgatggcagcgagattccgatcaaggcgattgacgatatcggccgcgccactgccgaagacgtgcgcgaggcactgcatcaggtgattgatccggagcttggcatcgacgtgatcgatttgggtctggtctacggcattgagatcgatgagctaggccgcgccattattacgatgacgctgaccacgccggcctgcccgctgaccgaccttatcgaggacgaatgcgcatccacgctggccggtctggtcgaggagttccgcatcgactggacgtgggacccgcgctggaccatggagcgcatcacgcccgaaggccgcgaccagctcgccgcccttggcttcaacttcgacaacatgccaaagtactgatagcgcttagtaagctccctctgatgagggagctctatacgagaaaagccccgcatgatgcggggcttttccaagtctggactggtcaatcagtcatcgacgatggtgttcttcgggacaaccgtaatgccgtccggcgtgacggtgaagccacgggccagatcgtgctcggtatcgatgccgacagtggagttttcggtcaggaccacgttcttgtcgagaatcgccttgtacacgcgggcgcggcggttgatgatcacaccgtcgaacagcacggaatcgacgatctgtgcccacgagtggatacgcacattgggggagagcacggagtggtgcacttcaccgccggagacgatcacaccgggggagacgatcgaatcggtggcgtggcccagacggtcgcggccggcgtgcacgaacttggccggcggcaggttgccggacatcgtgtaaatcggccaatcctggttgtacaggttgaactcgggcacataggcgatcagatccatgtgcgcatcgtagaactgcttaatcgtaccgacgtcgcgccagtaagcgtgatcagtgaccgtggaacccggaatctcgttcgagttgaagtcgtagacgccggcctcgttgcgggaagcgaagtacggggcgatgtcgccgcccatgtcatgcttggtgtcggcagccttctcatcgagagccagagcctcgaacagggccttggtgttggcaacgtagttacccatggaagccagaatctggttcggattgtccggcagaccggtggtggtggccggcttctcctggaagttcctgatcatgttcgggtgatcgggatcgacctcaattacaccgaactggttcgattcctcgatgggctggcggataccggccacggtgaactcggcgccggactcgatgtgctgctgtaccatctgctcgaagtccatgcggtagacgtgatcggcgcccacgatcaccacgatgtccggctggacgtcctcgatgatgttgatggtctggtagatggcgtcggcggagccgaggtaccagtgcttgccgagacgctgctgcgcgggcacaggggagacgtacgagccaagcagcggggagaaacgccagacctgggagatgtggcggtcaagcgagtgagacttgtactgggtgagcaccacgacctgacggtacccggagttcaccagattgctcaacgggaaatcgatcagacgatacacaccaccgaagggaacggcgggcttcgcgcgatcgcgggttaacggcatcaggcgggtcccctcaccacctgcaagcacaatcgacagaatcttgggattcttggccatcgtaactgtcctctctgttactgagcgtctttcgacaccgcactgctgggccggatgcttccttgcattcggtttacatagttaataattgcagaaaaattcgaacatgcaaggctttcccccccgcgtgccgtgaacttgcgatgaacagtttcgtagatttgtttaaggatccggccttttcggagcgcgtgcgattccttagcgtgtcgcgtagaacgccactgcgctggatgccgccacgttcagactatccacgccgtggctcatcggaatcttcacggtcaaatcggcgcgggcaatcgtatggtgggacaggccgtcgccctcggtgccgaagatcagcgcgagcttgtcgatatgcgtcggatcttcgtcaggcgcgtgcagacggcgtgtcagttcgtccaacgaaatcgaacgatcctccaatgccatggccacggtggtgaagcccagcgacttcaactcgtcgatgccctggaacggccagtaatgcttgttttcggtaccgtcgtcgttgaacccggtgatacgggtccacggaatctggaatacggtgcccatcgacacacgagcggctcgtcggtacagcggatcaccgcaggagggtgtgaccagcacggcatccacatcgagcgcggccgccgaacgcatcagtgcgcccacattggtgtggtccacgatgttttccattactgccacgcggcgggcgctcctgcagacctcggctacggagggcagcggccagcgtcgcatcgcgcatagggcgccgcgatgcagacgatagccggtcagtcgcttgagctgctcaggtgaggccacgtagacgggaatatccgcgccccagcgcccgtcgatgaagtcgaaggtgtctttcatgccctccagccaaggttcctcgaccagcagtgacagcggttcgcggtcagcggccagcgcgcggtcgatgactttgggggactcggcgatgaacacgcccttggctggttccaagcgattgcgcaactgcatttcggtgaggctcacatacgcttcgacgcgcgggtcgtcaacggtgtccagcgtgatgaactgcattggtggcctttcgtgtgtgcagataacgaaaaaccccttgcaatgcaaggggtttatctgtgcccgagacgggacttgaacccgtacgcccgtataaaataggcactagcacctcaagctagcgcgtctaccattccgccacccgggcaggtgtcgtttggacaacgagtaaatagcttagcatgaaattacagggatgcaattcgcgcgtgtgcccggcgtgtcgcgtgtagccttgaagtcatgactgatgccctttttcttttcgacccgcaggtcgacgatgtcccggtgaacagcgacgaacttcacgccggctggaagctaaccctgcccgcgcacatcaagcgccatgctgtgcaggccatgcgactcaaggcgggggacagcctgcaactttccgacggcaacggcttgagaatccaggcagtgatggccgatcctgaagccggacttgctgaagttgtggaagtggggcgcgaacccgagccgctcacccgtttggcgctgattcaggcattggcgaaaaccggccatgatgagcaggccatcgatatggctacgcagattggcgtcgaccaagtggtgccatggcaggcggaccgatccattgccaagtggaaggtcggccgtacggacaagaagtggaattcggtactggatgccgccaccgagcagtcgcggcgcgcttttaagccgcaactggaggcgtgcgcgtccagcaaggaggtcgtggccatctgccgcagggcctgcgtgcatggcgatgtggtgattgtgctgcatcaggatgctaccgatacgtggtccggcgtggaggagaaggttacgcagttggtggaacgcacgctccaggacggccggccgcggactgtcagtgtggtggtcgggcctgagggcggcatcagtgagcaggaggtagctgatttcgtcaaggccggagcggtgagctgcgtactggggcacaatattctgagagccgcgacggccggtcctgtagcgttgtcgctgttgtctcgggtgttgggacgttacgagtaacgcccacgcgctaagctggtgcgtagcaacatcaaaccaaggagcatgatgagcgaatccgacgattgcctgttctgcaagatcatcgcagggcagattcccagcagcaaggtctacgaggacgagacgacctacgcattcaacgacatcaaccccaaggccaaggtccacgtgctcgtggtgcccaagaagcactacgccaacgtcgccgaacttgccgccgacgacccgaccgagctggcccacatcgtctccatcgcgcagaacatcgccgacaaggaatttcacggcgcctaccgactggtgttcaacaccggtctcgacgccggccagaccgtcttccacgtgcacgcgcacgtgatgaccggcgaaaagctcgacgagtagtaggggaatatccgcttcgtggcaacgactacacgtaccatcaccatcccgccccaacttgaccccgtcgccgtgctcggcccggttgacgaggtcattcgcgaggtggagcgcgcctttccggacctgacgattatcgtgcgcggcaaccgcgtggcgatcgtctcccgctccaagcagaccgaagcccaggccgcacaggccgaggatttggtcaacaccatcatccaagccgcctacaccgcgcctatggacgccgacaccgtgcgtcgcatgctcgaccagaacgtgctcaagaaccacgtgcgcctcgaacatccaggtcacggcccggtgcatgacaaactggcgcaatcgacctcaaacgaacgcgcccatgcacgttctgccggctcccacgacccgacgtaccgcaagcccacggttcccggcgtcatcacctttgccgccggcgtgccggtccgtgcgaaaaccgccggacaagtggcctacgtgaacgccatcgaatcgcacaccatcaccttcggcattggtcccgcaggcaccggcaagacgtatctggccgtggccaaggctgtgcgtgccttccaggacaagcagattcgccgcatcatccttacgcgcccggccgtggaggccggcgaaagcctcggctttctgcccggcacgctgaacgacaaggttgacccgtatctgcgcccgctgtacgacgcgcttggcgacatgctcggcgccgaccagctcaagcggtacatggacgacggctccatcgaagtggcgccgctcgcctacatgcgcggccgtacgctgaacgacgcgttcgtgatcctcgacgaggctcagaacaccaccgaacagcagatgaagatgttcctgacccgtctgggcttcaacaccacgatggtcatcaccggcgatatctcgcaggtggacctgaccgtgccgcgctcgggactggccaccatcgaacgcatcctgggcggcatcaacgacatcgcattcgtgcatctcaaaaccgaggacgtggtacgtcaccagctggtcggccagatcgtggccgcctacgaccgtcactccgccatcgccggcgaccaccgcgacatcgaacgcaagggccgccgcaaccataccgacttcgatgcccgccagcaaacggattcaaccaaccaaagtgagacagacgatgagcgttgacgtcaccaatgaaacccagtgggtcatcgaccccaaggtcttctccgatttgggtatttgggtactcgaccagatgcgcgtgagcacccagtccgacctgaccatcatgttcgtggatcccgatcccatcgccgaattgcacatgcgttggatgaacctcgaaggtccgaccgacgtgatgagcttcccgatggacgagctgcgcccaggcgacggcaaaaccgtgatggaaggagtgctcggcgacatcgtcatctgcccgtgggtcgctgcccaacaggctgccgcagccgggcacagcaccatgcaggagatgctattgctcaccatccacggcatcctgcacctgctcggctacgaccacgtgacccccgagcaggagcgccagatgttcggcctgcagcgacagctgctgctcaccttcttcgccctgcgccacgatgccaacgtgcaggccacgctgcccgccggcacacccgacgcgctggccctgtacgacgccgcgcacggtgctggccgcgacctcgattccaaataaacttccaaatcaatcacaccaaattcggattattctataccgttcaaggacattcaaggacaccgaaaaaacattatggagtattccagtaccacgctgatcgccgtcaccgtcattctcgtacttgtggcggccctgttcgtctggctttcgctgaccatggccgccgctgaaggcgccgtggcccgcgtaacgcgagccagcctcaacaatctcatcctcgaggtgcagaccgactccgaagcaagccagttcctcaagatgaagaagatcgacaagattcatcgcgtgcaacggctcatcgccgaccgttacgccaccgccggcagctgtgcgttcttccgcatcgcctgcaatgtgctcgacggcgtactggtgtcttccatcgcatccctgtggggtgcggaactgtgggttgaactgctcgccggattcctgttcgcgattatcgtagccgtggtctccgtactggtccgcccgcgcaccgccggcatgaccaagccggtcgacatcatgatttccaactcgcgcatcgtgtcgttggccaccaagctcacgccgttcgcacgcatcggtggcgacaagtccggttccaaggggtcgggccgtcgctccaaggactccgatctgtccgacgacgaggagcttgagaagattcagctcgagcagggcaaggccgccatcgaccgactggtggagtccaacgacttcgatccggaagtctccgaaatgttgcgcaacgtgctcaccctgtctgatacgttgactcgcgagatcatggtgccgcgcaccgatatgatctgcatggagcgcgactccacactgtcttccgcgctgaaactgttctcccgctccggtttctcccgcgtgccggtgatcggtgaggatgtggatgacctgatcggcgtggcctatttgaaggacgccgtgcgcgccaccgccttcaacccggcggccatggagcgcacggtcgaatccatcgtccggcagccgctgcttgttcccgaatccaagccggtggacgacctgttccatgagatgcagcgttcccgccaacatgtggccgtggtggtcgatgagtatggcggcatcgccggcatggtgactatcgaggatgccatcgaacagatcgtcggcgagctggaagacgagcacgaccgcacccagcgtaccgagccggagaaaatcggcgacaacaagtggaagatgcccgcccgtacgccgattgccgatctggaggagatcttcgagatcgacattgatgaggacgatgtcgataccgtgtacggcctgctgaccaagattctgggccgcgtgccgattgtcggtgcttcggccgtgacgcgcggtctgcgactgaccgccgtggactccgccggacgccgcaagaaggtgtccaccatcgtcgtcgaaccggcgcacgtcgagggcggcgaggaaaatagcaggacccatgaggaaactgacggcgagcccgtcgaaggcgatgataccgccagcaaggagtgatatgaccgaccagaacaacagcacgaacgacgtcgatgacattgacgtcaccgatgcttccgatgttgccggcgttgccgaagtcgacgcgaccggtgaaacggagaatgtgaccaagcaggacgtgccgtatcgctccggattcgtggccgtggtgggccgcccgaacgtcggcaaatccacgttgatcaacgcgttgatcggcaagcagatcgccatcgcatcctctcgcccggaaaccacccgtaaggcgattcgcggcatcctgaccgccgaccacgcgcagctcgtgctcgtggacacgcccggtatccaccgcccgcgtacgttgcttggccagcgtctgaacgacgtggtcgacgaatccttggccgatgtggacgtggtggccttcctgctgcccgccgaccaggaaatcggccccggcgacaagcgtattctttcccgactgcgtaccgacttcgccaccaagcgtgaggacggtacgttcaagtggcgcatcccgctgattgccatcgtcaccaagatcgacgagcttggccgtcagcaactcatcaacaagctcatcgaaatcaacgatttcgccgatttctcggacatcgtgccggtgagcgccctgaagcacgacaatctggctgaagtgaagaacgtgctcattgagcacacgcccgagggcccgcagatgtacccggacgatcagatcagcgaggagcgtccggaagacaccatcgccgaactcgtgcgcggtgcgttccttgagaccctggacgacgagctgccgcattcgctggccgtggtggtcgattccatcgactatccggaagacaacgagaccggtcagggctatgacggcaaggcgcaggtcaacgtgtccatttacgtggagcgtgactcacagaagccgatcatcatcggcaagggcgcctcgaacctcacctacgtcaagaagaagctacgcaccccggtcaaccgcatcgtcggccaaaaagccaagctcgacctccacgtcaaggtcgccaaaggctggcagtccgaccccaagcaactagaacgcctcggcttctaggaatcggccttcggccggttataacaaagggagattccaatggaatctcccttttgctgtactcgagtcctccttacttcttcttggtgtacatctgggtgttgaggagggtggagtagcgcttgatgaccttggggcgaatcaccttcatggaagcggtcatgaggccgttctcctgagtgaactcctcgggcaggatgatgaacttgcgtacggattcggcgcgggagactccctcgttggcccgatcgacccactgctgcacttcggcgcgcacggcggcgttccttgccgcgtcctcgagggacatgttctcgtcaagccccttggcggcgagccacgggcgcaacgacttctcgtccaacgtcaccagggcggagataaacgggcgtttgtcgcccagcaccaacgcctgggagacgatctcgcaacgctggatgacctcctcgatcgggccgggggagacgttcttgccgccggcggtgatgatcaggtccttcttgcgcccggtgatgtacaggaacccgtcgttgtcgatgcggcccagatcgccggtggcataccagccatcttcggtgaacgacagctcagtggcctcgtcgttcttgtgatagcgcgggaacacagcacgacccttgacctgaatttcgccgtcctcggcgatgcgcagggagaatccggggaatgcgatgcccacggaaccagcgtggaacggcgtacccagcgggttgaacgcgcacggtgcggtggtctcggtcagaccatagccctcgtatacaggcacacccgcgccacggaagaaagccagcagttccgggtcaagcggggcaccgccggccacaatccacttgacgcgaccgccgagcacttcgcgcagcgaagagtagacaatcggatcgaaggcagcgcggcgagtgcgggtcagtgcacctgccttgccattggcggagacttccttcatatagttctgcgcggccaccacggcggaggcgaacaccacgccctttggaccgtgtccggccttctgggacgcggcgttgtacaccttctccagcacgcgcggcaccacgatcatgagagtgggcttggccacctgcagatcgctgatcagcgtcttgatgccggtggcgatgtagatgcggacgttcgaggagacgacgatgtagttgatggcgcgggcgaaggaatgggcctgcggcaggaacagcaggatggtgttcctcttgtcgtgcagcagatcgggcatgtaggccggcagattcagcgcggtctggcagtagtgctcgtgggtcatctccacgcctttcggcgcggccgtggaaccggaggtgtacacgatggagcacaggtcggtcttcttgaccgaatcgatgcgctcgtccagctcctcgtccgagaccgtggtgccgtaggccttgatttcgtccaagccaccggtctcgatggtgatgatgtgctccagggacgggcactcttcgacggccccatccgccttcttacgcatgtccgtgtcctgcacgatcagcagtcgggcatcggagttgttgacgatattgcgaatctgctcggcggaatcggtgtcgtagatggtggccagcacaccgccgcacgccatgatcgccgcgtcggtcaggtcccagtcgtaggaagttcggcacatgaatgccacggcatcgcccttcttcaggccgtaatgaatcaggcccttggccacggcacgcacatcagccaggaactcgttggcggtgacggtcacccaatcgttgccggacttgtaggtgtacagcggctcatcgcccatgcgttcggcgcggtccgcatacaggtcgtagatggacgtaccttcgtccagcggtggattgccttcggtggaggtggtgagcaggccggtggcggggtcgatgtcggtgacggtcaggtggccgtcgtcccaatcgtcgctgtgaggcaaagcgatgttggtctcgaccggcacgtcggcgttagacaggtaatcgggctcgtccggggtgtcgtcgtggaccgggtggacgaagtcggatcccaacctgagcgccttacgggtgagattgatagtgtgctgcgtgaaggaattgataaccgacaagtcttgctcctgtaaacctttcagtgtcgtccagccatgaggcgaacgcttctcaaagttcaaattgtaatcgcccaaaccgaactcgtcaccttacgcaaccgtaggattctggcgggttaggggagtgcgtggcaaaatattgcacaggtcccgatattgttgagtaaccgtgagctacgaaacggtgattgtcgataattactgagcggttggttgctaatcgatgccgggtgattgttggacgacttccgagcaattcatctgcaatgcacatggacacattcgtatttctcactaatttcgggttcgtttctgtttcgattggcggaatctcaagtcatggcctttaccttccgactacactttctatgcggataaccatgtccattttgaagtagaacaagaaagggctctcatggcgcaaaacccagaagccaccgtggtgttcggcgttttgaatgaaacgtccgaaacggaatcccgcgtcgcgttgacgccggatatcgtcacccggctgaagaggagcggagtctcctcgattattgaagcaggtgccggcattgccgccgaatacaccgatgaggattacgaaaaggccggtgcgaaggtgaccagccgcgacgaggtgctcgccgaagccgacgcgctcggttttgtggaccgaccgtccgccgagaccgtggccaagctcagggccggccagtgggtcattggcatgctcggttccttcaccgatgccgattacatggccgcgctcgagaaggccggtctggtgggcatcgccatcgaaaagttgccccgtaagctttccagcgcccagtccatggatgagatgacctctcagaactccgtgatgggctacaaggcagccatcaccgccgccgatgcttacggttccttcctgccgatgatgaccaccgccgccggcacgattcgcccggccaaggcgctggtgctcggtgccggcatcgccggcctgcaggccattggtacgctgaagcgtctaggcgcggtcgtcaccgcgtacgacgtgcgtcccgcctcccagggcgaggtcgagtccctcggcgcgaagttccttgatctgggacttgacttctccaagggccagggcgagggcggttatgcccgcgcgttgagcgccgaagagcaggctcagcagcaggctgccgtcgatgagaaggccgccggctttgacatcatcatcaccaccgccaaggtcccgggccgcaagcccccggtgctgctcaccgcagccggcgtcaagggtctcaagcgtggtgccgtgatcgtggactgcgctgcatccgacctcggcggcaacgtcgagggctccgccgtcggcgagcagatcaccgagggcggcgtcaagctgatcggcgctccctacctggcctccggcgtctccatgaccgcatccaacctgctttcgcgcaacgtggccgacatcctcgtgcacttcgtgcgtgacggcaagctcggccaggatctcaccgaagaactcgacgacgcgctggtggttgccggtcgtgccgccgccccggcagctgctgccgatgccgagaagtccgagaagtaaggaagaaggaataccatgcctactctcgtcgtttccattaccctgttcgtcctcgcgctgctcatcggtatcgaggtcatcggcaaggtgcccgccaccctgcacacgccgcttatgtccggcgcgaactccatccacggcatcgtcatcgtcggcgttgtgatcgtggcagccgaagccaatagcccactggcctacgtgttcatcttcctggccgccgtgctgggcaccatgaacgtcgttggtggctacgtggtcaccgaccgcatgcttgagatgttcaagtccagcaagaacgagaagaagggggagtcgaagtaatgacctccgcaaccgttggcgccatcgacatcgtcgcatggttcgtctacctgttctccgccgtcctgttcgtggtcggcctgcacttcatgaactctccgaagaccgcccgcaagggtaaccagatctccgcgttcggcatggtcgtggccgtgctcatggcgttcatcgtgcttttcgccaagggcttcgtgaacattgtcgccgtggtggtgctggtcgtcggcatcctgatcggtgccgtggccggtgtcgtctccgccaagaaggtgaagatgaccgacatgccgcagctggtttccgtgttcaacaccgtgggtggtggcgctgccgcactcgtggccctgaacgacatcctgaccaaggaaggcaccccggacatcgtggtgctcatcaccgctggtctcggtatcctcatcggttctgtgaccttcaccggttcgctcatcgccgccggcaagctgcagggtatcaagtgggtcaagaagctgaacctgccgggcaagggcgtatggaacattctgttcgccgtgctgtccgtcgcttcgctggttatgctgtgcgtccagcccgaacagcgcctgctgtggtcgattctgaccaccgtgttcgccctgtgctacggcctggtgttcgtgattccgatcggcggcgctgatatgccagtggtgatctccgtgctcaacgcatgcaccggtactgctgtggccatgtccggtctggcgattgacaacgttgccctgatcgtggccggcgcactcgtcggttccgcaggtgtgaccctgtccatcctcatggctcaggccatgaaccgtccgctgctctccgtcttggccggtggcttcggcggtggtgctgacgccgccgctgctggcgacggtccggaaggcaccatgaaggagaccacgccggacgatctggccgttcagctcgtctacgcgcagaaggtcatcttcgtgcccggcttcggtctggctcaggctcaggcccagcgcgagctcgccgacctcggcgaactgctcaagggccatggcgtggaagtctcctacgccattcacccggtcgcaggccgtatgcctggtcacatgaacgtgctgctggccgaggccaacgtgccctacgaggagctcgtggatctcgatgagatcaacccgcagttcccgcaggccaacgtggctctggtcgtcggcgccaacgatgtgaccaacccggctgctcgccgtcctggcaccccggtttccggtatgccgattctcgacgtcgacaagtcccagaacgtcgtggtcatgaagcgtggccgcggcatgggctacgccggtatccagaacgaactctacttcgaggacaacacccagatgctgttcggtgacgcgaagaagagtctgcagtccgtcatcgccgccgtcaaggaactgctcgcgtaaccattcttggctcccctcacagaggggagccaagcttctatatctactacagcccaaacacccgcttaacaaagccgttaacgcgacgccaatagtggtccggatcggtgctggcgctcatcgtgtggtcggcgccgggaatcagcagcttctcgcggtcgatgctggcgcaggcgttgtaattgatgtccagatacttcgggttgacaaaagtatccgctccgccatgaatgaacatcatcggaatagtcgcgtgccgtaatgccttcacacaggaggcgtcctcaaaccggtatccagccttgcgtttagacacatgactggccactttgaccagcagcacggccaacgagtgcggcaaacggaacatcgcctcggcattatccgtaaactgcgagaccacggaactgtatccgcaatcggaaatcgcggcgacgacgttgcgggggagtcgcgcatcgccggccgccatcatcaccgtggcggcgcccatcgaattgccatgcaacagaatgcgtgcatccggatcagctgcggtgatcagcgaaacccagcccaacagatcgtcgctttccagcaatcccatacccacgtaacgcccttcgctcaactcatgggcgcgctgcgcgggtagcaggaccgtaaaaccgagttgcgaatagcgatgcgcccatttggccatttccgcgggctctccggtatagccatggcagcagatcgcgtatagatgcggctgtgggtcggaacaatccgggtccaacagccagccgtggagtttccatccatcatggctgcgcagcgtgaccgattgcttggcctcctcgaaccaccggccggcctcaagctgctcggacatgtcgaattcgatgcctttcggcgtctcctcgtgcggcatgttgaacatcgaacgtttggccttggtgtccagcgcgaacatgaacatgacgttggcggccgcggctgtgacgccggctcctgtggcggctatcgcggcaagtgccgcagccatgcccctgacaacgcgagtgtgtgcggcgatgacgtcatggccatcctcattgatgacgtcgtccgaacgagtcatatcaacctcccgatatggtactcaccatcgtacgttattatcgaaatcatccccaacttcgtgaaagaccgtacactgagtgtcgctgagcgtacggttttcacgaaatggcgaacgatttcgtgaaaaccgtatgatgagaacgggtaagcgtacgttcttcacaaagttagggattatttcgcggaaaccgtacgttgacgtagctgggacggcctatatgcagtgtcatcgaagcatcattacgcaaagtccggggttggcgtatacttgacaattgttgctttggcgagggaagtgtgcatgctgacacatgacacagattccgttatcgactcggcgtatttcactccttgtagggtgtctttcggcgcgtcgtggcgtctgagcgagacagtacgaaacgaagatacaaggagtatccattatggctaccaccattaagcttgagggcgaggcccgttccgagttcggcaagggcgttgctcgtcgtctgcgcgttgccaacaagattccggccaccatctacgccggcggcgaagagcccgccttcgtgaccttgccgatgcgcgagaccaccctggccctgcgtcacaccaacgccctgttcaccatcgccttcgacggcaacaccaagatggccgtcgtcaaggacgtgcagaagaacccggtcaagcgcatcatcgagcacatcgacttcctcgaggtcaaggccggcgagaagatcgacgtcgaggtgccggtgttcgtggaaggcaccccgaagggtgctgccgtggcgttcgtcgacattcaggagctcaaggtccgcgccgacgtcaccaacctgcccgagaagatcgtggtcagcgtcgaaggcctgaccgacggcaccaaggtgttcgccaaggatgtcgtcctgcctgagggcgtcgagctggacgtcgaggatccggaagagtccgtcgtcaccgtcgaggtgccggaggatgccaccgagtccaccaccgctccggaagctgctgccgccccggctgacgccgctgctgctccggccgccgacgccaagtgagtcggtcgcttcgatagcgaacaattcagaacataactgaaacgtggaagcccgcagccgttgagaacggtgtgggcttcttcgtttttcaccatgtgaactctgccacacgagtaacacatgggtgtgcaaaagtatgcaacagagttcgcgccacaagcgcacagcacacaccccatatggtggctttcgggccgccaaagtcaagaagaagtagctagtgatgactgaaaacacgcaccacgatccggcagcactcgacaagctcaccgaaccgttcaccgtactgccgaacgacaaccccgcatccgatgagaagcgccagtccctcatcgacaagccggctttcggccaggtgttctccgacaacatgacccacatgacttggaccaagggcgaaggctggtccgaccgccgcgtcgaaccgtacgcaccgctcaagatggacccgggtgcttccgtgctgcactacgcacaggagtgcttcgagggcctcaaggcttaccgtcatgccgacggctccacctggctgttccgcccggatgcgaacgccgagcgtttccagaactccgccaagcgtctgtacctgcctgagctgccgattgacgacttcctcggttccgtggccgcgctggtcaagcgcgacgccaactgggtgccgtcccgccgcgagtacacgctgtacatgcgtccgttcatgttcgcttccgagccgttcctcggcgtgcgcgccccgcaggaggtcgactactgcgtgatcgcctctccgtccggcccgtacttcccgggcggcgtcaagccggtgagcatctgggttgaagacaggtggttccgcaccggccctggcggcactggtttcgccaagtgcggcggcaactacgccgcctccctgctcggcgagtacaagggtgttgagaatggctgcgagcaggtgtgctttgtggacgccgccaccaagacctaccttgaagagctcggtggcatgaacatgatggccgtgcacaaggatggccacgtggagaccccgtccctgaccggcaacattctgccgggcgtgacccgtcgctctctgattcagctgctgcaggacaagggccacgacgtggtcgagaccatgatcgccctcgaccagctgctcgaggacatcaagtccggtgaagtcaccgaggtgttcgcttgcggtaccgccgccatcatcaccccgatcggtcgcttcaagtccgagaagttcgacgtcaccgtcgccgacggcggctccggcaagctcacctgcgaactgcgcgacgagctgctcggcatccagctcggcgaagtcgaggacccgcacaactggatgtggaaggtgtgctgaactagcaccttttgtttccgactaagaccccttagaatgtcaacaattccaaggggtcttggcgtattggaaatgttcttggctagagaggtacagatggatttagcaacatttcgcaacaaataatatgatttaggtcttctgcacgttgcgggggttggttatggttcatccagatgagaacaggagcaaacctatgagcaagatgagtgacatgacggaatactatgcttcagcctaccgtttgccgtcaggcttcgagcattgctcgaaactgaagccggtggcagaggcagcgacggcgttgcgtcggtggtgagacaagacatgagcttctggcgacgctgggggatgttcaatgtcagtaatggttcaaggtttggactgctgacgtcgctgagacagcttagcgtcgttaacgggtcaggttctggcgatcaaacgacggtaaaaaggggcttagcgtcgttagctgtacataagttggcacggcaacgacactggagcgcgtgatcgtcggtgccgtgccaaactttggccaacctccgacaaatgagaaggactaacgtcggtggctgctcaaagtttggcgcgctggcgacgctgtaagaaaaaaagtgtggagtcgaaccggcaatagcatttattcggtttgttctctagtccaattgcgtcaggcaaggcctgttgtaggctcgggtacgacgggctgtagcgccgaataaggatgaacgggaacagaacgaagacggactgagacgaaccgaagcggtaccagaggggagcggctcatgcaggtggtgttggagaacaacatcgtttttgtggtcatcgagtatttagcaatcctgtgttggggattgtcgggcggacttgccgccattcgcaagggctacgacatcttcaccatcatgctgtgcggatggcttaccgcactcggcggcggtcttgtgcgcgacgtgatactcggtgccctgccgccggtcggcatcaccgacaaaggctatgtgctcaccacgctgttttccggcattatcgtggtggtggcccacccggagatcaccaaactcaaatggacgatgactgtcatcgatgctctgggcctcggactattcgcagtcagcggcaccgcaaaagctctggcctacggttcctcaggcatgacagccgtattccttggcatgttcacagcactggccggcggcctcattcgtgacatcttcatcggcgatgtgccaatgattattcgagacaaacacctctatgccgtgccctcgttcatcggttgcattctgaccgtgcttgtatggcgtggtgtgcactacggttggttcgacatgtgctcggaaatgctgctcgacgtgctgatcgtcatcatcgtggtggcgctgcgcctgctctcggtcggcttcaacgtcaccttgcccggagccgtcgagcgtcatcgcgtctacctgcccagcgaaagccgatatctcaagcgcccggtcatccatccgcacgccgataccgtcgatcccggcgataccaccaaggacgaagaagacaagcctcaggatgattcaagaccgccttagggctaactgccttcaaagaggtacatttggccttctgcaaaatgacaactgctttcaaagaggtacctgaagcacgaaacgtcgagtacaagcgttgcaatgacggcgtttatacttgggctttctcggattcggtacctttctgaacggagatgtcatttcgcaagaccgccaatgtacctctttgaacggagatataaaaagtcccgcaagccagatgacttgcgggacttgctaaaaccttaagaggcttatgctcacagagcgttgatcgcaacagcgaggccggacttgcggttggcggcctggttcttgtggatcacgccagcgccagcagccttgtcgagcttctgggcggcaaccttgtaggcggcctcggcggcagccttgtcaccggcggcgatggcttcgcgggtggcgcggatggcggtcttcaggccggacttcacagccacgttgcgaaggtgcgccttctcattggtgagcacgcgcttcttctgcgacttaatgtttgccacgtttactccaaacgatgtgtgttataaggacatacaaaaggtagaggatagcatgagccccggaaaaacccgcgcaatgccacgccgaatacagtccctcggctacactaggtgaagtttgagtatatgccaagaggaggaatgcgttggtcgtccaacacaatcagccgggttccacggatcagtcggtgattcgcaacttctgtatcatcgcgcacatcgaccacggcaagtcgaccgtggccgaccgcatcctgcagttaagcggcattgtgcccgagcgcgagatgcgcgatcgcttcctcgaccgtatggatatcgagcaggagcgcggcatcaccatcaaatcccaggccgtgcgcgtgccatggacctttgacggcaccgaatacacgctcggtatgatcgacacccccggccacgtggacttcacctatgaggtgtcccgcgcactggccgcctgcgaaggcgcggtgctgctcgtcgacgctacccagggcatcgaggcgcagaccctgtctatcctgtacatggccatcgaccatgatctggccatcattcccgtgctcaacaagatcgacctgccgtccgccgagccggacaagcatgccgaggagatcgcaggtctgatcggctgcgagccgagcgacgtgctgcgcgtctccggcaaaaccggcgaaggcgtggccgacctgctcgaccagatcgtca

SEQ ID NO: 2265 - DNA, 7323 bp, Unknown
  R119_18m  MAG No. k141_6102
gaagaacaccacacccgtttcgataaatacgatgaggaagatgaagccgagggtcggcgccacgcccatggcaatccaaccggcaatcgcggcacgcggatccttcagcagttcgaggatgaaattaacgaagcccatgtgattcctatgagtcctatacgtctatatgtgtgaacaatctgtccaatgaaccagacattcgtctgaaaaccgtcaaccactctaccagtcgccccgatacaagagggggccaccggaacctcatagcagccattactgccatcttctttacaaatatggcgtgcttcgctggtatatcgtcaacacattccaccgctcatgaggagaactgcatgcgcggtgatgtaatcaattactcaccaagacgctggcgcacgaaaccgtccagcgcggccgcatcgataccgtcatacgattcgatggacgcgaactggcccaggccggaagtatccgtgcgaatccagccagtctgcgcgatcagagtcgcgcccgatgccgcaccggcctgaagtccaaccgaggaatcctcgagcaccacgcacttggccatgtcttcacgggcgatgccaagcttgtcggctgcggccagatagggcgcagggttcggcttgtgttcgtacggatcgtcgccacagacgtagccggcgaacagtccctcggactgcttcatgatgttctccgccatacggcgcggcgacgtggtgaccagcatggacggaatgccggcctccttgagcgagtgcagcacgtccaatacaccgggaatccacggcagacgttcgacctccgccttgaacacataatccttgagctgtttgtcgatttcgggaacgctcaatgtgcagccatgcgcaatcatgacctctgccacgtgtggcaccggagtgccggagcactcccaaccgaggtcctcgttccactcgccgccattgttgtgcgcgatctcgatttcaccgtcatgccaaagcggctccgaatcgataagcgttccgtccaaatcccaaaacacggccttgagcagcatggttacctccgtacgtcgcagtgaatcctcaactattcgtattcgatatacctatctcaccaactccgcacgacagccgaacagcaaatcaccaaccccacaggaccatggatttggaatcggcgggggtggagtcggattcgcgcgtggtgtcggcagcggtatcgcggccgggcagttcgcgggtttcgcggcggatggcgttgcgccagaggcgggcgcggttggagcgttgtacctccacgatattgccgtcacggcctgcggcgaaaacgctctcctggtcgccggtttgcatgcgtttgacttcgcggcgcagttggcgattctcttcttcgagggccaaaatgcgtgcgatgccggaaagattgatgccctcatcctgacttaggcgctgagctcgagtcaggcgggcgatgtcgcgcaggcagtagcggcgtgcgccgccatcggtgcgctgcggacggaccagacccagccggtcgtactggcggagggtctgggggtggatgttgcccagttcggctgcctggccgacggtgaagatgggcagttcgatgtcgaagccgacgtcatcggctccgtcgagatcggccctgcccatcaccagcgcggttgcgcacatcgcgtacaactgcttcatttggttggctaaccgcgccattgttcacctcctgattacaggctgagatagtcgccggctttttcgtcgaattctttggcggcgtgcttgacggccaaacccggcttggcggggaccatgatctgcacgcggccgatcaggtcgcccggctggttgccgcgctggacgccaagtcccgcgagcttgacctcggcaccggagctggagcctgccggcaccttgaaggtgacgggattgccgtcgatatccttggcctcgaccttgccaccggccacggcctggcccacagttacgggcaggtccatgacgatgtcgtggccgcgcatcgagaacgcggcatcgggcttgacggtgacgtgcaggtacaaatcgccggccttgccgccgttgatgcccggcttgcccttgccggcaagcttgattttctggccgtccttgacacccgcaggcacgtgggccttgaacttcttgccgtccacggacagggacacggtagcgcccttgaccgcctgacgcagggtcaggctgatcttggagttgcggtcctcgccgttttcggggcgcggggcctcctcatagccatagccgccggcattgccgtacggcgattggccgtagccgccatacgactggccgccctgacctgcagcaccgccgaacatcgagaagatgtcgttgatgttattggggccgccgcccgaagtggagaagcggatacgcgaaccgttgccaccggcaccctggccaaacatggagccgaagatatcagagaaaccggaagcgtcgaagccgccggcaccggaaccgcctgcgaagcgggcgccgcccatgccgaactggcgaatcgcgtcgtacttttggcgatcttccttcttgctcagcacgtcgtaggcttcggagatgtccttgaacttctcctcggcttccttggtcttgttgacgtcagggtggtacttgcgggcgagcttgcggtacgcctttttgatgtcgtcgtccgaagcgtccttggagacaccaaggactttgtagaagtctttactgagccattcgttttcagccattcatgtctcctttcttgaagagtctttatggttggctcccgttggcgggagctgtcgaacgaagcgagactgagggtggtttatattcagtgtttgaccaccctcagtcagccttcggctgccagctcccgccagcgggagccaaggtaatgtcagctcgttaacgagctggccgttatcagttttgcggggaggctactactactcgggcggcgcggattacgcggtcgccgatacggtagccggcttccaccacggtgtcaacggtttccttgtcggcatcggcatccggcttgtgcaggattgcctcatgcttggtggggtcgaagtcctcgcccttttcgccgaacttctcgacgccgaacttctcgaaagccttgtcgatcttggcggcaacggccttgaacgagtcgtccatctcgctgtgttcgcgaatgcggtcgatgtcgtcgagggcgggcagcagcgcggtcagcacgtcgatgatgccgtgctggcggaagcgctcctgctccttctgcgtgcgattgcggtagttgatgaactccgcacgttcgcgttgcagggcttcgaggtagtctgcggcttccttcttggccttgccgaggggggtgagggtgtcttcggaatcggactggccttcgccggtcttctctccggcatccgacttctctccctcagctgcggcaggagccgcgtcggctccttcattggaaggagcctgggcagccgaatcctgcgcagagtcggactcggcggaggcgtcagcccctgaagaggcctgagcggcctggccggcagcctcagcatctgagggatccggcaggtcgttcaggtagtcgtccttgttgaactcggacatcacttgttgtccttgtcgtcatcgtcgtccacgacctcggcctcgacggtgtcgtcgtcggaaccggaggcggagccagcggaagcgccggcaccgtcagcgccagccgcaccggcaccagccgcggcaccctcagcaccctgctgggcgtagaggacctggccgatcttctgggcggcggtcatcagctcagtctgggcagtcttgaccttctcggtgtcgtcacccttcagggcttccttcagagcgttgaccttgtcggtgacttccttgacgatgtcgtcggagagcttgtccttgttgtcgttgacgagcttctcggtggagtaggcgaaggcctcagcctggttgcgggtctcggcgtcttccttgcgctgcttatcctcagcctcgtgagcctcggcttccttgaccatgcggtcgatctcgtccttcggcaggccggaaccaccggtgatggtcatggactgctccttgccggtgcccttgtccttagcggacacgtgcacgatgccgttggcgtcgatgtcgaaggtgacctcgatctgcgggacgccacgcggagccggagcgatgccggtcagctcgaaggtgcccagcggcttgttgtcgcgagcgaactcacgttcaccctggtagacctgaatcagcacggacggctggttgtcttcagcggtggagaagacctcggagcgcttggtcgggatggcggtgttgcgatcgatgagcttggtcatgatgccacccttggtctcgataccgagggacagaggggtcacgtcgataagcaggacgtccttacggtcgcccttgatgacgccggactgcacggcggcaccgacagccacaacctcatccgggttcacggactggttcgcttccttaccgccggtgagttccttgaccaggtccttgacggcgggcatacgagtggaaccaccgacgagcaccacgtggtcgatgtcgctcacggagatgccggcatcgtgcagcacgttgttgaacggcgtgcggcagcggcccagcaggtcggaggtcatttcctcgaagtgcgcacgggtcagggtctcatccaggtgcaccggggtgccgtcaggagtcatggccaggtactgcatggaaatgctggtggaggtggaggaggagagctccttcttcgcctgctcagcggcttccttcagacgctgcagcgcaatcttgtccttggacaggtcgacgccgtacttgttcttgacttcggaaaccagccaatcgatgatcttctgatcccagtcatcgccaccgaggtggttgtcgccgttggtggcctgcacctgaatggtggagaagccgtcgtcgtccttgccgatctccagcagggagacatcgaaggtgccgccgccgaggtcgaagaccaggatgcgctcgtcttccttgcctttctcaaggccgtaggccagagcggctgcggtcggctcgttgatgattcgcaggacgttcaggccggcgatcttgccggcgtccttggtggcctgacgctgggcatcgttgaagtatgccgggcaggtgatgacggcgtcggtgacgggctcgccgaggtatgcctcggcgtccctcttcagcttcatcagaatctgcgcggaaatctcctgcggggtccacttcttgccgtcgatgtcgacggtccaatcggtgcccatgtggcgcttgacggaggagatggtgcggtcaacgttggtcacggcctgacgcttggccacttcgccgacgaggatctcgccggacttggagaaggccaccacggacggcgtggtacgggcgccttcggcgttgacgataacggtgggctcgccaccttcaagagttgcgatgcaggaattggtcgtaccaagatcgatgccaactgcgcgtcccatatttggtctcctttgcaataggttcgctatacgttcttttcgttcttcgctcgagtttcggatcgccgtttccggattgccgtctctcatgctttccaaaacttgagcttacaccactcaactttgaatcgcaagcgattattcccaaatctacaaaaaagttgagctctcttcgctcaactttttgccgggtgcaatcttaagcgcaatctcaggacacgatttcaaggttcgatcgtcatcgaaagcaatcgaaaaacgcagataaaaatccggaccacactgtgatgtgtgcgatccggatccaatctgcgatcttcagatcacttcagattttcagcggctgatcttggcggtcttgacacgcacgccggagaccggagtggagctgtcggaagcggagaccacgttgccggacttgtccttgagctcgtaggaaagcactgcatcgccgttgaatccggtggattcggccacatacttgccatcggcgagcctgacttcgtcttggcgttgccgttgccgatggctgcaatgcgccgagcgtcgctacggatgcgaccgctgcgattgcgcccttcaaagctttgtgcttgcccatgtttctcctttcttcagtctgcgctgtattgcaatctccacgctaggtttcgtaaaccaacttccgagacgttttagacgaacgaaacgtgaactctcgtcttcacaaagtgaatacttatctcaaaccctctttccgtcaaccgtcatccccaatatcccctcaaggccgaatcatgactcgtgcttttgctgcatgatgtgcaaacggtcaggcggaggtgcggcaagtcaggcggaggtgcggcaagtcaggcggagacttggccggtatgagcggagcgggtggctttcacggccacaaacatggaccgcaccagcagcacgcacaggtagcaggcgaacagaatcgagccgacgcggggcgagactgcgcccgctatccacgtaccaaatggcgcggtaacggcagccaccaagccaataatcagcgcggcctttacatgcaccagccttcgtttcaggtttgccacgcttgtggtaatcgagttcggaaacatggccagcagcgacgtgcctcgcgcaatcagatcggaagcgccgaacagcatcgatagtgcgggcacggcgagcgccccgcctccaattcccagcagtcccgccaagatgccaatcaccacgcccagcagcaccaggcaaactccggtcagcgcactcatcgcaatgtgctgatctcgcgacggcacaaaactaatctgattgaacaccacaaacacgaggaacactacgaaaatccatcgcaatacgagttccggcaatcgcgaaagcagccaactgccaatctgcccgcctacaaacatgccgcaaaacagcagcagcgcggcgagccagtccacgttgccacaagtcgcgtaagaaatgacgccggaaatcgaggttggtacgatcgcaagcattgacgtcgctgccgcattacgttgcgtcagtccgagccataccagcgcgagcacaatcaccgtgccgccaccaatgccgaacatgccggataatagccccactgccacgccgacgatcaccagcactacaatgcctcgcgcagattcgtcgagtcccacaggatctgcaccaaatagccgattcgctttcttgctgaaccgctcactcacctacccgctcggttgcgcattcatctgcccgctatcttcagcgcgttcaacactttcagcattcgaaatattggaaatatccgatttcttcatctctcccctaccatcgca

SEQ ID NO: 2266 - DNA, 53939 bp, Unknown
  R119_18m  MAG No. k141_6328
ccccgttcgatggcaatggtgattttcgccggtttgaccggtcggctatgcgagacggacggcccttctgcccacggcccacgctagactggtgtggattcatcatccctttcaggcataaggattcaatcgtggcaaccaccttccattccacccgcagcaccaccgattcgctgaccgccaagcaggcgatccgtaagggcattgccgatgatggcggactgttcgtttcggactcgttgggcgagaccaaggtggacgtggcctccctgccgggcaagacgtatcagcagatcgccgccgaagtgctgggcgcgctgctgccggacttcaccgccgaggaactgggccagtgcatcgccgatgcgtacggcgagcagtggtcggatgagcgtatcactccgttgaagcctctgggtgacgattacgtgctcgaactgttcaacggcccgacctccgcgttcaaggatgtggccctgcagattctgccgcgtttcatggcgcacaccacgccggccgacggcgacgcggacgagaagatcatgatcctcaccgccacctccggcgacaccggcaaggccgcgctggccggcttcgcggacgccccgggcaccgcgatcaccgtcttctacccggaaggcaaggtctcccaggtccaggaactgcagatgaccacgcaggccggctccaacgtgcaggtggccgccgtggaaggcaacttcgacgacgcccagtccgcggtcaagcgcatcttcggcgaccgtgccctggccgagcgtctcgccggcaattcgcacgtggtgctttcctccgccaactccatcaacgtgggccgtctggtgccgcaggtcgtctactacttctccgcttacgcccagctgctcgccgaccaggtgatcaacgtcggcgatgaggtcgagttcgtggtcccgaccggcaacttcggcgatatcctcgccggctactatgccaagctgctcggtctgccagtcaagcacctcgtggtggcttccgacaagaacaacgtgctgttcgacttcctgaccaccggtacctacaaccgccagcgcccgttcttccagaccatctccccctcgatggacatcctcatctcctccaacctggagcgcatgctgtactacttgtccgagggcgacacccgtctgatttccatgctgatgaacgacctcaacaagtggggcacgtacgagatcccggaagaactgctggccaagattcgtcagatcttcggcaccggttgggccgatgaggatcaggtacgcgagtccatcaagcactgctgggacgagaaccgctacgtgatcgatccgcacaccgcctgcggctactacctgcttgagcagatgccgcgagacccgctgaccccgcgcgtgctgctctccaccgccagcccctacaagttcccgcgcgtggtgaacgaggcattgggcttcgacgccaccggcaccgacttcgagtgcatggacgtgctggcccacgagaccggcaccaccgccccggccgccctgcgtggtcttgagaccgccgacgtgcggttcaaggacgtcgtggccatcgacggcatggaggactacgtggagaaggccgcccaggcgctgtaaaacataccagcacattggctcccctcagagcggggagccattttttacatcagaattgcgtttacatcagtatcgcggcgactggcagtcctatggcgattgccaacagcacgatagtgccgatgatcacgctggggcgtgcgaggttgacggtccagccgacgccgaaacgtttggggatcatgatggcaggatcgtcacggttgatgtagatgatgccgccaatccagtgcaggtcatcgtcatacggcatggcattatcgtccgaaatgtcaccgccgtcactgtgccgaacaccggcatagacgcgcgccccgttctgcccgtaatacacgccgatcatcagcgcgccgaccagagccgccacggcgatgaacatgccgatgatgccgattagattgatatccagcacgccaatggtgacaagctgaacgcctaggcccaatccaccggctgccagcagtccgatgaccagcacgtagatgctccagacccgcgagaacacaccataggcatacccggtggcggcggggtggtcgggatcaatcgggtgcttggcgtagatgatcgcggcatggctggccaccatcaccgctgccagcaccacctgcgcgagcacggcgtaccaaatcaccatcggactcttctcggcccaaccgttcacattgccggcgatatccgcatgaatcggcacccgctccggcatccggtcatagcccagcaacccgacagcaatggtgacagcgagacaaacgacttgcagcaattcccacttcaagctcatcgggtcgggattgtcccgctcacctatcaatgctgcacggcgggcactggacgcctcccatccctgatcgactttgatggatagtactttgcggcgaaacatctgctgcagcacgaaaccacatatcgcaatcgccaccgctgcgatggacacagtccagaacgccgcgtcgactccgcagagttgccaaacggccagcgagaccagtatggcgcatacgccaagcgccaccgtaattcccgaaaacgcgactttaaatccgcgaatgcgcgtattgacatgggcggcggccggcactgtgacaccgaacacctcatgccggtcggtaacccatggaacccctgccaggccggcggtcactatcaccggcaacagtaaaaacgcacacaacgcgatgttcatcgacacgactgtattattcatcgttatctcccctgatttccttttgttgcaccgtcagtaacgctctgcgaggagcgcacgccgtatgcccgttcgcattgccgtttggtggcatcgaggaatgcggccgaatcaccgccgcgcgccctgtaggccaaggcaaggcgatagagttcctcgcccatccgctcatcctgtgcttcggcagttcggttcggtgcttctcccccgccgtcatgctcggcgacggttgcaccggcaccacgacgcataacgatgtatccctcgtcacgcaacagcgcataggccttgttcaccgtgtgcaggttgatgccaaggtccacggccagcgagcgcacggacggtaacgagtcacctggcgacagctcatcgcccgcgatggctgcgatgagctgcctgtgcagctgctcgtaaatcggcacgtcactgcgctgatcgatttccacaatcacggtcaattccacccctctcaagaactgttctatttgttctacatcaaatataacagttttgccgtatgagtcaagatatgcgaatctcggttgaacatccggcaatgggccaacggcgtgttgcttgaattttctaggaaggcgggaatcgccatgctgccggcgaatgggaaaatccatgtggcttgtcagattctgttcctgcaactgaatagtcccatgagggagtagacagcattgcggcgaagggctcggcccaaaccgcaataaagcgtgccgagcgccaaagccgccaacaccggtatgacgccgctgcaggagaagctcgcgaagctggacgaacttcatgggcggcaccgccgaacagcagtcgaccattctgttcacgctgttcgtggtgttccagccgttcaacgccttcaacagccgcgagctgggcaacgccagcctgttcgccaatctgctacgcaataaggtgatgatcggcgtgttcgcgctgatgttcgcacttcaggtgctggtggtgcagttcggcggagcgatgttccgcaccgtgccgctgccgatcgacatgtggctgaagatcatcgcggtcggacaaatgcgcggctagagttctttggctcggtagatgcggatggctataagcatggagccaaaatatgcgagcagacacaacacggcgagaacaagcgccgtatgccaccagatcgtcaggaaatcggtaatattcagcaaaagccattgccagtcaacaggcaatcgggccagcagcgcaatgacggcatacaagccaaccaggaccacgccagaggccaccatcatcttgcggaaggtgaaccggtatgcacaggccagcagcaccgacccaagaatgatagccaaagcgaagatgaaagcacctgctgccaaggtaccgatccaccccatatctgctatatcgccaaagacaatgaagacgccgccgcatatcaccacgtccaaagcccagagcaggccaaccaccaacagaaaaaggtaccgacctacaacttgtgcagtgcgtgaaacaggaatcagccctcgcatggcactgtgccctgcagattcctcggatgacgcaggccccaatgcactcatacatgccatcgccgatgccaaacctccgagtccgcccatcagaccactaacaacgtgttcatcgacgtgggtcgatatcatcaccagcgataccacgatagacagcaccgggaaaaccagcagaaataccatattcgccacgctgaacagacccgtcccgacacaatcgaatcgacattgctttactacggatttccagctcatcgtcaccattcccttgaagcaaatatgcgagaggcaattacatacgagattccatatgccacaaccgtcgttgccaataccgcaataaccagccacaatcgttgcgcgatgatggcattcgcggcatgggccaatcctttggtcaccgaagcaggcaaaatagatagcagtatgaatccagccaatacaacgacataaatcaccatcatcgtgacttgaagaccgcctagtttggtccacagataacccgtgggcacgataagcgcgaccatcagcgcggtgcagaaacctcccaacggagccgcccacagattgcccgcgaatgaccaatccggattgaccagcacttgcaacccgtcaatcagaacaatcatcgctatcgacaatacggaaatcaccaatccaaccacatatcgcgcggccacctgactcttcctcgaagccggaataatgccacgaagtcgatatccgttctgtaagtcagcaaccgccatggttagcacccacatggcgcaggtgaataccgtcatgatgacacccatgcgatagccgaagccatcaccataagcttcaccttgaaagatgacggagaacaacggtgccaacaacaacgagaacacagtccgttcgccgacgcacaggtaggccatatcgacgcgcaatgcagtggccaatgcatgttgccgagaccgcgacaccctcagtattgcctccatggccgctcacctcccgctcaagtcacgattggaatcatgggcattggtcagtcgaatgatgtcatcaatggaagccgattcaacgacaagccccgaaaccaccgacgcaacagcatcaagcctgtctgaccggaccagcgcatcgaatccggtggcatacgtatgtgagcccagcaccacgtccgcaggcagttgtgccagttcgtctggaccgcccttaatcaggcggaacgattcctcaaactcgtctttcggaccggtgtagtagagacggccatcggtgatgtaggtaatgaagtcagcggcacgttcgaggtcggcagtgatatgggtgctgaacagtaccgaatgttcgccatcctcaatgtaggcatgcaggatatccatgagttcgtcgcgggcaagcacatcgagtccgctggtcggctcgtcgagaatcagcagcttggcatcatgactcaatgcgatggccagcatcagcttcatctgcatgccgcgggaaagatccttgatatgtttcttgccgttctgtgcgtcaccaagaccgaaagtatccagatacttgcgatagcatccaccgtcccatgatggatacagtggcgcgacgatacgttcaatgttcttgacttgccactgttcatgcatgtagctgaagtcgaacaccacgccgagttgttctttgacgggctcctcgttggcgatgttgtcgaggccgagcacgtgaatcgaaccggcgtcgcggtggatcatgttgaggatgagtttgatgagggtggatttgccggcgccgttcgggccgatcagtcccatgatgtagcccttgggcaggtcgaaggtcacgtcgtccagcgtgaagccggaatcatagtgtttggtgacgtcggtgacctgcaacgccatcgcgtcggattcggatatggcggtcatggccatggtcctttcttgaggttatttcttgcggtattcctcttcgagcatgcggtccaatgcgtccagcggaatgccggcggctttggcgccccggcttgcctcggccaggctttcgcgaatctgggttttgagctgacgttgcatcagttcgttgcccttgtccatcacgaaagtgcctttgccttggatgttctgcaccacgccctcatcggccagttcgttgtacgccctggtgacggtgagtacggagatgcgcagctccttggcgagtttcctcaaggaaggcagggcctcgcccgccttcaactcgccactgagcaccgccgaatggatttgggttttgatttgctcgtagatgggttcaccggacacggatgagatgatcagtttcacctatgcccctttcgattgtggttgactagcaccccagctgtttagctgttatacaacacagtataactgttctgcttaactgtcaaggtgtgttacataacagtcgaacagtgagcaacaagcaatgagcaggcaaatcctttgacaacggccgctttccattgaacagacacgccacgaacgctatttgtgcgttgtccaattccgatgagatcagacgggcggcctcacattccttcaacatgaaccgttagaacagacgatggaattcggctggttcgtcccccgctccatttcgtggagcgttgatcacggacagccgaatgtccacttggttttttctctcggggttctcagcgactttccatcaggtgaaaaatcgagaggagcaaagcatcgaagagcaaccgcaggagaaaaacgtcaagcgtaaagaacaaatcaaaatatgaccagcggctatctgtgcctatccaacgaataggtcgttgcaacctattcataaaaagagacataccataactatatattatcgacaagatgaataatgagccgagagaagaggactcttccgtggaatgctaccatagcacggcagttgcatcagccgccacccatattgcactgctggataatgacgcaattgtgttaaaaggattacaacagattatcgaatacaatcacttaggaagcattacgtggaccactcggagcgggagagaggctgtacaaagatgctcaagtgccgtagatacaccgcatttgctgctgttcgatatgtctcttgacggaatgtctggtatagacgtatgccgtcagattcgcaaaagaagcgcatccgtgctgctacttggcatcacggctttccccctagaacggtacatttctcggctgattcaggctggggcacaaggactagttgcaaaagacgaagaaagacaaatcgctgaagttacgcgttgggtattaaataaggggggctgcggaaatgggttcgaaacggcccgtaatgcgcatatgcgactgaaacacgagacaaatgacatccgcatgctgttatccgacagagaagaagaaatcatgattcttctcagcaaaggactatccatatcagaagccgcgaatcgcatgcaaattggacaggctagtgcagcaacatatcttaatagagctcgtcgtaagctcaaagcggaaacagtgcgccaagcagtagctatctggacaggtgattatgaacagtaacatcaaaaaacatccattcagattaattatagtgttactctccttatttttttcgataattgattggacagagagacccaccacatctgcgtatgaaatattatttggcttcatccacatcggattgctgttaatcgccctatggttcccacgcattagtttcgtaggattaatttttatggaatcagttgcgtgtagcttacctgtcctaaatgggccaagccgtttctggggcatctattgcactatcggactcactgcatatgaaacgggtatctctatcacgacagttttaggtatatttgtattcttaggaattcaatgctatcagatagcgcgatggaataatggcgagatagacataatcagcataacagtgtttctgatgtatgcagcagccaccgtgattgtcggatatggttttcattggtggaagacgacaaatgaacaacaccttcaaaattatcaaagcaaagagtacgaactgcaacattctttttctctgcaaaatagcgacaacgctatcatgcttcatgactccgttgcccagtgtttgacgagtatacgattgattgcgcaacggcaatcaaatgatccccagaatgatgcctgggagaagatagataaaattgcacgaaaaggattagaagcaaccagagatattatcgatacaatgattcaagataataatgaaaatggaatacccatagagtcgtccgaatggtggttagcggtaaaacggttaaccgacgaatgcgactatatactccaccaacatgggtttactggcactactgaaatcattaatggtgggtttacggtacagcaacaggtgaccgtaaagaatatcgatattctgcatgaagtactgagagaactatgctccaacattattaaacacgcgccaaagtatagcgaattccagtccagcatagccctgcagaaatcacaaacagaaatagtcatgtccaatagcatgtccacaataccggacgaagaaaggtcaggccgcgggctagagtcacgcaggcgcaagcttaacctaatcggtggtgaaattgatcacgaagtggatggcgacacatggattgtttatgcgcgtatacctttaactatggtttcaccggacaaagcagccacggaatccatggaggacaacgaacacgagaaatattcaccgaggaaaaggggaaagacgcgctctgttgaatgccaaagggaacagatggcacggaaggagcacaaagcgcaaaagtagtgattacagatataacgaagctcattaatactcctagaacaataacaactggtttaattgaaacctattatataggtacaatgaccgagtcgtatggaatcgtgtaatcgtcagaattacatcataattacctgagaggatgtcatatgtattgaaggtatttagcgacttacctctatatgcgcacgttctacaatcatataaaagtcatgtattttgcgaagacattaatggagagaaccctagcccaactccgcgcttcataaccgatttttagcatagcagcagagggtatccaagacactaatatttatcatattctaccatcaccagaaaaaaaaaagggcttcctgttttccgaatgttcgactaaacaagcagattcacagcaccgaatggatacccaaccacaacaaacatatcaacacatccagccggataacaccttgaatcgttcactgtcagggagtactaaataccccataaactccatctccgttcatcgaaaaacgatgtttgtcacgggaaacccctatgcgaagcaatacgaaacggcatgttctagccgcctccaagaacgtttattggtcaaaagacgacggcacacctatgtgagcgatgacattaatgcccgaacatggcaactgttgagacgtaacgcgcaaagcgcatctggtaaggtcagttatcagctagttcacgatatctttgtttccccaaacgacgtagtatactgcttcaccgtccttggcgtttcgcgtaaacggaccttttcaggatgttcgaccttgcaccgtgtgggccgcaatcggctatatcgttgtgaacatcgagctaatggcgattaaacatcgctactattaataatccctgaggaattcgaacggtgatctataaggtaacaaaatgggaaaacaatgatgaccaggacaatcattattgaggaggatacagtaagtacgacggcagcatgaatagtgccagtgaagccgtataaaccgtaggcgagaggaattagaccgaagctaattgcataatcaattgaggaaactcgtcccatgtgccgcttatcgacgcatgtctgcatagtagatccccagaacacgccagacaattccagtccaagcccagcaacaaatgacgccacataccacagtacttggatgtccaaagtacctacaacaaaaatcggcataatagctaaagcgccaaataacactgatttagaaaacatgtgcctaggcctttccaactttaacgcgatgagactgccgcaaatgtatccagatgaggtgatagatgccatcagggaccatgcgccccggccactctcttgcacgacccacaagggcattgtgacgtctgttgccccggattgtacggcaaggaacaacgcccagaacggcactcccactgctaaccaaatataagtatggaacaaactgggaatagaacgtaatgcagaaatcatggaagcatcatcatcgttgttattagcctcgtcatcgcagctgggcatgagtttcaacgatagaacaagcggcatggagacagccagacacacagcaccatccagaaatagaaaagaaggtgatatcagttgagcaagccatgcaccaagaagtggaccgaccaccgagccggcattgcgaaacgtacgtatcaagccgttggcacgtacaatatcttcagggggagcaatcgaaggcaataaggcgaacaaggctggcgagccgaccgcaccaatgatacctgcggccaaactgattgcttgcacgggccatccaagaccactcaactgcacgacccatgttccgactccataggaaatagctagaccacccagcattcctgaggcaagagttttccgcggcaatcgatccgctaaaacaccacccagaaaagccatgaccaaggtgggcagcgtcttgaacatgagtaccaaggctaggcccaagctgtcagatgaagccgctccagtgaatacaacaccgcatgtgaagaacgccgaggacattgcttgcatgccctggaccaatgccagtttggctacctgccagcgtacgacactcccgacattcttcaccatgctcggacagcctccttttgttttatcatgtatttaaaacgtaactatattgccttttattcaggccactaccgaaatatgctttggggattctaaaatattcacttcttcgcgagattcggcgaaaatatcgtgctcatataagacgggatctttaattccaagaatctcaaaagaagttcgtcgatcacgacacgggtcacatactccacaatgaactgtcccgcccaaggcacagctccacgtatcgccgaacggcacgccaagacccatacctttttgaatgacggcacacttattgatactaagataaggagtatggaacgttaccccgtattcatctccttcacattctacggtaaccgtatgaagagcttcaaaatatgatgcatgattatcgtggaacacagcatcgttactatgaactgcgtaataaacatcaacgatatcatgcttaagcgcccatgaagccattagcataagcgcaattgccgatccaaaaggctgaacatgctcttccttattaggggcaacgacaaatggcccaaatgctttgcggaggaactgaggctgaggcaattcatagaaacgcttaaattgctcggaaaaatcatattgataatgatggagtcgttcagagtggagatttgtaacgattctttgcgcatgttgactctcattacatccctcagtttcaccaaaattgaaagtaacggcatatatttctttcccctgatttaataggtcatacaagagagtagtagagtccgggcctcctgatagaagcaacgcgacacgattatgattctgaatcattgtttaatcctttgactttgtgaaattcagcgaatctgttgaacttctgtatagaagttattctgttaatcgacgtttgagaagtagtcatgtaaacgtcacaatgacaaatgcgcgacgattcctgggtctgatgaaagatcttggtgcttggctttcagagtctctcctcattttttcaattgttgtatgtcgtttccgtgcaacaatacagcaccgaaacacagccagcgcctacaatggcctcggaaagggggacttatgccgaacaacgccgttacgctacaccacaccgaaccgaccgattatccggaacaagggcgaggaactggagcggcaacggtttgaggcgcaacggcggtcggataggatcgcgcggcggtaggggcttcatatatggctcccctcagggaggggagccagttttttacaacacccgtggggcgttgtggaaatcgaagaggacgccgtcggcgagccggcagattttgggccagtcggccgcggaggaatcgtcgtgcatggcccagaccttcatgccgaccgatttggccgacttcatgccgaccagcaggtcttcgaacaccgtgcagtcgaccggcgcggcgcctaggcgcttggcggcgagcaggtagacgtcgggctggtccttgccgacgtcgttcgcgtcatcgacggagacgatatcgttgaacagatcgaacatgccgacgtggcgtagcgccggctcacgcagatgcgggggcagcgaggtggcgacacccagtttgacaccggaggctttcagatcgcgcagatagccgagcgcgccgggtttggcttcgaccgtggtggaataggcgacgctggccatgtcgtcccattcctgcatgagctcttcgggcgtgtctgtaaggccgaagcgtgcgatggtgtattcggcgatctggcggaattgcatggcggagactttggtcatgtagtcgggcggcacttcgattccgcgcttgttcaggaagtcgatgtcgacttggtcccagactcccatggagtctaggagggtgccgtcgaggtcgaatatggcggctttggtcataggacactttccttcaacagttctcgggcgtggtctagggaggcttcggattcgctgccggagagcatgcgggcgatttcgtggacgcgggtttcgccgttgacttcggcgatggtggtgaccacgcccaaatcgtcgtcatcggcatccggcggctccttggtgaccacgaactgcgcgtccgcccacgaggcgacctgcgccaagtgggtgacaacgatgacctgcgcgctgcgggccagccgtgccagacgtttgcccagttcgaccgcggccttgccacccacgccggcgtcaacctcgtcgaagatgaaggtctggtcggcaccgccgcgcgtgtcggcggccaccagctccaaggccaacatcagtcggctcagttcaccgcccgaagcgcttttgcccatcggcaactgcggcgacccctcgaacggcgtaaacaggaacgcgatatcgtcgcgaccatacgggccgagcggatcatcggccttgtctcgcggcgtgacgcgcacttccaaggaggcgcccagcatggcgagcgagccgagttcttcagtgacgcgcgcgcccaagtcggcagcggcagccacgcgcgcggcgctcagcacgtcggcggcggcgagggccgcatcgtacagcgtctgccgttcggattcgagttcggcgaccttttccggcgaggcgtccagatcctccaaatcgaacgccgccttgtcccgccaagcgagcacgtcggccaaggtggggccccaccgacgggtgaggtcgccaagctcgtggatacggccgttgatctggtccagatcctccacgctgccttcgtcgcccagctcctggctcagggcgaacaccacgtcacccaaatcggcattgatggattcaagccgatcggcctgctcggcgaacgtgccgccgacgcgaatcgcgcgcaacgaggtcaccgcatgattgatgagttccacggccgaagcgccgtcggcggcatccacatccacctgcgaggcatccagcgcgcccagcgccgaacccacgccttgggcgatgtcggccgcgttttcgatgcgttcgcggcgcgccttcagctcctcgtcctcccccggctgcgggtcggttcggttgatgcggtcgatggattcgcgcaggtagtcggcctgttggcgggcagaggattcctgcgagcgcaggcgttccagccgctcatccatggcggccagcgcatcccacgccttgcggtaggcggccagttcggcttcgtctccggccacccggtccagaaactcgcgttgccgtgcggcggccgcgattttcagctgatcggtctggccatgaatgatgaccagttcgccggcgatggcccccagcaccgaacgcggtacggacttgccgccgagcacggcccgcgaacgtccggaagcgcgtacggtgcgggaaaggaacagttcgccgtcttcggggtcgacgcccgcgtcgtgggctttggccacggccgcggcagcaccggtgagcccgctgtcagaatcgtcagaaccggcatcgtcaccggcatcgttggtgtcgccggaatattcagatgcgacggcatcatccgagagcgcgaaaatcgcctgggcccaagcctcgtccgccccggccgagacgcgcgaggattcggcggccccaccggagaccagtcggatcgcggagagcagcatggatttgccggcgccggtctcaccggtgatggcggtcatgcctgcggccggcgcaatggcggcttctcgaatcggccccagattgcggatatcgagttcttcgagcatcaggctcctgccttgccgtcacgttcgcccggcttgtcgggatcggtaccagcgacgccagcgtcaccggcaacgccagccgcatacgcggccgccgggaacgtgtgcccgtgatgcagcggctggctcgaggcctcgttgcgcgcgtgctcgcgccagccgaccacgggcagatcgaacttggagaccagacggttggtgaacggcacgccggagagtcgggcgaggcgcaaggtatcgcgcgattcgcgcaccatgacgcgcgtaccctgcggcagggcgcgctggcggcggccatcgcagcaaatccagccttcggacatggaatcgtccagaatatcgatggtaaaggtcgaaccggagccgatgatcagcggcctggcgaacagggcatgcgcggccaacggaatcaactgcagggccttgacgttcggccacatgaccggaccgcccgcggagaaggcgtaggcggtggaaccggtgggcgtggagacgatgacgccgtccgcgccgaacgagttcatctccacatcgtccacgcggatggacagttcgaccatcttgccccggtcggcgcgttccagcgtgatgtcgttcagcgcccaatcctcaatgggcttggtggtgccaggcagccagacgtccacatgggcgatcatgcgttcgtcgatcgaatagtcgtgggtggcgacccggcggatcgcctcgtcgatctggaagctttcgaattcggccaggaagccgacatgccccatgttcacgccgagaatcggcacctgggtgcagtggacgagttcggcggcgcgcagtatcgtgccgtcgccgcccaggaccacgacgatttcggtgtcgtccgacacgcacggcggctgcacgccgaaatcgggggcctcggtgttgtcgatgatggtgacttcgaaaccggccactcgcagctggctcaccgcctcggccactacggttccggtctgcctgagcctggtatgcgtcaccaccaccgcgttgcgcttggccatggcatcctcctgtcgattcggtcgcactgctcattattctagccgcagacaccgtcatcactcgtacaggtgttcgaaaaatgccgcttcgtggcgcgtcgccgacaacgttccgcagagtcgattaacgtaaggcttcggcatacaatggcatacagccgcgcgatcaccgtacgcgtgccgtgcgcagcgcgatggcatgccgtatgagcatacagcagtatcagttgaggagcttgaggacccatggccaatgacttcgacgaatcctccgccaatgaggaggcctcgaagggcctgtcatggtggtattcggccgatgtactgagccgagacaaaagcgataaaaccgccaagcgcattcgccgcatcagcatcaccgaccgtctgctcaggcacccgggccgtctgtccatggtgtatttcggcgcactgatcatcatcgtcaccggcttgctgctgctgccgatctccacatcggacatcatcttcaccaacttcccggtcgcgttcttcaccgccgtctcggccctgtccacctgcggcattccggtggtgaacaccggcgaatactggtcgacgttcggccaagttgtcatcctattctccatccagttcggcggcctgggcgtcatgaccttcgcctcgatggtggctcttggcgcttcccgcagactcaaggtctcccagcgcatgcttaccgcgaacgaactgggcaccacgaagctttccgaggtcaaaggcgtactcaccgtggtattgggcacctccatcatcgccgaggtgcttaccttcgtgctgctgctgcccgacctgttccgcgtgaaccacggcaatatgggacgtacattgtggcaggcgctgttctacgcggtatcggcctacaacaacaccggtttcacgcctgacgccaccggcctgcatgtgaaccgttggggcgtgggactgccgattctcatcagcgcattcataggaacgctcggcttccccgtggtgctgaatctggtgcagtgcgcacgccgacatctcagcccgaaacgttggacgttgcacaccaaactcactttggtgaccaccgctgtgctggtggccacctcactggcttggttcctgctggtcgagtggggcaataccggcctgttccccgcagacggtcccggcatgaagatgcgccgtgcgatgagcgccgccgtcatgccccgctccgccggtttcgatatttcctgggtgcccgaagtcacgaatgagaccaaggtgttcatgagcatactcatgttcatcggcgcaggctcctcatccaccgccggcggcatccgtgtcaccacgttcgcggtgattctcttgatttgccgcgccgcattcaccggccatcgcgatgtcaccgtgttccgccgccgtatcccccgccgcgtccagatgaccgccgtgtccgtgaccacggcctgctttgcgctggttatggtcggtgcgatgatgctgatgttcaccaccggctgcgcgttcgtggacgccgtgttcgaggcctgctcggccttctcgttgggcggttattcggtgggcgtggcaagcgccggcaatccggccagcctgtttattctgtccgccgagatgattgtcggacgacttggcccgttgaccatcgcctactccatcagcagaccgatggctcccgaacctattcgttatccgcaggaaaacattatcgttggctgatcggccattcaatcggcacacagaaatccggcatagagaggaccatcatcatggcagcaaaaccgagcggcaacaaaagcgtgctggtcatcggcctaggccgtttcggcgggtccgtggccgccaccctcgaccagatgggtcaggatgtgctcgccgtggataagaacccggagcttgtggcccgttggtccgcgcatctgcccaccattcaggccgacatgaccgatgtgctggccatcgagcagatcgacgtctcccagttcgacacggccgtcgtggccatcggcgacagcatcgaggcttcggtgatcatcaccggcaacctgctggatgccggcgtttccgatctgtgggccaagtccgtgtcccaggagcatgcgcgcattctgcagcgcatcggcgcccgtcacatcatcaatgcggagaccgatgccggcaagcgcgtgggtcatctggtggccggcaattatctggattacatcgaaatcgacggcccgtacaccgtcgtcaagatccacacgcccctatacgcggtgggtcgcagcatcgaggacgtgcaggtgcacgacaaatacggcgtgaccgtggtgggcctcaaggccccaggcaaggagttccagtacggctccaaggaactggtcatgcatcgcaacgacgaactcatcctcatgggcaagcaggatcagatcgaccacttcatccaaggctaacccccccctaactgcgctcgctataccccctatctgctcacatcgtgaccgatataacccccctcaacatggatgcgctcattattggggcaataagccataaagctgtacgtccatattgagggggctttatcatcatggacaagcatacgcagaattgcacgttgataggcaaaggagtctacggcaccataggagtggaccaacgttcccgtcttgccgatggcgcgcattttcacaccatgattgtgaccagcaccctcgaggcctcagttatagaaggggacaaactggtcatcaagagtggcattgtgcggtgtgatggtgatattcgcgtatccagcatcagcggcagcggcgacatcgaagtcggcggcgacattatttgcgatgaaataacctttaccggcaaactgcgatgcaacagcgatatcgtttgttccggaaatctgtccgtcaatggctccctaggcacccgtcatattagcggtcagacagtccgcttgaacggcgtgttgaagggtcatgacgtcaacagcagggctctggaagttcatccactgcgcagtacgatgttttctcgttttgatatggatgggtatgaggatggcagcatggttcgccatatcacagccgtcacggttgaagccaaccatctgcaatgccggactttgacggcggactccgccatgctacgcaacggcagtgcggtggaaagcgccacgtgtgccaccgcaataggcatcgaccgtacctccagcgtgctgctggtgaacggagactgccgacgcattcatctcaagacagcgtaaagcaggtattcctcattaccgtgggtgccgatgatgggactatcggcagtggccaccacgtcaagtccgtgctgttcagcacaggcgaccacgtcgtgcaatgcccgctcccgcaatgccggatcttccacgatgccgtttttgccgagtcctgcccgcccgacctcgaactgcggtttgaccagtaacacaatctgcgcaccgggagccgcgatgcgcgcgattaccggaatcacataggtcagggaaataaaggagacgtcggagacgatcatcgccggccggtaaggcaggtcgtcggcctctacttcgcgaatgttgacgccgctcatttcgatgacgtgctcgtcattggcgatgcgcgggtcgagctggccgtggccgacgtcgagcgccacgactttggccgctcccccgcgcaacagtacatcggtgaagccaccggtggaggcaccgatatccagacattccaagctttccggcccggtaaggccattgccggcaaaggtctcgaacgcgcccaagagtttgtaagcgcctcgggagacgtagtcgtcgcccttatccacggcgagttcgctgtgcccggctttgaccatgaacgatggcttggtgatggtctcgccgtccacgcgcacatgcccggctttgatgagtcgctgcgctttggcccgcgattcgaccagtcccgaagccacgagcatcatgtcgaggcgatcaagtggggtcgcgggatcgatatgttgctcggtcatataccttcctttcgacccaccatccaccaacggggtggctcggcatggacccaccatccagcacttcacgtcatcttccgctggcgggagaatgaatctcctctgctagctgcggctgttatcaagctcgtgttgtaacgattccagcacgttgcgataggtctcaagcttgcggtcgttgtcttgttcatcaatatccgcaagttcggggtatcgctcggtgaccggcgcgtgttcgctatccgtaggcataggactatgcctcgatggcgaacaccggtaccgtggcctcgctgagctgtgcgccttggtcggcggcttcccatgcggcgcatacggcggcacgcaggccgtccatactggtggggtcgctgacgtgtacctggccgttttcaaaccaagcgctagccttgcggcattcccaagtaccgctctcgtcgcggaccggctccggttgggcttcgccgagttcacgcagatcaagggcgatgaatgtgggcctcaggtgtgccggagccagcatcagttcggtcgggttggtgacaccggtcagcaccgccagcgaatcatagtcaccgcggttaccggcctcgatatcagtgtcgagtcggtcgccaatggcgatggacgcctccttgggcaccagatcgtggccttcggcggcgttcagttcgcgggcctcatcgtacatgtacgcttccggcttgccagcggaggcgaccggttcgacgccagtggccgtgatcacggcgcgaatcatcgatccgcaaccgggggcgatgcccagttcacgaggaatcgtcaggtcgcggttggtcacgaaatacgtggctccggcctcgaccgcgaacgcggcatcggccatcatctgccaagtcatatccggataccaaccctgaataacggcctgcgggcggtcctgaggaccgtccacgatggtcaggccgttgcgggtaacctcatcgcgcaaatgctcggcgcccaatacctgtacgcgcgcgccggcgggcaacgccttggccaccacacgggcggccaccaccgaagaggtgatgacctgccacggctccacgtccaagccgaagcccttgagctggtcggccaccacgtgctggaagcgcgaggagttgttcgtggtgtattcgatggtcatgccggcggcttcggccgcacgaatggaatcggctgcgtattcgaccggattcttgccgcgatacaccacgccgtcgaggtccagcagcgcaagctgataggcctcggcgagcgggcgatcggtgcctttgaggaaacgggtcattacgccgctcactcctcggtttcggtctcggtctcgtcggactcagccggttcaacggcaccgtcagcggactcggaagactcctcggcttcagattcctcagattcttccgatgcatcctcggactcagcattttcgacatcggcctcatcagactcggcatcgccgtcttcagcctcgtcgtcctcatcgccgtattcctgctccggatccggggcgtactgcgcctcgtccggatcgatgccgagcttctcgagcacgtcggagtcgtcggtgatgtcttcgagatcgtggtcaatcaccacgtcgtcgctgttttcgtcaatctcctcgtcggcatactgatcctcaagacggtccagcaggtcattaagctgctcggcttccttgctgcggccggcctcttcaaggaagtactgctcggcctgcacggcacgcatacggtactcacccggaagaccctgagagcggccgacggtatgaaccacttcaatggccttgtcccacatctccaaatcgccaagggcaccggcatacaccaggaacatctcgaccttgggagcgccatgcagctgcttgccctcatcggacagcgccagttccacggccttcttcggctctccgacgccacgctcgcagtcagcgatgaacggcaggtagtcgaggaagccgttcatacggtaggcggtacggaactcacgcagggacagcttgtagtcgccctgacggtaggccacgaacgcgagcgtctcgcgggcaaagtcgatgcgggaggcctgacgggccacccacttggcgtgctccaaggcaagttcgggatcgctctcctccagcgcgaaagcggcgaggatgtgcagaccaatgttctccgcatgctccttggacaggccgcgcagacgttcgcgctcatccttggacagcatcgaccattccatgcccttgggcatcttgggctcgtcgggacgacggtcggtgtacgggttctgcgaggggaagctcatcgtgccgtcggagttacggcgcggacgcctcatgtattcagagcgcttctcctcacggtactggcgcttctcttcctgcgaaaactcgcggaattcgccgtcacgacggttgttgtcgcggcggtcgtccctgcggaagttgcggcgatcgccatcacggcgatcgtcgtcgcggcggaagttgcgacgctcaccatcacgatggaaatcacggcgatcgttatcccttcggtcatcgcggcggaagtcacgacgatcattgtcacgacggaagtcacgacgctcaccatcgcggtggaagtcacggcgatcatcgcgacggaaatcacgacgatcgttgtcacggtgctggtagcgcgggttctcgccgttctcgccttcgtgggaacggtagccgccttcgcggcgcggcttgaaaccttcaccgtcacggcgcggaccactgccgcggtaaccacccttgtggaagccaccggacttgccgtacgacttgcggtagccgccgtggccctcgccatcaccatcacggcgcggcgcgtaaccctcaccatcctcacgacggcgcggcttgaagccctcgccatcgcggtcgcggcgcggacggaagccgtcgccatcgcggcgcggaccgttgccgcgatagccacccttgccaccgaaaccagagcggccgcccttgtggaagtcgccacccttgccgtacgacttgcggtagccgccgtggccctcgccgtcaccatcacggcgcggcgcgtagccttcgccatcctcacgacggcgcggcttgaaaccctcaccgtcatgacgcggcttgaaaccgcccttgccgcgcggcttgaaacccttgccgccgcggttgcccggtcgacgatcgccataccccttatgaccgccgccgtaggacttgccggaacgctcgttaccttctgccattacttgttttccttaattcgttgttgattaacggttttccacggcgccgagcgccttcttgccacgacggatgagcgcgaagcggcctgccaggaagtcggcttcggccagcacctgctcctcatcctcgatacggttgttgttgagatacacgccaccggacttgatggcgcggcgtgcctcggaagcggacttgaacagtccggcagcctgggcggcgtcgattacgcgatcgcccggcttggagacggggaagacgtgctcgccgttctcgtcgaccaccttgaagccgtcgagcacggattccagcgtttcctcgtcgatgtcttcgaggttgccaccgcggccgaacagcgcaccggaagcatcgatggcagcctgggtagcggcctcgccatgcacgaagctggtgacctcccaggcgagggtcttctgggcctcgcgcttgccggggttggtcttggattcctcgaccagtcgttcgatttcggccttgggcaggaaggtgaacgccttcagcaggctttccatctccacgtccgggcggttgatccagaactggtagaacttgtacgggctgagcatcgtggcgtcgagccagacggcgttgccctcggacttgccgaacttcttgccggaagcatcagtgatgatcgggctggtgaacacgttgacgtccacaccgcgcaccttgtggatcaggtccaggccggaggtgaggttgccccactggtcggagccgccgagttccagcgtgcagtggtattcgtcaaacaggtggaggaagtcgttgccctgcagcacctggtagctgaactcggtgaaggagatgccttcctcagagttcaggcggcgggcgaccgtgtccttggcgagcatggtgcccagacggaaattcttgccgacgtcacgcagaaagtcgatgacggtcatcgaggcggtccaatcgtaattggatacgaaacgcacggcgttcgcgccttcggtgtccagaatgccaccgatctggttcttcaggcgatcggcccagccggccaccacgtccttcgggttgagcgtgcgttcgccggactggcgcgggtcgccgatgagtccggtggcgccgccgaccagggcgattggatgatggcccgcaagctgcaggtgacgcatgttgatgagctgcacgaggttgccgatatgcaacgatgcagcggtggggtcgaagccgcaataataggtgatgggctcgccgttcagtgcttctgcgagtcgatcccggtccgtggactgggaaatcaacccgcgccattccagttcctcaagcagggtgttgaaacccgcttccttgaagtcggtgacgtgagccatagcttgtcgcttctccctatcgaattgtgaatgagactgcccaattgggcacagtcaagtttcgcagaacatggcgacagtgccgaacaccagccgagccgcgcgattcagtaaaatgccttattctagcggcgcgggcccataagttcgcgcaaagagtcgatgatgtcctgacgatccggcacctggaacttcgggaaggacttgagcatacgcttctgctgtgcgttgatgacgccattgacggcccagcgcagacgctcaaccgtatcctgcgaaagctcacgcatcctgtcggataccgcacgggagccccactgccacgtgccaccggcgcgtgccgccacatcctgcaccacctgagagacggaatcgagcacctgctcgaatccgagcatgcccgcaaccgtgaccgccaagtcgatgatggtgatcagggccagtaccgtgaccagcgtatgcagcatcggcagcggaatcatatccgtgacccgctcgacatatggctgcgaaccaagtaccacgcccacgccgccgagaccgaaaatcaacgcgcccagcaggcagacgcggccttggaggttgaagcggaaattcgagtaatcccaccagcgggcgtggaacagctgctccatgacccacgaggttgtgtattcgagtatcgtggcgcccaccatcgaaatcaggaagatgatgatcgggttatgtacgttgccgagaatggcgacgccgagtatcgcgccggtgccgtagatcgggcacagcgggccgttgaggaaccctcggttgaccaagcggtgctgttggcaggagacgagaatggattcgtacatccagccgacgaaactgtagaacagaaaccagaggaaataatgttcgagtgtgatgatcatcgacgggcttcgatctcggcgtagggcttcgcggcgggcaacgcgcgcttgttgaaccggtcgagcgagaaggtctcggcggtggcggagcatttgtccgccaaggtgaccagatagccttcgatatagcgcggcggcaccggggtcatcgggaacatgtggttctcgatgctgttgcgttcgatatcgttgagcttgaagtccttcagggcattgaccagggcggcgtggccatgggtgaagccatgccactggtgttcgccgttatcccagtcgtgccagtcgtacaggaagtaatcgtgcaggagggccgcgcgaatcagggatttgaggtcgacgcggtaccacaggtgcgcgcggtcggccatccacacagccaggcaggcgacacgcacggaatgttcgaacgtggtgacgttgccgtgctggtagtagcagcgttcgatctgcatgtggcgatgctcgatgacctcacggccgtgcttggcgaccaggcgttgaatctgcgttcgggtgagcagatgtcccacggtttcgaccctccgttcgggttggttcagtgcaatcccttgttgtgaattacgattacccgacgatattcaagaatccatcgagtaataccgtgaccgattgtagggcacacgtatgtccgtgcacactcatccaaaagaacgacaacgggaaccgttaatcgtggtgggtttcaagatagtcgagataaccctgaaaaccgccatcgaggcttgctacatcgtaaccgcgatcggcaaggatttcagctacttcctcgctccaccatccttgagcacaatagactacgacagttcgatctgtgggcacggttttgagcacatgggccagagggtcgagtggtgcattgatggcaccttcgaccgggtgggcggcgaagtcggctggttccctcaagtcgagcagcgtgaccgtattcgggtcgagcttggcaaattccgccggcgtgatgcggcggtacgatgcttcactgctctcatcgtcatcgaccgcattacgcaaagcaataggcatgttcttcccctctcgttccgatcttggctcccctcaaggaggggtgccacatagctctaaatcgcgcaggccggctgaatatagttggccggatcaatagcagtaatggtcggctgctcaccgcacaccgggcagtcgggcacatggttcggcaacggcacacggcggatgttcatggtcagggcatccacagtgagcatacgagccacgagcggctcccccacgccggcaatcagcttgacggcctcagtcgcctccagactgccgatcacaccgaccaccgcgcccagcacgccggcctccttgcaggtcggaatttcacctgcggcgggcatatcgcggaagatgcagcggtagcaggggccttcgcctgggatgacggtcatcacctggccggagaacccgaccacgcccgcatggatatacggcttgccggccagtacacatgcgtcattgatgaggaattttgcggcgaagttgtcggtggcatcgatcaccagatcgtacggttcgatgaggccggcgatgttgctggcatcgacgagctcgtagtaggtgtcgaccgtcacatccgggttgagcgcgcggatggccgtggccgcggattccactttgggcgctccgacacgtgcagtggtatggatgatctgacgttgcagattgctcatatccaccacatcgccgtccaccagtccgatatggccgacgccggccgccgccagatacagggcggccggagagccaagcccgcccgctccaatgatgagcacgctggaggccaacaaccgcttctgccctttgacgcccagccccttcaaaatcagatggcgcgcgtaccgctccacctgttcatcagtcaatgccatgttttctccatgtttccagctcccctcagtccgctacgcggccagctcccctcagagaggggagctaataaaagtgtcagtgcagatatcccgtagtcggactggacggcacggcctgtccctcggtcaccttgcccagaccggacagatacgccgcacgaccagcatcgatggcgtgcttgaacgcctcagccatcagcgggatattgccggcagaggcaacggccgtgtacgccatcaccgcatccgcacccatctccatggcgtcgcatgcctgactcgggcgtccgatgccggcatcgatgatgaccggcacatgcgcattggcgatgatgatctcgatgaagtcacgcatgcgcaggcccatgttggagccgatcagcgaaccgagcggcataacggcggcggcaccggcctcctccagctggcgtgcggcaatcgggtccgggaacatgtagggcatgaccacgaagccttccttggccagcatttcggtggctcggatggtttcggcgttgtccggcaggaggtacttggtctcgtgttcgatttcgaccttgacgaagtcggtgtggcacacttcgcgtgccagtcgagcgatacgcacggcttcctcggcgttgcgcgcaccggaggtgttgggcagcaacgtgatgccttcgggaatgtagtcgagcacgctgttctcggtggtctgcgcgcggcgcagtgccatggtgacgatttgcgtgcctgcatgttcgaccgtggccttgatgaggttcaggtcgtagcggccggagcccagaatgaatcgcgactggaactcgtgaccgcccagggtcagcggcttgtcttccactggcagaatcggcgcggcggtgccgaccggattggtgacggcgggctgcggcggcagcggagtcgcctcaacagatgcttcagtaaccggatcaatattgctcatagcttttcctttcatccaccctgtacaaactgcacaatttccatgacgcactggtcgtcgagcatggcgtcggcacgcttatcgcgcgggataatctcaccattgagttcgatggccacacgctcggcgcggaatccgtgcgcttcgagataatcggcgacgctgaccggcgtctcgagcgtgacctgctctccgttgacctgcataatatcctttcagatagtaaaaaagggtgcacgaaacgaaccgtaccttaagtggtgcgcccattcatgaacccaatcatgcgaccgttcgaccgctgtgatgtattggctccatcacgaccgtctcacggctgaattatgcaaacggaatgaaagctgtatcggagaacccggcaaatctgcaacaacgattccttacggcggcatgacccgcgtcaagttccccggtcgaagtctgacgacttcctctcagcctcacggctcccgttcgttacgatttctcagtgtatgccgttgcagtgacaacagcaaaatagagctccctctgacgagggagctctattgggactagaacgtgccgggggctttgtaggcggagccatccgacgtggatgcggggaagagcttgagttcttcgacctcggccttggcgtcggcgatctgctcgcgcacgcgaccgtaagcggtgccgcccttgccgttgcgggagtcgaccgaaccgtggctggagagcacttcgcgtactcccggagccttgtcggccggcaggaacgcggcgaaggtctcgatgaagtcattgtcggtcagatcccacagttcctggccgcggccttcggcgagcttgacgcaggcaccagagagctcgtgcgcatggcggaacggcacaccgttcttgacaagccattcggcgatgtcggtggccagcgcgaagccggtcggggcttcctcttcaagccgctcgctgtcgaagtgcatggtcttgaccatgccggtgaaggcgggcagcagcacttcgagcgtatcgacctggtcgaacacggcctccttgtcctcctgcaggtcgcgagcgtaggcggtgggcaggcccttcagggtggccagcagaccggtcagatcgccgatgagtcggccggacttgccgcgggcgagctcggcgatatccgggttcttcttctgcggcatgatggaggagccggtggaatagccgtcgtcgagcttgacgaaggcgaactcctgggtgttccagatgatgatctcctcggacaggcgggagatgtccacgccggtcatggcggccacgaacgcgaattcggccacgagatcacgtgcggcggtgccgtcgatggagttgtcggtcacgcgggagaagccgagctcacgcgccacggcctccgggtcgaggccgagcgtgttgccggccagtgcgccggagccgtacggggaggcgttgatgcgcttgtcccagtcgatcagtcgctgcacgtcgcggatcagcggccaagcgtgggccatgagctggtgcgcgagcagcacgggctgggcgtgctgcatgtgggtgcggcccggcatcacggtgcggccggccttttcgctctgctcgatcagggcgttgacgaggtcaagcaggagtccggcaatcgcacgggagtggcggcgcagccacatacgaatcaggcaggcgatctggtcgttgcgggagcgtccggcacgcagtttgccgccgagttcgtcgccggcaatgtcaatcagtccgcgttcgagggcggtggcctcgtcctcatcgtcttcgatgggggcgaaggagccgtcatccacatgacgctggagcgtgtcgagcgcatcctccatgcgctgcagctcgtcggcggtcaaaagtcccgcacggccgagagcacgggcgtgggcgcgggaaccggcgatatcgtcgtcggccaagcgccagtcgaactgcgtggacttggacagtcgggccagttccggcgacggaccggacgtaaagcgaccaccccacagggccagatgttcgttgttctcagtcatgaaggctccttgaaaagtgaaaatagctgtgtttaagcgtagcaatgtgttcaaacatacagttgcccccgctggcgagggctgtcacatggagtgtgactgaggacaatcctttcaaagaccactcccagtcagctatgccgacagcctcgcagcgggggcgactgagtaagaattactcgacggtgttcttcgggacctcgatgccgttgccgaacttgacgtcgcgggctgcggccacgcgggacggcaggccatagatgtcgatgaagccgttggaggacctctggtcgaaggtatcgccggaatcgtaggtggcgagcttgtagtcgtacagcgaggagtcggaacgacggccggtcaccacggcgcggccaccgtgcaggaccatgcgaatctcaccggacacgtacttctgggtgtcttcgatgaaggcgttgagcgactgggttgcaggggagaaccactgcgcatcgtaaaccagctcgccccagcgcttgtcgatgtcgcgcttgatgcggtgctgttcgcgttcgaggcagcagttttcgagttcctggtgagcggtgatcagagccacggcacccggagcctcgtacagctcgcgggacttgatgccgaccaggcggtcctcgatgaggtcgatgcggccgatgccctgggctccggcgcggcggttcatctcttcgatggcctgcagcggggtgacgtcacgtccgtcgatcttgaccggcacaccttccttgaactcgatgacgacttcatcttcgaccggcgggaaggccgggtcgtcggtgtaggagtagcagtccttggtcgggccgttccacggatcctcaaggaagccggtctcaatggcgcggccccatacgttctggtcgatggagtacggggacttctcggtctgggtgatcggcaacttgtgctccttggcgaacgcgatctcgacatcgcgggtcagggacaggtcacgaatcgggctgatggccttcagcgtcgggtcgatggaggcaatggagacctcgaaacgaacctggtcgttgcccttgccggtgcaaccgtgggagatggtgtcggcgccgaactggtgggcggcgcgcacgaggtgcttggagatcagcggacgggagatggcggagaccagcgggtagacgccttcgtacatggcgttggccttgagggccttcatgcaatattcgttggcgaactcgtcacgggcgtcgaccacgtaggattcgacggcaccgcaggcaagggcgcgctgcttgatggtctcgaggctttcgccgccctggccgacgtcgagggacacggccacgacgtccttgccggtgcgctccttcaggtacgagatggcgacggaggtgtcaagaccgccggagtaggccagaacaatgcgcttgttatctgccattggttccctttcattcaaggtctgaaaaacaaactgatgcaagtatatacagaggactgtatatttatgcacggcgtgttggttatttggaagcgaggcttagtagccagtcggagcgggagacggcggtgtcgtcattggtgcaaatcaccatgacggtgtcgtctccagcgatggtgcccagcacgccttcgatcggctgcctgtcaatcaccgaggccacgtattgtgcggcaccggaaggcgtgtgcaccacaaccagatttccggcggcggccaccgaggtgaccagtccgttcagcacgcgggacatctgtgcctcaccgcgctcccctacatcctcaccttccgaagcaacgacgctgcgacccaccgtgtaggccaccgtgccgtccttcagccgggtcttcaccgcatgcatctcgtcaagatcgcggctcagggtcgcctgagtcaccgcaatgccctcgtcgataaggattttggacagctgtgattgcgaggtgatgatatgcgtggcgagcgcctgttctatggcactcagccgcgccgccctggtggcagggcgctgcagggacggaccggtttcactcatgcgagcaggctttcgtctccacgggccttgccggccaaccaagtcagcaacgctttctgtgcgtgcagacggttctcggcctcgtcccacaccacggactgcgggccatcgatcacttcagcggtgacttccttgccgcggtaggcgggcaggcagtgctggaagagcgcatccggcttggccaatgccataagttcggtgttgacctggtaatcccagaacggcttggaacggatggcgtattcggcctcctcgcccatggagacccaggtgtcggtgaacacgcagtcggcgtccttcaccgcttccttggcatcggtggtgaccaggatggagccgccggtctcggccgcgacgcgcttggcgtcggccacgatgtccgggcggggcaggtagccgtgggggccggccacgcgcacgtccatgccggccacggcaccgccgagcaggtaggagttggccatgttgttggccgcgtcaccgaggtaggcgatggtctggttcttcaggttgtcgacgccgcctcggtgctcggcgatggtctggaagtcggcaagaatctggcagggatggaagtcatcggtcagggcgttgaccaccggatgggtggagtacttggccatttcttcgacgcggtcctggccgaaggtgcgccacaccacgccgtaagccatgcggtcgagcacacgagcggtatcggccacgggctcgccacggcccagctgggagccggacttgtcgatgaccagcgggtagccgccaagctcggcaacgccgatggagaagctggaacgggtgcgggtggatggcttgtcgaacagtacggcgacggcctgcggaccggcgaacggctgcttgtagaagcggtcatggtggaacttgatggcaagttcgagcacctgcttctgctcctcatggttgaggtcgtcgtcacgcagcatgtggcgaagttctggggtcatgatgatctccttggatcggtgggtcggcagtgacggcgagaaatcagtcgtcgggcaggtccgtaggcacatccttgaggatggcaagtgcctgatccacgtcttgagcggttacaatcagcggcggtgcgaaacgcagcgcattgggagccaccgcgttgacgatgagcccgtgttcgaggcagtagttcatcaccgcgtgggagcagggatgcttgagctcgacggcgtccagcaaaccacgaccgcgtacggaaacgaacagcggattaccggtggccataatgccatcgcgcagctgttcgccgcgagcttcggcgttggccaccagattctcgtcttcaatcacgccaagagtggcgagtcccgcagccgcacccagcggattgccggcaaaggtggagccgtgggaaccaggagtgaacagagccgcaagtttctcgccgaaagcgatcatgccgcccatcgggaatccgcctgccacgcccttggcgaaagtcaccatatccggcgtcacgccgccggacagatcgtcacgctggaatgcgaaccacttgccggtacgtccgataccggtctgtacttcatcgatgatgagcagcgcgtggttgatatcgcacagttcgcgcacgaacttgacgtaatcggcgcccaacggctgcacgccggcttcgccctggataagttccagaatcacagcagccaccggacccttgccatagcgaccgagaccggtctgtgcaaaagcgtcgtgcagggcgaccttgtcgccggcgcgcacgaattcgatgttcggcaccagcggatcatacggcttgcggataccgggtttccatgtggcggacagcgcacccatcgtacggccatggaagccgtgagtcattgcgagaatgcgtgcgggcttgccgccgatggaaggcagggcaccaggcaaggtgcggccatacagcttggcaagcttgagggcagcttcattgccttcagcaccggagttgccgaagtagactttggagccttcaggtgcaccagccagcttgaccagtttggatgccagctcaatttgcggctcggacgcgaaatagttgctgatatgagccaccttggcagcctgatcggcaaccgctttgacccacttggggtgggcgtatccgagggaattgacggcgatgcctgccaggaaatcgaggtattcgttaccgtcaacatcccagatgtgggcaccttggccgtgatccatgacgcgcaacggcgtaccgaacacattcatgtggacctgagagtactctcccagccacttgctgtcttccgtacctagtttttcctcatgctcagtagccataagagctcctcatttccagtccttcatcgggcataaccatggtaccgatgcctgcggaggtgaatatctcattcaaaatcgaatgcggcttgcgcccgtcgatgatatgggcttggggcacgccaccgtcgatggccctgacacaggcctccatcttgggtcgcataccggattccaggtccggcagcatatcgcgcaggttttccacaccgatccggccaatcagagaattcttgtccggccaatcggcgtacagaccatccacatcggtcaagataacaagcttgcgtgcgcccacagcggcagccaaagcggcggcggcggaatcggcgttcacgttgagcacttcagtggcatcttcttcgttcggagccacggaagagacgaccgggatacgaccggcggccaccagatcctcgactgccgaggcatcgacggaaaccacatcgccgaccaagccgatatcggtgggcttgccattgatgatgggcctgcgctgcatggccgagaacaggccgccgtcttcaccggacagacctacggccagcgggccgtgcgcgttgatcaggccgaccagttcgcgtgacaccttgccggtcaggaccatgcgcaccacgtccatggcctcgggggtggtgaccctcaggccgcctttgaattcggatttgatgccgagggccttgagcatgtgggagatctgcgggccgccgccgtgcacgacgatcggatgcaggcccacctgacgcaggaagaccatgtcttcggcgaagcactgcttcagatggtcatcgaccatggcgttgccgccgtatttgacgacgatacgctggccggcgaactcctccagccaaggcagcgcttcaataagcacttccgccttctgatcggcgcgcaaatcggtgtgcacgtcgaaatggaacccaggtcccttcaattctgtagccaatttttctcttttctgcgacgccggcgacgctatcgctgccggctgccacaaacagcccactgggctgtttgcgttatatgcgacgccggcgacgctatcgctgccggctgccacaaacagcccactgggctgtttgtcagctttcgtagtcggcgttgatgtggacgtattcgtgggtgaggtcgtcggtccagacggtggcctcggcgtccgagccggtgttcaggtcgatgtcgatgtggacttcgcgcggggtcatgtcgacctcgctgcggtcgcggccggcgccgccgttctcgcagatgcgcacgccgttgacgtccacggtcaccttgttcgaatcgtaaggcgcgacttcaggcggcacagtgcccaaggagctgacgatgcggccccagttcggatcgttgccggagatggcgcacttgagcaggttcgaggcggcgacggcacgaccacaggcaagtgccgcgtcctcgctggtggcaccggtgacggtgatacggatgtcgtgggaggcaccttcgccgtcgccgatgatctggcgggacagggagacgcaggcctcacgcaccagcttgttgaattcgtccttgtccggttcgacgccggaggcaccggaggcgagcagcaggaccgtgtcgttggtggacatgcagccgtccacgtcgatgcggttgaacgaatgttcggcggccacggcgagtgcggcctgcatctggccggcggagacgaccgcatcggtggtgatgacgcacagcatggtggccagctgcggggcaatcatgcccgagcccttgaccatgccgccgatcttccagccgttggagccggtcagttcgaccgttttcggcttggtgtcggtggtcatgatggcgtgggaggcggcggcgccggcttcggcggtggcggcaagagcctcatgggcactcttggcaccagccaacacgttgtccaacggcagcagttcaccgatgagaccggtggagcagacagccacatcattcggttcggcaccgatgagcccggcgaccgtttccgcggtggcgacggactgggcgtaaccggcctcgccggtgcaggcgttggcaccgccggaattcagaatcacggccttgacgtgaccgtcggcgacgactttacggctccactgcaccggggcggcgcagaaacggttcgaggtgaacacgcctgcagccgcgtcgagcgggccgttgttgaccacgagggccaagtccttcttgccttcgacggatgaaataccagccgccacgccggcggcggagaaaccttgtgcaaatgtaacgctcacggtgctactccgatcttggtcaggcccgcgtcttccggcaggccgagtgcgatgttcagtgattggaccgcttgtccggcggtgccacggttgaggttgtctatggcggcaaaagcgtagatgcggccggccttgcggtcggcgacgacctgcaggtgggctgcgttggatccgatgatgttgccggtggcgggcagtgtgccctcgggcagcagcaccatgaagtcctgaccttcataggccttggaccatacggcgcgaatctcctcatcgctcagcgccttggccttgtccgtcatgcgggcggacacggtggcgaggatgccccgggacatgggggcgagaatcggcgtgaaaccgagcgtgaattcgctggcttcggccgcgctcttgccggccgcgtgggcgaagtcctgcaggatctcgggaatgtggcggtgcttgccgcccaccgaatacggcagggcggattgcagggcctcggcggcaagcaggttggtgcgcttgagattcttgccggcacccgagtatccgacgaccagatcggccacgatatcctgcgattcgaccagtccttcggcgatgcctggctggagggccagcgtggtggcggtgacgttgcagccagggcctgcgatgcgcttggtgccaggaagcgccgcgcgctggcgggtgtaggagccgtccgcggctttgccggtgatgagctcgggcatgccgtaggtccaatgctcatagaaatcgccgccgtagaactcatcccaagcggcctgctcttcgagacgatggtcggcgcccaaatccacaaccacggcattcggatcgagctgcgaggcgagcttgcccgaagcaccgtgcggcagtgcgaggatgataacgtcatgcccgttcagcacttcgggcgtggtatcttcgacgaccagattggccagttggggaatatgcggcatgtgcttggccatcgactcccccactgaggaatggcctgccacgcaggtgatgtcgaagtcggggtgcgcggccagaatgcgcagcgcttcaccgccggcatagcccgtggcaccggccacggccactgtatatttcgccatactcatctcttttcactgatgtgtcttgggatgagtatacgcgattatgcagactattgcatatttatgcagtgggtgtgttggtatgtgaacgccacttatgcggagatggagtcggaggaggagccggtgccgccggtgagttgctggagggcttcctggtagaggctcatggcgtcatagccattgaaggccatccagatgacggcgatggtgtacagcacgttgatcaccacggcggccacagccaaaccgaagcccttcatatggaaggtgcgcgtgcgccacattgccaccgcgcccatcagtgccgagagcactggcaccgggaagaacagggcgaggataaaggagatgatcgcatacgaatcccagtgcccgtagagtgggttctggtttggatcgttcaggtcgatgccgtggtaataatgcggctggtgaggctgaccgttcggctgttgaccatacggctggccctgcatgcccgggtacccgcccggatatgcgcccggaccggactgttggccgccttgagcatacggccagccgcccgcctgctgattgccgggccacgccggctgctgaccgtacggctggccggcctgctgggattgcgccgcgccaccgttgatgccagcggctgcggcggaatccttcttggtatccggctcgggagcgccataaatatacgggttgtaattcggcccgtattggccagacatagcaccatattcaggctgctggtactgcccgtatttcggcttgtcctgctccggttggctcatgacgctcctcgattcggatgatcggttgggtcaggcgcgcagctgggcgccgatttcggcggcctcagccacgatggccttgcggatggcgtcgctgtcttcggcggacagcgtcttgctcggcgaacggaacaccaccgcataggccagggacttcttgccctcgcccacctgttcgccggtgaacacgtcgaacagttcgatggattcgaggttcgcgccggcggccttgcgaatcacgttctcaagctggcctgcggtcacggtctcgtccacggtgaaggccaaatcctgcttgaccggcgggaacgtggagatcggcttggcctggacgggcttgccggtcagcgtggcgaacagcgcggtgaggttcagctcgaaggccgcggaatgggccgggaagccgagcgcctcgttgacgcgcgggtgcagttcaccaacccagccggtgaagacgtcgcccaccatgacgcgggcgacgcggccggggtgccattggacgggcacatcgtcggcggcgggctggtcgagttcgattgcggcaccgatacggccggcgatgcggcgcacggcctcgacggcgtcggaccagtcgaccgggcgcttgccgcccatccagccatcgtcctcggccagaccggtcaggatgccggccacatggtcgggctgttcgggcagaccggcgtcaagcgcggcgagctgttcgtcggtggggcgcacgccgccgggcagtgccgggatggcgggcgcgttcggatcccacaggtagacgtggccgagctcatacagggacacgttttcgatgccgcggcggatgttgcgctgcacggtggtggccagggtcggcagaatctcgcgacgcaggtacggacggtcgccgtagagcgggttggcgatctcgacgctgaccttcttggtggcttccgggtcgaagccgaaggccttgtaatcgtcgtcgcccacgaacgggtagctcagcgattcgaccatgccgaactcggcgagctcgtccgccacgcgacggcgacgctgctggtccggggtcaggcccaccagaccctcgaccggtgccggcggcacggtgatcggaatctggtcgtagccgaccagtcgggcgatttcctcgaccaggtcgcacggctcgttcaagtccgggcgccagctcggcgcggttacggcgaactcgccgttgccgccgccggccaccgtgcagccaatgtcggtcaggatgtcggagatgcggttgatgtccacgtcgaggccggccacgcgggccacttcggaggccttgaagtggatgaccttggcgcgcggcgtgttgttcacgtcgttcgggtgttcgctgggctcgccattgccgtacttggccatgagctcggcggccatctgggtggcggcgggctgcagcgcggtgtcgacgccgcgttcgaagcggcgggaggcctcggatggaatcttgtggcgacgggccgaacgggcgatggtcacctgatcgaagtgcgctgcctccagaagaatgttcttggtgtcagcggtcacttcgccatacaggccgcccatcacaccggcaaggccgaggatgcgcgagccgcgttcgccgttcggcgaatcggtgataagcagatcttcgacgctcaggtcatgttccttgccgtccagggtggtgagtttctcaccctcgttggcgcggcgcacgacaatcgggccttcgagcttgtcgaggtcgtaggcgtgcatcggctggccgaggtcaagcatcacgtagttggtcacgtccacggccaaggagatggagcgcatgccggcgcgaatcaggcggcggcgcatccagttgggcgtgtgggcgttggggttgaagtccttgacgatgcgcgcgtagtagcggtcgcaaccggtcacgccgtgaatcggattgttatcgtcgatttcaacatcgatgtccaccggggtgccgggctggtagtcagcaggttccggggccttctcgttcagtgccacggccggatcggtgtaggcggcaccggtggagtggtggtattcgcgggccacgccacggtaggacagcgtgtagccacggtccggggtgatgttgatctcaagcagaggctggtcgaggtgcagcaggtgcatggcgtcctgaccaggcttcagagcctcatattcagcctcggagaagccgtactgacgcagcagaatgatgccattgtggttgtcgcccagacccagctcacgttcggaggcacacatgccgttggagatgtggccgtaggtcttgcgcggctcgatcttgaagtcgccgggcagcacggcaccgggcagggtgacgacgaccttttcgccggccttcatgttgggcgcgccgcagatgatgccgcgcggcaccttgttgccgtcttcgtcggtctcgttccattcgtcgccgcagtccacgtggcaccagttgatggtcttgccgttcttctgcggttcgggggtggcgtcgaccacgtagccgaccacaatcgggccggtcacctgggaggagtggatctcctcttcctcaagacccaccttgacaaggtccttggcgagctgttcgtaggtcaggccttcgggaacctcgacatggtccttgagccaatcgatatcgatcataggcatggctgaatcactcccccatcacaaactgttcggcgaaacgcacgtcaccttcgaccaggtcgtgcatgtcgttgatgtcgctgcgcagcaggagcgtgcgctccatgccgacgccgaaggcgaaaccggtgtagacgtccgggtcgatgccggcggacttcagcacgttcgggttcaccatgccgcagccgccccactcgagccagccggggccgcccttcttgtcggggaaccacaggtcgagctcggcgctcggctcggtgaacgggaagtagctcgggcgcaggcgcgtcttggcttcagggccgaacatggcgacggcgagcttgtccagcacgcccttcaggtcggccatggtcaggtgcttgtcgacggcgagggcttcgcactggtggaacaccggagtatgggtggcgtccagctcatcggtgcggaacacacggccgggggacgcgatgtacagcggcacgccacgggtcaggagggcacggacctgatcggaggaggtctgcgtacgcaccaccatgttggagccgacgaaaccggcggcgtccttggcttgattgcccttgacgtagaaggtgtcctgcatctggcgggccggatggtccgggccgaagttcagggagtcgaagttgtaccattcggcttcgatttccggaccggaggagatctgccagcccatggagatgaagaagtcctcgacgtcttccatcagcttgggcagcgggtgacgggcgcccagaggcttgcggttcaccggcagcgtcatgtccacggtttcagcggcgagtgcggccttctcggcggcttccttgagctcgacctccttggggccataggcacggccgaagtcggcgcgcagcttgcccatgagcttgccggcttccttcttctggtcgacgggcagggagccaatggccttgctggccttggtcatcgccgaatcggcacctgcgtacgttgtcttgatggccttgagctcctccaggttggaggcgttctggattttctcgatgcccttggcaacctcagcggtcacctggtcggcgtcgaacaccatttgttctgccacgagaaccctttcgtctgatgttttctcagcgtttcacagcgtttttaccggtttcacattctttcaacatgacccgacatagacagcgacatcaacatcaccgcggccgaggtgccgaggttcagcgattcggccttgccgtacagcgggatggagacgatgcggccgcagcgtgtgaggatgtccggttccaagccacgcgcctcattgccgaacagcacggctttcggagcctcgaccgccgccttgtccgccagtactgcgggcaggctttccggcttgcattcttcggtgccgtatacgtcggcggcccagacgcccatattatggtcgtcgcctgtccaggtgaagaattcgtcggtgctcatggcgagtaccggcagatggaacagggagcctgcggtggagcggatgaccttggggttcagcacgtccacgcagtcgtccacgaagattacggcgtcgcagccggccgcatcggccgcacggatcacggtgccggcgttgcccgggtcgcgcacctgccagaaggcggcgatctgcgggccccggccgttcttgccaagttcgacgtcatcggcaccggcgtgcatggactcggcattgccgacggccacgatgccctgggcgtccggactgatgcggtgcatcacgtcgccggtgcagtagtgcacataaatcgtggcatcctgcgaggtttcgacgatcttctccaacgtggaggagatgatacgcggatgttccaacgcctgcgaaacctccacatagaggtcctgcaccacgtccggccgccaagtgacggcctcgcgcacggattgcgggccttcgataagaaaacggcccgaacgttcgcggcctttggcgcgggtcagatcggcgatgcggcgaacgcggtcggatttcggattatcaagaatctgggcgttgatgggcatagccactaccctactgccgggtcattacgtcagtcgtggctcgctcccgctggcggaggcatcgtaagcctttcagacaccttgaaaggcactgtgccagtctgtcgcctttcagacaccttgaaaggcgaagtgccaattcccggtgccgatggctacgcctatggaggccagcgggacagccagacagatgacgtagaagatccagtcgataggcttcagacgcgagatacgggcttgggagcgtggggcgctggagccgaagccgcgcgcttccatggcggtggcaagtttggtggcgcgccggatggaaagcaccagcagtccgaacgcttgggagagggcacgggcgatggcgttaccgtcgccaaggccgcgcgaacgctgggacaagccaagtgcgcgccaatcttcctgcagcagcgtaaacatgcgcaatccagccaacccgccgtatacgaatcgcggtgagaagtgcagaatctcaaccaaaccgtccgccaaatcagtgggatcgaggcccagggccagaatcacgccgggtacggcaatggccgccaccctgatagccgtggcgatggccagattaatggatccctcgctgatcacaatccagccaccctgccacaggatctcgcccgaggtacggccgtagagaaacacggagataaaactgccggcggcggcgatccataccggccaggtcttacggcatacggtccacggagccacgccaccaatccacagcagcacgaattcgatgccgagcgccgtggatgcggataccacatccagactgatgaacatcggaacgcacagcaacagcgcaccgatgatgcgactgaccgcgttgatgcgcgctatgaaccatgagggcgatgaggctttgaccggctccacgcgcgtttcctgcgggctgacggttaccacgtcactcatgcctcgcctcctcgaacatcacgcgtcgtgcgcccagcgcatccaccagcgcctcatcgtgcgtcaccatgaccacgcacgagccttggtcgcggatggcggcgatcagcttgaccatttcattccacgtactgaaatcctgtccgaatgtcggttcgtccatcaccaacactttgggtgcggcggccagcatggaggccacggacagtcgccgcttctccccgccagacaaggtatacgggttggctttggcgaagcgcgtgagattcatctgctcaagcatgcggtcggcggtccgataagcctcgtcttggctctgccccatcgacttggggccgatggcgacttcgtcacgcacgaaattggcagcgaactggtgttcgggctcctggaacaccatgccgatacggcccagcagttccttgcttttccagtcaatcggctcacgcccggcatgcgcgggcttgaggttgtcggcgatgagcaccttgccggcgataggcttgagcagcccggccaaggtcagggccaaggtcgatttgcccgcgccgttcggacccatcagagccgttacttcgccgggatagaaattcagattgatgccaacgccaagagcggtcccacggccaaagcttaagttctcggtgctgagcaccggcgcatcgtgcgcaggctcccgcttcggcgagtaatcgggaatcgcacggcccggcacccacgcgccaccggcggccaacacgtcgcccatctcggcgaacacctcgtccggcttgccgtcggcgatgaccgcgcccgtgggcgaacttgcatcgggtcggccgagcacgatcacgcgatcgaccagatcgagccatacatcgatatgatgttcgaccacaaccatggtctgtccggtggcctcgatgacctttttgaccgcgtcatgcacctcgaccacgccttcggggtcgaggttggcggtcggttcgtccaacaacagcagaccgggcttcatagccagcacgccggccaacgcgagacgttggcgctgaccgccggacagatggcgggtggaccgatccagttcgagtccgccgagtcccaccatatccaatgattcgcgcactcgctgccgaatctcctcgcgcggcacgttgaggttttcgcagccgaaggccgcgtcatcgcccagtcgttcaagaatgatctgcgagtccgggtcctgaagcaccagtcccacgcggcctcgcgtctcgcgcgcatcgacgccatcgatggtgagcgagccctcctgctcgccttcctcatcgccgccaagtacgcctgcgagaccggccatcatcgtgcttttgcccgcccccgaagcaccgagcagcaacacacgttcacctggccggatggtgaaatcgacggcacgcaacgcgaagtccttacgcgtggcgtgccgccatccccagccgctggcctctaccgcagccggattaacctgcatcagacgcgcgccttgctgcggccggattcaaagcgttccagagcgccggtggcggcgagcgcacgagacaagtaccagaccaccacgccggcgatcacgacgccggagatgatggagccaaccagataccaagtgacgcgcaggccgttccagcccgggttggtggcccagtagtaggcccagcagcccacgccggcgagcgcaccggacaggatggtggtgccgatgttccacttcttccaagcgaagacggcgaaggcgatttcggcacccagaccctggatgatgccgacgatcagcgagccgccgacgccccactggttgcccagcgtaagctcgaggaaggcggcgagggtttcggcaaacagtgcggcaccgggcttgcgcacgatgattgcggcgagcgggccggcgaacagccagaatccgttgagcagaccctcgaaaccgggggtcacgccttcgaacagggccagcggggcggagcagacaatgtcccagccccagaaaatgacgccggatacgacggcgatgattgcggcgacgacgatatcgacgacgcgccacttgtaattggctttggccacagcttcagtcatgaatgtgcctttcttctgctcgtacgcaggccgaacatacatggatatatgtacgcacatgatgcacatgttcgtggccacgcgcgggttggttcaggcacgggtgggtaagagcgacatttccgtgcgccggcattatccggtcacgttccatcggtcgagactatgaatctcctctcagccgcctaacggcagctcccgtgtcaactccccgactataaagcaagccgccgtcaaaggcaatagccacatccgtgacctaccggacggcggctcgccaccattaccgatgcggttcggttacttgccgagcttgtccagcagcaaagcctcggtgatcacgttgttcttgaggccgggcagggagatggactcattggggctgtgggcgttggccttcgggtcttcggggccggtgaccagcacctgagcgttggggaaaatgcgctgcagttcggggatgaacggaatggagccgccctcgcccttgttgatgggctcaacgccgaaggcctcggtcatggcttccagcgcgtctttggtggccacggcggtcgggtccatggcccagcccatgccgttttcgccgcgttcgacagtgaccttggcaccgaacggcgcgtgggattcgaggaatgcagccagtgcttcctgcgcttcttcagggcgctgggtgggcgcggtgcgcagcgacagacggaagcgggtctccggggcgatcacgttgaaggatccctcgaccgggtgggcgtcgaagccgatcacggtcacggacggcttggtccacaggcgtgaggccagcgaaccggtgccggcgaactcgtaaccggccaccacgccggaatcctcgcgcacggtggtttcgtcaaggtcgcgttgcaaaccgccgattggctcttccgcggccacgccgggcacggccagatcgccgttctcgtcgtacatggaagcgatgagcatggcggccaacgtgttggagtcgagaatcgggccgccgtactgaccggagtgcaccgggtgctcaaggccctgcacggtcacgtccacgcaggtgttgccgcgcagcgaggtggtcaaagaaggaatgtccgccgaccagttgccggaatcggccacgataatcacgtcggcggcgaattcgtcgcggtgagcctcgatgaagggaatgaagcttggcgagcccatctcctcttcgccttcgatgaacactttgatattgacgttgaggtcgtcacccaaagccttcaacgcaccggagtggatggcgatgccgccgccgtcatcggcggagccacggccgtaaagacggccgtcgatttcggtggccacgaacgggtcggtgttccactcggccgggtccggaacaggctgcacgtcgtgatgggcgtagagcagcacggtgggggcgtccggagaaacgatatgcgagccgatgacctcccatgcgcccggagtgccgtcggcattggaagcctggaccaccttggcatccacacccacgaggcgcagttcgtctgccacgaattcagcggagcgcttcatatgttcggcggtgatgcccttggcggaaatcgactgcagcgcgaccttttcggccagcaccttgacgatgcggttccaatcggtttcgacgcgcgaacgaatctcgtcagcggtgagcgttgccatgatggtcctcctttatatgtgtgtgagcggcgtcattgcaatggttgcgccagtatacaagtgtctgaacgtcaccgtaacctcaaagcatgacatggaatccgtttaggaaaaaagaagaggcccaagttcccgttgagcaggccccgaagaagaccgccgatccttctgagaaaaaaggccgtcctaccccgaagatgaagcaggctcaggccgccggtatccgtccgctggttccggtggaccgcaaggccagcgccaaggccgccaaagcccgtctgcgtgagaaggagaacgccgagtacgaggcgatgcagaagggcgatatcaaccacatgcccaaggcggaacgcctgccttggcgtatctacatccgtgattatgtggatgcccgtttcaaccttggcgaatggttcatcccggtggccttcgcgattctgatcgtctccatgttcgtcacttctttgatgcagaaccagtgggcttccatcatcatgatgacgcttatgtacggttacctgattgccgtgatcatcgacgtatggctgatgtggcgcaagctcaaggccaagctcatcgccaagtacggcgaacagtccgtgtccaagggctcccgctccttctcctacgcttggagccgttcgattcagatgcgtcgttggaggcttcccaagccgcgttacccgaagcgcggtcactggccggcagactgatgtccatatatactctggctcccctcgttgaggggctgagccgtaaagaaaacagtccagtggactgtttttaggcgaagtggcggcgatagccgcatatggctccctagcatgggagccatacttatatgcaccaaggaggcaatcatgagcgaacagtttgatctggtcatcatcggggccggccccggcggctattccacagccctgcgcgccgccgaactcggcatgaaagtggcactcgtcgagcgtgacgccaccgtgggcggcacctgtctcaaccgtggctgcatcccctccaaggcgctcatcaccgccacccacaccatcgacaccgtgcaccgtgcggccgaactcggcgtcaacgcctcggtgaatggcatcgacttcggcacgctgcgcgactatcgcctgcgcgtggtcaagacgatggtgggaggactggccggactgctggcccatcgcggcatcaccgtgttccgagccaatgccgcgttccatgcggatgagatcgctccagcaacttccaaccacatcgtccacctcgttccctcccccgaccaaagcgacatcctcacctatcacaaggccgatgtccccgaacccagcggccccacgatggacctcacggccacgaacatcgtcatcgccaccggtgccaagccacacccattgcccggtaacccgttcgccggcgccctcatcgactccacacaggcgctggaagtcaacgaatttccctcttcggcggtgattatcggcgccggggccatcgcccttgaattcgcctcgatgtggaacgccgccggttcgaaggtgaccctgctgattcgcaaggaccgcgtgctctcagcctgggaccggagagccggcaccacgctgacccgtgagctcaaacgtcatggcgtgaacatcatcacccgcgccagcgtcacccatgtggacaccggcgcgaaccttggtgccaccgtgcactacacgcgcgaaggccaggacggcgaacagagcgtttggggcgaaatcgcccttgtcgccatcgggcgtgacccgatcaccgacccagcatggggcgtgacgattgatgaccacggacatgtcgccacggatgcgtacggtcgcaccgacaaaccgggcgtatgggcggtgggcgacgtgacggccggtcacgcactggcgcatcgtgcttttgagcaaggcatcgtcatcgcggagaccatcgccggactcaatcccaagccggtggacgaagccgctgtgccgcagatcgtgttctccttccccgaagcggcgtcggtcgggctcaccgtcgaacaggcgcaggcaagagaggacctcgtcgaaatcaaggagaccaactatccgatgctggcgaacgcgcgcatgctgatgagcggcacggccggctcattgaccatcgtctccggctgcgacgcggccaacccgtgcaccccgcgcgtgctcggcgtgcacatggtctccccgatggcctccgacatcatcgccgaagccgaacagctggtcggcaaccatgtgccgctcgccgacgcagcccgcctcgttcacccgcatcccacattcagtgaaacgctcggcgaggcgctgctcaaggccgacggacgaccgttgcacacacgctgagaccaaccagcacaagcaagttcggaccagcgcacctgataagatattgcccagtgtgtttcgtcccaacaaaggaagaagtgatggcggaaaaggacgcgaagccgaagaagcagagcacaatcaagcagatcatccagatctacaagtacacggctaaggaagacaaggccctgccgtggcttgaggccggtgctttcctgctgcctgtagtcgtgatgatcatcatcggtctgattgtcaagtggacctggctgacctggatcttcaccatgattaccgccatcatgctcggcattctgctggccaccatgatgctcacccgccgcgcggatgcagtcggctacaagcagattgatggcaagcctggtgccgccatcggcgtgctgagcaacatgcagaaagccggctttgacttcccgcaggaaccggtgtggatcgacccgaagaccaaggatgccatctggcgcggcacttcgatgaacggcatctacctgatcggcgaaggcgaatacggtcgcgtcatgaaggcgatggatcgtcaggaacgcgatatcaagggcgtcaccgccggctcctccattccgatataccgcatcgccgtggggcacggccccaagcaggtgccgctgaccaagctgcgtagcacggtgatcaagtccaagagctatgagcccacgcaccacaagaacgcactgatcgccaagattcatccgcgccgtcgcttcctgctgaccaaggccgagatggaaacgctgaacgatcgtcttcgcacgctgcaggccaagaagggctatgccatccccaagggcatggatccgaaccgcccgcagaagatctcccgccgcgcgatgcgcggtcgctgatcggcagcacaccaccaaatcgcacagaagccccggaatccggtcaatcggttccgaggcttcgtcatatgtctcataatcgcgtccacatacatccacctacatcacctgtcaatacccactgtccacgttgcggacatctctatctactcccccgatagcctccgtttccattctgtaatgatgtttcgttgaaataacgcgcctgcgtgattgtcggccacagtcacgaaacattctcgtaacccaagtttcgagccggcgaaacgcgcgattttacgatatataccgttatatctcatacgaaaggagcggtcccgtgaccgaactcaagtccaaggaagacgtcgaggcccttatcaacaaggaaggcatcgagtatgtctccgtccgtttcaccgatcttatcggcgttcagcagcacttcaccgtgccggctagcgaattcctgaaggacgctttcaccgacggcatgccgttcgatggttcctccgttcagggcttccaggccatcaacgagtccgacatgaagctggtcccggacgttgagacctctttcgttgacccgttccgcaagcacaagacccttgacgtggccttctccatcgtcgacccgctgaccgacgagccgtactcccgcgacccgcgtcaggtcgccggcaaggccgaggcctacctgaagtccaccggcatcgccgacaccgcatccttcgctcctgaggccgagttcttcatcttcgacaaggtgcgtttcgagaactccatgcagcgctccttctacgaggtcgactccatcgaagctccgtggaactccggcgttgacgttgaggaagacggcactccgaacatcggtttcaagaatcgcgtcaagaagggctacttcccggttccgccgattgaccacacccaggatctgcgcgacgatatggtcgccaacctgcagaaggtcggtctgatcctcgagcgttcccaccacgaggtcgccggcgctggccagcaggagatcaactaccgcttcaacaccctgcagcacgcaggcgatgacctgatgaagtacaagtacgtcgtccacgagaccgccgctctggccggcaaggctgcgaccttcatgccgaagccgatcgccgacgacaacggcactggtatgcactgccaccagtccctgtggaaggacggcaagccgctgttctacgacgagaagggctacgctggtctgtccgatctggctcgctggtacatcggcggtctgatcaagcactcctcctccgtgctggccttcaccaacccgtccctgaactcctaccaccgtctggtcccgggcttcgaggctccggtcaacctggtgtactccgctcgtaaccgttctgccgccatccgtattccgctggccggcacctccccggctgccaagcgcatcgagttccgcgctccggatccgtcctgcaacccgttcctggccttctccgcccagctgatggctggcctggacggcatcctgaaccacatcgagcctccggagccggtcgacaaggacctctacgagctgccgccggaagagcacgctggcatcaagcaggtgccaagctccctggccgaggctatggacgccctggaagaggaccacgacttcctcaccgccggcgacgtgttcaccgacgacctgatcgagacctggattggcctcaagcgcgacgagatcgaccaggctcgcctggccccgaccccgctcgagtacgagctctacttccacatctgagtttgagagcttagcaacgttgggatttcgccattgctcttctcttgtgggagtctaatgggagtcattcagcgtaactagaaagaacctcgtgaaattcgtttcacgaggttctttaggctggacataaagcccacggccgcacattcatcgatgaccaggaagccctcgcggtcagccatcctgaggttctcttcgctatacgggtagtgcgaggtacggaaggagttcgcgttgacccatttcatgagttcgtagtcgcgcttgatgacggccggattctcgccgcgaccgttgataatgctgtcttcgtggcgaccgaaacccttgagattatctttcggccagaacaacagaaaatggttcctgattcgtggtaaaaagaatagccagcatttatctatgaatgagattccaagcgccggaggccccggcattcttttcatcgaaggggacaattcagaacacgaccgccgacacaatcgtcagggaggccagcgagaacagcgtgcttacgagcacgaagccgaccgcatactcgggcatgttgttcttgcgaccggtgaacatggcgatggtggtcatggtcggcagtccggcgatgaccgtgatcatcagcaccatgtcatgggtgatcggcagttgcggcgatgcgccggtcaacgcggtcagtagcgcgtagaaggcaagcgggaatgcgatcatcttggcgactaggccagcatagagttcgtagcgtttgaggacgccccaccacttggtcagtgcgaacaggccgcccaagtagattagcgacatcggcgtggccatattgccgatggtgtgcagcggcttcaggatgatgtccggcaccttgacgccgagcagaatcagaatcagggcgagcatcacgccgatgaaggcggga

SEQ ID NO: 2267 - DNA, 13907 bp, Unknown
  R119_18m  MAG No. k141_6499
cacgcagatcacgctgtggtcgcggcgtgggtcggcgcataccgggcatgggctggtttcgcacacgttgccgcagatatcgcagaaccgtactttttccttgacttccgtgatggcgtcgatcagtgcctgcgattcctcatcgggcgcgttgagcaggtagaaggcgatgcgttgcgcgcctttcggcccgatgccgggcaggttggcgaacgcgtcgatgagtcgttggatggcgccgtcataggccaaagccatggttcatacctttcgttgactggttgccgcagccacgttccggacaactgacgtctgatggccagcgcccggtactcgccgtacgataagcgacatgcgacgtgcggtggccggtgtcagtcgtcaagtgttttcttcacctgcatgttgcgcggattatgcggatcgtccgagctgaattcctcgactttcttcacttcgaacaccctgttcaggtcgttcatgtccaaagcgttcgatgcgccgatcgattcgtcgctcatggagtattcgtcgtcttccggggcgacttcaggctccggcggtcccgcctgcaccggcatgggggctccccatgggtcatccgcgaatcctgccggcgatgacgccggctgctgggcctgttgcgattgcatttcgcgggcgctttgccgtgcgctatgtcgttcgctgtgctgttccggctggttttgccgcggctgctccggcccattcggttggccttgctcctgatcgtccgtctgcggcgtgggcagtggcgtggcccacggatcgacgtcatcgctcacatccggcacgtccacatgttttacgtggtgttccggcggctgtacgtcgttggcgttgccttcggcgataggcgtctgcggaattggggtgttccacggatcgtcgtcttccggctccttggcaaccttcttgccgaggttcgcggtcagcagggtggcggccttcagctgttcctgcaccagctgcgcgttgatcttgctctgctcttccgggctgagcttgctccacggcaccgcggtggaaccgtcggcaagcttcttggccggcgcgagagtgacatcggggccgaacaccttatgcacttcgccgcgcacgatctgcaccacattggtggtgccgtcgactgcttccttggccacggccttggcgaacgcgtatttgctcaacgacttgtcgaatttaatccacagtcggcctttggccccgtccagcagcacgcggggcactttctcgcggtccacgtagcgacggacatcctcaggcaggccggcaacgatcgcgtcccacttctggtcgggagtgcgatcgtccgttgccgcaggctggggcgcggactgagccacggactgggtgggagcggaagcttcggcattggatagtttgtatggcgcagactgcgtttcaaccggcttggactcggctgaagcggccggctcgctgccttccgacagaggtccacccatcgcctgctggacttccgccaatacggaggccgctccggaaacgacggcatcggccggattcgtgggagccgcggacggttccacggcatgccttccacgtgccgattgcgcggcgtacctacgggaaccggacggacgctgcgattcagacgctgcggcaccgcccgcatgtccagcttccggcatgccggacgatggtgcggcggcttgcgcgaccacgcccgtctcacgaccggcaagcaggcgggcggcgagcagttccaggcgcatgcgcggcgaaatcgcaccggtcatgttggccagcgtggcgttgatcgtatccgccatctgcgtaagcgcggccaatcccagcgaagccgcctggcgatgcagatcgtccatgttctcggtcgcggtgtcgtcagacagcacgctttccgcacgctcaccgcccaaggtgagcaccaacaggtcgcgcacgcgcgccagcaggtcctcaacgaaacgtcgggggtcgaatccgccgaccacgaccttttgaatgacgccatacaacgcctcgccgttcttgtcggcgacggcgtcgattgcctcgccgataagcgcgtccggcgtgaaaccaagcagcgcgaccgcggaatcgtaaggaatcttgccgtcgacggcaccaaccatcagctggtcgagcacggacagcgtgtcacgtacggatccgccgccggcacgcatggccaagcgcagcacacccgcttcggcctcgatatgctcgtcggcgcagatctgctcaagatacgggcccatgacctcctgtggtaccagacggaacggatagtggtgggtgcgggagcgaatggtgccgatcaccttgtccggttcggtggtggcgaagatgaacatgacatgctccggcggctcctccacgattttcaggagcgcgttgaagccctgcggcgtgaccatgtgggcctcgtcgaggatgaagattttatagcgatcgcgggccggggcgaatccggcacgttcacgcagttcacgggcatcgtccacaccgttatgggaggcggcgtcgatttccaccacgtcgatggagccggggccgccggtggcaaggtcacggcagctggcgcattcgccgcacggatgcgaggtcggacctttggcgcagttgacgcaacgggccagaatacgcgcggaactcgttttaccgcagccgcgcggtccggagaacagataggcgtgcgtgagcttgttctcgtcaagcgcacgcatcagcggaaccgtgacctgatcctgtccgatcacgccatcgaacgtgtcgggacgataccttctatacagtgccagtgccatcgcaaattccttccgccgtagtgttctagagtatcgatgaattacgacacgttcgccaatcgggaagcgccgaagccgaccatctccgcaagtccatcgcgtgtctgtctgatctacaaccggcgcagccggtactctggaaatcagacatgaaccgtgtgatcggcgtaccgtcggtcacgaacgctgactgttgcgcgcctaaacccgtgcgtcaccaccatgccgcacaaggcgttgccacgcgattgggaggagagagccatgaccgggaaaccggaagcgcccaccagcaccattggagacgcgcgtcgcttgcagatcgtgcaggcggcacgtgagatctgcttggaaaaagggttttcgaagatcacgatcagcaatatcgccgaacgggtcggcatgaccagatcgcttttctaccactatttccaagacaaagaccaggttgcggatgccgtgctcgacgatgtcatcagtgaagtcatcgcccgtctggaagagtggaacgagcatcgcgaggccggcaacatctcgaaggcgcttgacgatgtggtgcggctgacccgttcgctcatcgccgatgaaggcccgttcagccaacgtctcatcgaggatggcaacgctgcactgtatctgaggttcatcgaccgggccgcggaccgcatttccgaatacctgtgcggttccacggtacgtgaattcgaggaaaagcacggcatgccgatccgcaacgagcatgagaccttctacacgctgatcgtcggcttgatctcgctgatcagactgcatcctgacattgacgatgacattgtcaggcaggtggcggcacagacgctgcatttggacgaatatctgtgacggtgctcccacacgcgtcatttccgccggcaagcaacatataacggccgttcaacgtccggaggggcatcgagcggcaccggctggctgacggaaaacgacgtcaggcgaggaatctaccggtaagagggtcacgaccgtcacgtttgatggtttccaacacccattcctcgctgtcggctgcctgcgcttccgccacggccggcggcaccagcacacgcagcgcacggtccttggctaagaccttcaccggcaaatggcccacgtattcgccatcggccatcaacaccggaggctcatccccttcggtggcgcgggtgatttcaatgtcgcgcacccgcttccatccgaaagcatggctgcccagcagtcggccgtggtaggcgcgtgccaccgcgtccacgcactcccggaaattcggcacatggtcaagccacaccagatcaagcagtccgtccgcgaaccgtgaatacggggacacctcgatgccgccgccgatatggcgggaattggccacggtgagcagtggcgagatgatatcccgctcctccaccgaaccgtcggccagcgtggccttgatgtggtatccgtagcttttcatgtgtgtcagctccacgatgaccgcggcgaaataccgcagcgagccattcggcagatgcgaatgattggcgcggtcgttgatgcttgcgtccaaaccgcacgacagcatgcccgcataatagcggtcgatcggcgagcgcgactgtgaaacatcggttccgtcggtcgaatcgatggcatgaccgtcaggcaacgaagtcaccaagcccatgtccacgtcgatatgcgtgccgcgcacaatcgcaccgacaatgccttcaacggcggtttcgacgcgattgaccggcaaatccagtccgcgtgcgaaatcattgccggagccgatggccacgatgccgagtggtttgccggagcagccgactgcgttggcgcctaacgcgaccatgccgtcgcctccgaccgcgaccagataatcgtattcgtcgccgcggcggcgggcgttggccagggaatcgtcgaagcttgtgccggtcacatcgattacgtcgaagccatgcttgcgtccggctccgcgcagcagatcaatgacatgaccgcccacttgggcgcccttgcctttgttcgatgtcggattgcagaccacggcaacggtcgtattcgcatgtgacgtcttgctcatacttgtacgataaccatgtttcacgtcaagcgccagattgtccattaccttcagctgaacattccgtgccgtcatgcaacggctattctcggaaatcgtctaatcacaggtgatcggccccgcacgtgactgccggacgacccacggtgcgaacggcacctgcgtggccgcccgcacggcgaccaccgcatcctcgccttcaatggcacaggattcgagccgggttccattgcccgacgttgtacgcgatgcggccgcgcacgggtcggcggcaccgtcacgcagcgactgcgcggcggccaccgacgccaggtcggccgtattctgcgcgcgatgcacgcacagcagcagattgcctgccatggcgaccgcaccgagcatggccgcgacgattgcgatcagcgcgactcccgatatggttccggaaccttcgtccgcgcctttcaacacatgcaacactcgtcgcacatactgtttcacgtcatgtttcacggaagtcgttcctttcttgccgcgcattggaagcctttcaaaaaccgttacggacagcacgctgtcatgaacatcgcaatcagaaataccgagttgccttgcccacgacgctggcgggcagcacgccggtcggatccgccgcaaccgggcaacgcaccacaacggtgacgctgttcgcattggcggcgaacgacaccgtggaaccgccaccggcaatggtttgcgccgcggcgcgggctttcgcttcgccgccggcgtcaatcgccatggccctcgcaccggcggccgcagcgtcctgacagttcatggacactatggaggcacgccccaaacacagcaccagaatcgccaccgcggccacgcagggaagcaccaccgcgaattcggcggtgacggttccgcaatcggcgtcacgggcatggcgtctccaccatcgcgcaagcatggttaccccacgctcaacgctttcttgatgaggccggtcagcagcgttttcacgacatccgatttcacgatggcgatcagaaccgcggcgaatgccgtggccgccaccagcaccaccgcgtattcggcggtgaccgcgcccttctccggctcggcggtcagcaggcgcatgcgcgcgtccaataggcagaccgccttattggcacgttccttggccgcacataacttctggccgacgcgacccatcagacccggcgaaccatcgacattgattgacattgcgtcgttcatgacgctcctttcattcggctaatcccggccgattgaccgggtacgctcagtgtcaggtattggcatcggcgatggcatggttttcgtgggttgtggtcgaagaacgtgggttatccacaccctcggcgtgtcatccacacttatccacaagcgattagggcatgacggaacggaccgcgcatcatccgtcattccgaccgcggtccgattcgagcaaatttgagccaattcgcaccaacccgcactaccccatggcgaatcggccgctacagaaacgacatcaccgccggaatcacgccaatggcgacaaaggccggcagcatgcacaggccggtcggtagcaacaaccgaatcgacagtttcgccgccgactgttcaatccgcgaccgttcatcccaatccagctgctcgattgcggttgccaaccgattcaccggcgaggagccgctcgaccatgatgaggagaacgcgtcacggaccacggcgcaatcatcatcgtcaggccatgcctcattccatggcatgccactattcagccgttctccagccgagcgcaatccaccgccgaactcgccttccacaatgtttccgaccgtaatcagcgcgcgtggaatggatgctccttgacgtatcgccacgctcagcatttccaatatcaagggcaatggcagatcgcatgaccgcacgtcggaatcgggcggatttctggctggcgaccattcatacagccatgtcgcgccagcggcgcccaccgctgccagcatcggccatgccaagctcatcgcacatgctcctgccgcatcagcctgcgaatccaataccagccgacggcataacagcagccggcgaagccgaggcacatccatcctttcacgtcttccacaaggaatcgcaagggatgggctcccatgcattcccctagcatcaccgtcagcaacggcaatgccatcagcagcttcaccgtggcctgcggcatggcaaaagcgttggcacgcaagtcgtcgagcagccgtcgccgcttcaacgacgccgcgacggcctccaggcatcggctcatctcgcagcccaactgcagactcaacgtgcaggccgcatgaagttccgcaccaagctgatccacatgcttgtgttgttcctgaagcgagcagcggcttcgtacggccatgtcaatacggaaacgggtcagttcaggcactgcgaaaggagcgccctgtaattcctcgaacgcttggaccaaggtggctccgctgcgtacggacgcccgcagcgcggccacgcatgcggcagcgccgatggtcggcatccgtggcgatgcatcccggttttccccatcgttccggactgttctgccatgcccgtcggattcatcatcacaagttccatctccatcggccccgccgctatcgtcagccgaacgaagcccgaagcgaaccagcacacgctgcaatcgccgcaatcccgcccattccgcgttccgattcagccacagccagacggccatcgacgccagccatgcggcgcaatattcccaaccacacgcatcacgcatcatgcgctccatcggctcatgaatccatcccagcgttggccggcacggaccgtacggccatcccaggcggccagcagacgcccatgcaatcgcccttccaccgcttccaatctgccgacctgcgcaatgcgccgtctgccggcgatacgttccacatgaagcaccacgtcgaacgcatcctcggcgagcgccgccgtggcgcgtggctccaatccggccagcaaacccaatgagaccaatcgcgccggaaccgcctccacttgattggcgtgcaatgtggtcatgccgcctcgatgcccggaattcaaggctctgagcagatccacgacttcaccgccacggcattcgccgaccaccacgcggtccggtctcatgcgcagcgtcgcgcagatcagttcggaaaggcctatgccgccggcaccttccgtgttggcttcgcgtgtgaccagagacacgtggttggcatgttggatcatacccaattcgcgcacttcctcgacggtgacgatgcgctcgttcggcgggcatcgcatcagcatggctttgagcattgtggttttgccggcaccggtgccgcctgtcaccagcacgcttgccttgcgggacaccagtccggccagcaggggcagccattcggctggaaacatgccgttgcgcgccaacgattccagatcgggcgagaccgcgtcgggcaatcgtatgctgatggccgcgccctgcggcaccagtggtgcgatgacggcgtgcacgcgcagaccgtccacggtggaggcgtcggcgatcgggcaggcgtcgtcaagccgtcggccaagttgcgagcataatcgcgctgcgaattcacgaatcgactgcgctgacggaaagcatcggcgcagcagacatacttcctgcatgccttggccgcaatccgcccaaaccgtgccgtcgcaggtcaccgcgatgtccgtgacgcccggctgcgaggcgatggcgctaaggggtccgagttccatgcttcacccgcttgccttccaacgattcctgcagttcatccgtgagcgcggccaaggctttgacggtttggcggttcggcctgcgcaggcccaggccgtccagcagttcgccgcacagcttggcgtccggtttgacaaccgccgcgagggaatggccaagatagttttccgtctcttccagcgtggtcacgccacgtccacgtgccacgccgcgtggttcaacgccgacgatatggccatgtttctgccgttccgccgttccacgcgatttcatggccactttggctcgggccagtccgagcaccgtcatttcgaccacggtgatgtgtgtggcctgggccagttccggaatgtcatcgagtccacgccattgcccggcgtccacgatcaccgagtccttcacctgcgcgagcgcgcggatgcatgcctggatctcccaggattgcgggttttcgcttcgccagggattgcaggccagcagcggcacgccatcccacacgggcagttctcgcagcagcgctttgccgtccactttgccgagcggggcgctgatgtctccgaagcgtgaaccgtcttcgtcttccacaccgagcagcacgtcaagaccgccaccgttgagatctgcgtctaccagcacgcttttgcatccacgttccgttagttcgcgggccagcagcgccgccaacgtgctggcaccgactccggcgacggcggatccgaccaccacgacgttgcgtggagcaggttccggttgcgcttcaacgggtttcagccgtgtggacgacgattccaacggcgaacccatgaaaccgcccgtcacggcaggcccggcccatcgtgccgacgttcgcgcgtccacggcgttctgcggcgtatagaaccgttgcggcggggccgtttcccgccgaacggtttgctgggatcgagtcggctgccgcactctggccgctggctgcgaccggattttcggcgaacacgtcacgcgtgcgtcacggcctccgtatgacggcaatgggaccggagggacctgtaatgaagaaattgcatcgctcataccgccgattgaaaaacgaaaccgcacatggattcaagccgaaacggcacctgtggtcggagaatgtgggttatccacaccctcggcgtgtcatccacacttatccaccgcaacgcgattcggcacatcgcaagacattacgcaacacagcacggcgcaacgcaacaaaaaaggaagacccgccgaagcgggccttcctgcaagaatcttcggagcagaatcgctgcacaacaacatcgtcgtaacggtaagtctatccaatgcccgttcaacgtaacaacctatctcggtcatacacaccttgtggggctctgctcttcagttgttcttgtacttcgtaattatgctcgccattgcggcaagtgcaaaccgaaacgggacgatgttccgtatttatcgcaactgttgcttttcgatcgcaagaatcgcaaaaatgctccatgctgtgcgaatcgcaacgcttgcctgttcattcacgttcatttgccccgaaaaaacggcgtgtcggaagcatatttcaccaactcggcgaacgaatgttaactcctgcttaattttcctgagttttgcaagacattccaagcacttgaggataaagtagataactatggcacagatttttgacgcaccctcaaaggcgatcctgcgcagccagatagctgagcatatcgctgagaccgataagaacgataagcgcgagcttcaggcaggcgaggaaccgctgccgaatgaccgtttcttcgaccgtgagctgagctggctgaagttcaacaagcgcgtcctcgagcttgcgcaggatgaggacctgccggtcatcgaacgcgcgagcttcgccgcgatcttcgcgaacaacctcgacgagttcttcatggtccgcgtggccggcctgaagcgccgcatcgacaccggcatcgccgtgacggccgcttccggactgagcccgaggcagcagctgcgcgccatcagcgagcaggcccaccgcctgcaggacgagcacgcgcactacatgatcgatcacattcttcccgacctggcgaaggaacagatcgtgcttctgagctgggacaagctcaccgcagccgagcaggagcgcctgtctcgctactaccgtcagcaggtattccctgttctgacgccactggccgtggacccggcccacccgttcccgtacatttccggcggttccatcaacctcgccgtgctcgtggagaatccggcttccggcaagtcccacttcgctcgcgtgaagattcctggaaacctgaaccgtctcgtgcccgtcgacgacatgaccgacgacgatgccaccaacgtgcgctacggcttcatcaccatggagaacctgatcatcgcgcacttggaatccctgttcccgggcatgattatcaaggaagcacgttccttccgcgttacccgtaacgaggatatcgacgtggaagaggatgatgcagagaacctgctcaacgccatggagaaggagctgctgcgccgtcgtttcggaccgccgatccgtcttgagatttccgacgagaccagcccattcctttcccagctgctcgccgatcagctgcgcgtcagcgccgatgaggtgtaccgcctgccggcaccgctcgatgcgactgtgctcttcgaacttggcggcatcgaccgtccggacttgaagtaccgttcgttcgtgccgaccaccaatcgtcagattgccgaggtggagtcgtcccgcgcgcaagacatttttgcagcgattcgcgaacgcgatatcctcctgcatcacccgtacgattcgttctctacctccgttcaggcgttcctagcgcaggctgcggcggatccgaaggtgctcgccatcaagcagacgttgtaccgtacgtccagcaactccccgatcatcgacgcactcatcgacgcggcgcatgcgggcaagcaggtgctggcactggtcgaaatcaaggcacgcttcgacgaagacgccaacatcgcatgggcgcgcaagctggaacgcgccggcgtgcacgtggtgtacggcatcgtgggtctgaagacccactgcaagctgagccttgtggtgcgtcaggaagccgacggcctgcgccgctactgccatgtgggcaccggtaactacaatccgaaaaccgcccgcatctacaccgatctcggcttgctgacctgcgatccggtggtcggccaggatatgacccgcctgttcaaccagctgtccggttatgctccgaagtcgagcttccaccgtctgttggtagcgccgcgtaccgtgcgttccggcctgattcagcgcatccgccgcgaagaggatgccgcacgcgcaggcaaggaagcatggattaagatcaaggtcaactccatcgttgacgagaagaccatcgacgcgctgtaccgtgcaagccaggccggcgtgaagatcgacatcgtggaacgcggcatctgcgcgctcaagccgggtgttccggaactttccgagaacattcgcgtacgttccattctgggtcgtttcctcgagcacagccgtatctacgcattcgcgaactctgatgggccgcagatcggtgagggcccggccgcaggtccggaagtgtggatcggttccgccgatctgatgcaccgcaatctcgaccgtcgagtcgaagcgctggtgcgcatcaccgctccggagcagatcgatgaactgatcaagtacgtggatctgcagatggccgattccaccacctcgtggcatatggcagccgacggaacctacgtgcgtcatgcgaaggatgaggagggtcgcccgctggtcgattcccaggaatatctcatcaagaagcatacacgccgaccggcaagacactaagtttcgcgaaaatggccgattctgcaattgcagggtcggccattttcattgcgcaatcatgaacaataaccacgccgaccacttacaatgaaagatatgagcgagaacatgagacgtgtcgtagaagccgccgggggtattgtatggcggtggaaagccggtagcgaaatcgcggaaaatccagcaatcgcagcgcagaaatctccaaaagaacaactcaacagcattgaagtgtgcatcgtgcatcgaccaaagtacgatgactggagctggccgaaaggcaaactcgagcaaggcgaatcgcatcgtcatgccgcagtgcgagaaatcggcgaggagacaggcgtccccatcgcactcggcccttatctgtgcgaagtcgaatatccactgtccgaagaaggcaagaaaacccggcattcacacgatcgcaccgtcgacaccaagcacacgttgtattggatggcgcaaccgatttccggagatgatgcggaacatctgcttgacgcattcggccccgtgcatcgcgcggacgtaggcgaaatcaacgatatcgtatgggtttccgtacgtgaagcacgtaaaatcctcacgcattccaccgataaagacaccctcgccatcttcgtggaccgcgtacaggagggtgccgcaaccgcacagaatctgctgatcgtacgccacgccaaggccgaatcgcgcaaatcatggaaaggcaccgacgcgaaccggccgatcactccgaaaggcgctgccgcggcattcgcactcaaccgcgaactcgcctgctacaacccaacccgcctcgcaacctcaccatggctgcgctgccaggaaacactgcaggtgcttagctggcagaccgaacgcccgatggagcatatcgacgcactcacggaagacggcttcgccgagcacccgaccatcgcatggctggcgttcctcaagcagatccaactcacgctcgaaacccgcgaaaccacggcgatctgcatgcaccgaccggtaatcgggggcatgtttgaccatctgcgcggactgtgcgcccgcaaagcgctctccaagcagctcatcgccaaaacgccgttcatgcctaccggcaccgccgtagcgctgtttataatcgatacgccgcaaggtcccagcattatcgatattcaaaaggtttcgcccattgtctactaacatgcattacggttccggctcggttattccaagccgttccgccggtttcaccaacactggatcgccgcgtccggcccgcccggggcagctcgaccagatgatggccgacaatattgcgggaggtgccgatccggcacaaatcaacgagatgagccacgc

SEQ ID NO: 2268 - DNA, 23601 bp, Unknown
  R119_18m  MAG No. k141_7047
aaatcagcatgttgtagccaagagaacaccaagtgcagatgtttgcgatggcgaacagcatgagcttttcagaaagcatgttcggcgcagtggccccgatcatagacgcaatctggccgacaaggccatacttgtcgccgtagatatatccccacatcagtgctgcgatgacgcctgggacggcataaggcaggaacagcaggattcgcggcactgcgatatggcggattctctgggaatccagaatgagcgccgccacaagggaaaggatcaaattgagaggaatctgaatcgccgcataaatcagcactcttctgaaaccgctccacagcgcttcatccttaaatgcagctatgaagttgtcgaagcctgcgaatgtggtgccgccaagaagggactgcttgaagaagctgagataaagcgcgtagaacatcgggatgatcatgccgaataggaagaccaccacgaatggaagacaatataacatgcctatgtactcgcgcttcggcttgcgcatcccggaagtatccggtttcgccgttgcatttgtcatagtttttctctttcttcttaacccgtctgaatgagcccgccaacaacatcgttgccattgccgtttcattcatcggtacgttcaatatacaaggttttacaaaaaagagcaaataaaacttcgttgcgcgtggcgaaattttctttatcttgttttttcgccttaaaagggctttattgcaacgatatgcacaaatcgtactcatcgaagaaacagcagccaatccatgtctacaacacccatttccgctatatagacagcaatacgccgataaaaaagctgttttagagtagcgaaaatttcgctactctatatataacgctttttttgcagcgtcgcatacgaaaagagaagagtcatggccacaatcaaaacaacaaacagaccgaaggtctccgacatcgcccaagcggcgggagtatcccccgctaccgtgtccaaggtcatcaacggccgtgatggagtctccgacgagacccgcgatagggtggaactgctcctcgaagaagccggattccgcaaaaaacttcccacaacaaaaaccatacggtcaatcgaactggtcgtcagcgaaatgaccaacaacggcaccgtggaaatggtcaaggagacagcttcatacgccagagattttggcctcggcatcaccgtaagctgcgccggaccggattccggagaatacgcaacaagaaacgaggccagcagctgcctccgtaacgccatcgaacgcaacccactaggcgtcatacttctcttatcgaatatctcatcggccgaggaatcgctgctgcagacgaggaacatcccatatgtaattgtcgatccggtcggccaggtctccgctgacgcattgggagtgggcattgataactggaccgggggaatgctcgccacgcaatatttcatatcattggggcatcgacgaatcgccgtcatcactggccctactaattcacaatcctcgcaggcgcgactgagcggatacatggcggcgctgcagaaaaacggcatcagcgcggatccgcatctcatcaaggttggcgactacgtgtctgacaaggcatacaaggcggcatgcgatctcctggaaatgagggagcaggaccgaccgaccgccatcttcgcgttcaacgatctcggcgcgatcaacgtctatcgcgccgcccgacagcacggcatcagtctgcccgaacaattatcgatcatcggtttcgacgatgtctatcctgcggcaagcatgtgtccatccctgacgaccatcaggcagccattcgacctcatcgccagacaatgcatcaacctgattctcgaagcgcgggaaggaaaggtggaacagaattacttcatttttcccacgcagcttgtcgaacgcgaaagctgcgtatcgccagcacgtccgtaactcagcaacggaacacagaatcagcttccacgaagcacccatgcatatgcaatccgtctctggcacaagcatttacttctgtttaccagatgaaaatacaatatcgtgcgattacgggggcgcagccctagcctcagctggaggtcaggaaggtttcgttgcctcgggtgaagtcgaggacggcaccggcgagttggacctcgcctgccagttcggggtcggcggccagaagctgctcggcacgggtgcgggcgtcggcgatcatgtcggcgtccttgaccacgcgcaggagcttcaggctggacttgccgccggattgggcgtcgccgagcacatcgccggcaccgcggaattccaagtcggcttgggcgatttcggcaccgtcgagcgagtggtgaatcacttcgagccgttgctcggccggggagccgggttccgcacgggaaataaggaacgcccacgagttggtgccgccacgccccacgcggccgcgcagctgatgcaactgagagaggccgtatcggtcggcatcaaagatcacgatgcagctggcctgtttcacatccacaccgacttcgatcaccgtggtggacaccagaatcggagtctcgccgccggcaaaatcggccatgacctgggttttgacgtcatccttgtcgcggccggtcagagtcgcaaaccgaatgccttggaattgcgggagtttctgcaaccggtcggcgatttcggccaccgcatgcaatggcgggcgagccacggtttcgccgttctcgtcgaaggtttcgtaggggtcgtcgatgccgatggcgtcggccgccgcgcgcgttgcacggccgcccgcagctgtgcgggcactggaaccagatgctgcggcgcgtccgcgggcagaaccggctgctgccgaaacgccggaaccgccttcgttcccctcatcatccgcatcaatgcgcgggcacacgatataggcccgctcccccgcgtcgactcgcgcgcgaatgtgcgcgaacatacggcccatggtggcggcgtcggcctcattgaccaccacggtgcgaatcggtttgcggccgccaggcaattcggtgagccaggaaatatcgagatcgccaaaccaagtcatggcggcggtgcgcgggatgggcgtggcggtcatcaccaatagatgcggcgtggtgccgtcatcggttttggcgttgagactttcgcgctgttccacaccgaaccggtgctgctcgtcgattaccaccaaggccaagtgcggggcttggaaggtcttggaaaacgccgcgtgcgtggccacgataatgcccggctcgccactggacgccgcagcaagtgctttacgtcgcgcagcaagcttcatgccgcccgtcaacaacgtgactggaatcgctggcttgagttgctccaccatccggccaatggtttcggcatgctgctcggccagcacctgagtcggggcaacaagcacggcctgatagccggcgtctacggcttggagcatggcagcgagcgccactacggttttgccggagcccacctcgccttgcagcagacgctgcattggccagtcatgagccaaatcggcggcaatatcatgaataacctgctgctgccctgcagtgagggagaacggcagggatgcgatgaactgatcgcgcagactgtcggttaccaacgggcaagagtgagccgcggatttatgggcgtgcgacctggctttaagcagcgaggtctgcgaaacgaaagcctcctcatagcgcagggtttcgatggcctccttgaaccgggtcgtggaggccggatcatgaatggccaggaacgcctcagcccgatgcatgaggttcttggccttgcgcaccgattcgggcagcacatctgggatggattgggagagcgcctcagcaccggattcggcggtcgtgccggaattctcttccccgttttggacggcgatggtgtcggtcgtgggagccacaatgccggctgacccagcgccagcgagttgcccgtcaggcgtggatgacgtgcgggcccccatcatccacagcaatcccagaatcgtctcatgaatatgttcggacgagatacgcgaactggcgtgatataccgggcggggccggcagacgcgggtaagcgcctcttgcacggtatcggcgtcgtatttcagcgcggccccggaagaggcagccgcggccggcggatacgcggactgcacactggcatacggatcggtacttcccgcaaacgcaccattgccggatgccgcaccccgagcgtaaccctcaagccccgctcctgctccggccgacccgggcgcgacagtgaggatttcggggtgcgtgaattgcagctgccccatgtattcgctgggcataccggagaccaccacagacgtgccggcgcgcagccgcatgctgacccaatccacatacgatttacgatacgaaaagaacgtgagccgggccgtgctgccgggtacgcgacgcgaacgggcaaagtcggcgtcgtcaaccgtcgcctcgagtcggtagccgcggcgagcgttcatcggcaccacgcgcatgtctcgtatcacggcggcaaatgccatctgctggccgggtgcggcctcgcggatggcgcgaagcggcaccggttcggtgacgcggaagggatagtaggtcagggcgtcgccgacagtgacgattcccagcgatttgagcgcggacacgcgacgcttgttggtgaccagcgaagcgagagtggtgtccatagtgatgctcatattggcctattctattcgcacggcctctttaggccgcagaaacaacaaaacccgctgagccgaagctcaaacgggttttgctccacgttagtacgcgattcacgcggccacgcgctgaaccttgccggccttgaggcacttgacgcacacgcgcagacgagtgttctcgccatcaatcgtggtgcgtacagactgcaggttcgggcggaagctacgcttggtacgacggtgcgaatgggaaacggtgaaaccggtctgcggtcccttgccgcacactgcgcaacgagctgccatgatggactcccttaaccttgatgtgtcaagtctttcacgcattcgaccgccggtttcacccgacatgccgaacacacaacttcacaaatatatagcccaataccgacaaccgcaactcttgcgtgtatcatgggcgaacttcggcggttcgcgagcggttcgagcgtaacttgcgagtgggccatcagcggttcgcgagcggttcggcattggttcgccagcggtccgcaagtagttcgccagcagttcgccagcggcgaattacgctgcaaatcgtagcgtttacccgataaaacacgccggactgcctattccgcatccaacaaactctcatataatctcggtataagagacggcaagggacgaaggggtcctcgtgcaacttacgacgaaggaggctgtcatgttgaatctcaggcgaggtatcggcactcacgagcccagcgtgatttcactgggtcaagtctgggtggacattatgctcaatgtggacgaggtgccggcacagggcggattcgccgtggccgatcatccgaagccctccattggcggcagctatcgcgtactgcaggcggccagccgcatgggcgtgccgaccgagcacgccggcattctgggcaacggcctgtgggcgcatttcatccgccagtcattccaggacaacggcatcacgcatatcggccaggatcgtcttgatgaggattccggtttccgcgtggtgctgagctccggcgcgccgaagaagacgttcatcgcttcctatggcgccgaggctcatggcgacgcggacacgttcaacacgctggagccgcagcccaaagacgtggtgcacatcagcggcaacacactgatggaccacacggccaccggcgtggacggattcctactcaaggccggtaccgacccggctgcacgcgactacacgctggtgatcaatcccaccaatacgttgcgtctggtcaatgaccacatgctcgaggatctggtgcttgcgcgcccggtctggtcctgcaaccgtcaggaggccatgacgctggccgagcgcctgggcgcgccgatcgacgacagcaaggtcaccatcggcggtggactcgacgacttcatgcaccagttgtgtgacggcttgggcactacactgcgcgcgccgctggtggtgcgtgtcggcgcccgcggcgcttggattcgtgagccaggtggcgagacgattcatatcgagggatacccgaccaaggccgtacacacccgttcggcgggcggttgccacaccggcgtgatgtgcgcgatgctggcaaagggccatagtctggccgaatcggtaaagatcgccaacgcggcggcatccatcgccatccagcgtagcctcaacggcgtgccgcaatgccccgattacgacgaggccatcgcgctgatcggcgaatagtttccggacgattgagtggatttcctcatctgggggaatccacgatcggctcccttcagtccgcttcgcggccagctcccctcagcgaggggagctatttttttgctctggctccccttagaaaggggcccggcattattcacccgccgttcaactttggcggttttctaccctagtccgcgcttctacgatagattgagttgaatactgtcgaggagtgcatatgactgatcccgcaaatgtccacgaaccggtgccgcaaagcgccaaactgaccgcccgcgagaagaagtggatcatctacgacgtcggcaactcggcattcgtgctgctgtccaccgccgtcatccccatttacgccaaatcgctgatgccggcggacggcaacatcgtgtccgcctggggctacgcgcaaaccattgcttccttggtcatcgcgctgctcatgccgttgctcggctccatcgccgacgtgcaaggcatgaaaatcaagttcttccttggcttcttcggcaccggcgtggtcacctgctgcgcaatggccctgcccctgacctggctgccgttcctggtcgtctacattctggcgaccatcggcctcaacggctcgctgacgttctatgattcgatgctcatcgacaccacctcgaacgagcgcatggacaaggtctcctcgcacggctacggctggggctacatcggctccaccgtgccgttcatcttctgcatcgcgctgattttcggcggcccgtcgctcttcgactggtccacggtggcttgcacgcgcgcctcgttcatcatcaccgccatctggtgggtggcgttcaccatcccgctgcttaccagctaccgccaggtgcactaccgtgccacccgcgaccagctgggcacggccgtgcgcggcacgttcagcgaactggcgggcacgttcggcaaaatcgtgaagaacaagccgttgtggatgttcatgatcgcgttcttcttctacatcgacgccgtgaacacggtgatttcgatgagtacctcctacggtgccgagcttggcatcgactccacccagctggtggtggcactgctcgtcacgcagttcgtggccttcccctgcgcgattctctacggccgtctggccggccggctcggctgcaaagtgatgatcactgcggcggtcgtggcatacatgtgcatcgtgctcttcgccgcgttcttcatgaaatcggccgtggagttctggattctggcgattctggtcggcatgttccaaggcggcatccaggcgctctcccgctcgtactacggcaagatcatccccaaggaccacgccaacgagtactacggcttctacgatatcttcggcaagaccgcctcgatcatcggcaccttcctggtggccaccaccacgtccctgaccggcaacgcctcgttcggcgtgctgtccatcgccgtcctgctcgttgtggcgctcgttttcctgctcctgcaaaaggacccgacgcgggagtgatttgccggccctcggcaactctgcgccgcgggcgacatctcgcaacccctgcaacgggccctaatagcaatggaccatcgccacttgatcacttacgctcgcgataatccttgatcagctgaatggcgacggccgcaacgccgcacagcacaccgccaatcggccacggcagccagaacatcgccccgtccgcggcgctcgacccgacggccgaccaatcgccgcgcaatgccgcagggttcaaaaacagcaggcacaagccagtcgccgtggctatcagcataatgatgccgcacaccgcgccggtcagtttggcgtagaaatcctgctcgcccgcatgctccttgcggtcgtcctcggccgctttgttgtatgcgttgatattgagcagactgtatctcatgccgcagtagacaaacccgaaaacaccgggcgcacagagcagcagaaaaattgcgttgggccagccatcggagacgccgagcatgtcatcggcatacaccgtcaccgcaatgccaatcagaatagccgagatgccaccgacgatgccgattaccagcagccgcaattctcggctgcggtcctccccggtgtagaaatcttctacgtatgggtgacgccgtttgaagtcaatacgcgacagacctcctggaatcagcatcgccagccccgcaatcacacccacacagacgcacagaaacgtcagaaaatcgttgagcggcgtcgctccgagaatggaattgttggaatcgaacaggttgccgatgccaaccccggcgacaatcgcagcaacaccgccggcaatcagcagcgcgaatcggcggcgatgttcatcgtagccagtgatatcctgcgcaagctccgcgataggagcgattatgcccgccgttttggaagaagcggctaaaggcgatgccgtctcagccgaggagtcaacattcgacgaaccggccgcagaagccgacgcggcaggccgactcacatcgccaagtaccagatcatcaagcgtgcagccgaacaggtcgcagatcataagcagcttgtccatctcgggataggccttttcggattcccatttcgaaatggcctgacgcgagacgccaagcaacatggccaatcgttcctgggtcaggttgcgttgcgcacgtaggtactgcaggttagcgcgaaaactcattggaatgtcccttcatacgtaatctttatcatgtcatgttcggccgatgggctcactatggcatgccgtccatgtcacccgccaccatctttgggttgcaatcgccggttattcgagcgcaaccacaagttgcatcggcggaattccgccattccgttgacctgagcagctttaacatcgcactccacgagaccgaagcttttccagccatgcgagggcagcttgtctcacctgccaccacgaatccgcttcgccccacgtacacatctgtgtacagcagcgctcgcaatcggttacctacgacccatatgatttgctgagcgaccgcaaaacacgcaatagccgagacaacaccgtcagcgttaaagcttaaggcgactacttgcccaatagtccgggaatctggctgatgatgtcagcgggcagtcctgcttgttcggcaatggatccgaggtccagattggcaccctgctcctgaattgcgccagcgacctgactgatctggttggcggagatgttttcctccgccagcgcctgcagctcgtcaagtcggtcggcgttcaaatggtcgccaacgacctgttgatttcacccaactgatcggcattgaaatgctcaccgattaccgccggcaaatcaccaatcgaaccgagattgaaatccccgccaagcacattgcctagattgtctgcggcaaaatttttcaggctatcgaacagtcccacatgtgccgctggtactgcttgttcagcaactgctgcagagcatcgcacagaccctgcatcaatcgccgctcttcggcagacaagtcccgcgtgaaaccaatctctgcctttgcgctcatcagctggggagctcacggtcacactcatgcgtcgcagaccacgagcctcacgcgcctcctcattccacatctgtgttaacaacatgtgttaatcgcatgcatcgccaccatgattccccaatgatttcaagggttccccggtctcactattgtttcttccctaaaacggcctcaatcatcggcaccttcccggtagccaccaccacgtccctgaccggcaacgcctcgctcggcgtgctctccatcgccgtcctgctcgtcgcggcgctcgttttcctgctgctccagaaggatccgacgcgcgcaaacgtgctgagacatcgccggtgaaccaagttctgcctttttaccgacgccagctcgcataagcaggaatcaaacgtcggcgctgggacacagaacgggaatccgccgacgttcagagtatctgatgccggtgccgggccatgttttggacgccaccgacacaagtaccactcttggcgacggtggtggggcatccgctgtcccaccaccgtcgccaatcgttctcagcggcgttgacaatccattatctgtcctttcaacgccgccaaacgtccacagcgtcggcgacggtccggattttgacgcaccaccgatgcaaaaccattgcaggctccgtacggaacatcagccgcgaccaccgaacgagcaccagatgcggcatcagccgcgacaccagccgcacttatcgacgcgcccttaccgcgtcatcacgtccatcaatacaatgactcatcggcatatccggctgcagcccaataatcgtcggccgatagcgagcgattgaaaccggtggcatgatcgcttccgaggtcgccctcgccaccgaaatcgacatcgaaatcagtaccagcatcggaagtaccgccggacataccggcaacggacctgacttcggttttcagcaggtatttctccgcgaaattcagcgtggtgcacaccatcgcaaacccctttccatgcgcgttgccctggcggaccaagacgtccttgtgtaagtaagtatggcggctccccttccgcaccgccatatccactatggaagcacgccgcggcacacgacacaagccccgggacatatgaagcagttatggccggttcaaagcacccgtattacagcccaaacggcaccgcgcgcagcgggattgtacgacggccggacgccactcatgatcgaaaccgctcacagccaaatgccacccgaggccggacgccatataaggaaccgtggcacggcagatatagaaaatgcccgccatcatagactgacgagcgtgatatcgggtgggcgatgtaggaatcgaacctacgaccccttcggtgtgaacgaagtgcgctagccgctgcgccaatcgcccgagcttgtgatgaaaaaaccggcaacattctgccggcgattcatcgagtgggcgatacaagattcgaacttgtgaccccttccgtgtcagggaagtgcgctaccactgcgccaaccgcccgggtcatcctcaggctgaatcaatcatcctgaaccagccatccgagagcggacaacgggactcgaacccgcggtctcaaccttggcaaggttgcgctttaccaactaagctatgtccgcatgtgttaccttcacgggcaacaggtgacaaagatacgccaatctcaggaaaaagccaagcccccgcgtgtcccaccggttttccaacgattatcgggtgccgccgtgcacataactcgcggtggccgtatacagcagccaggcgatgggcatggccagcataaacagcgggtagaaccaagcgatgggcacatctggcacggccatggccgtggaaatcaggaacgcatgacgataaccgatcagctggccgaagaggccaaggccttgatcggcgaccgtgccgaagtgaagttcctgaactacgccgacgtgccgttcttcaaccaggacgaggaattcccgaacccgacagccgccgtggccgccgccttcctggcgctcgttgtggagtaatcccgcctgaatcttggttacgttccgcctcaaggcggacggcggaccagctgcatcagcaatgtgccgaacccctctgattgactccaatcagaggggtcgctgcgtttcaaggggctgatttggccttctccggaggtctactcccgtttcaaggggctggtggctgagtagacacgggccaaaaacggcgtaatgacgttagcccggagccgtttatacttgtggtttcccggatgaggagcccctcgaaacggagatagacctccggaacagcccaaatcagcccctcgaaacggagttagacggttgggatgtcggaaagaacactcatgccggcccaagaacccccactatgtcagatatcgctgcccagcacgcaatactgaccgtacagcacgacccgtccttcatgaaatcaggcacggtatgggcttcatccctcaacgcgcgataatggcggtatgacgcaacgacaactgatgcgggccacagtcgaaacgcccatcggccggatgatgatggcctcggacggcgagggcctgaccgagctctgtcttgaagactggtggtgggccaccgaccaccaagccgttctcgactcgaaccgcgaacccgatcgtgaacccgatgtgttccgtatgacccgcgaatggctgaccgcctatttcgacggcgaacgccccggctcggatcaggtgccgccgttgcatcccgccggcacgccattccaacatgaagtgtggaatctggtggccgagattccctatggcatgacggtaagttacggcgaactcgccgccgaattggccgaacgacgcggtggcggccgcatggccgcgcaggcggtcggaggcgcagtgaagcgcaatccggttactatcatcgtgccctgtcaccgcgtagtcggctcgggccgcgcatttggcggctacggcggccgactcgacatcaaggccgaactgctcgaccacgaaggcgtggatctggcccgcttcgatctgccgaacctttgacggccccagcggtccgcctcgtcaaaaggattgagtggttacccctcccgccggcgggaagtggcacgtaacgccggagggtggtcggctggctggcatcgcaacccccgctacccgacaattttcgacaagctgacgggaatcctcccacgaattgttcgccgtcggtgcagtcttgctcgatcgcgccggccaaaaccgtacaatccctacaatggaatgtatatggttaattgctgcgcgcagccgcacggccgcacgcaatcgcaagaccacatggcccaaggggatatgcaatatcaacggaagcaggaggtgcgtatgaccggcattatcgattacgcgcacaccgaaacgcgctccttcgccgacttgccgttcaacgaaatcgacgccttgatcatctccacgctcatctatgaggatgtggccagtatctgtccgacgttgatgctggatgagacgcagtcaggctcgttcgccgcacgcattcgcgctttcgagcccaagcatccactgatctggctgaagggtatctggcatcccgagcttgaatcggtaagccttgacgaggccaaccgcgagctgcatcgttcgccgaaaacgcatgccgacgacaagccgcacgaagcccaaatggtttcagtggtcaatccggacctgacccacgacctgttccaggccgcaggcgagaacccccgctacgccaacgttcgcctgggcgcggtggtcgagcacatcaatcagggcgagcaaacccaattcgccgccgccaccttccaactgcccgacggccacaagcgccggaagccgacctacaaaggcacgttggttatttccttccgcggtaccgatgattcgctcatcggatggaaggaagatttcaatatggctttccagtatccggtgccggcgcaacgttcagccagcgcctatctggatacggtggcgcgactgtgggagggtccgattattctggtcggccattccaagggaggcaatctggcgatttacgcggccatgaacgccgaccccaaggtgcgcaagcgcattcagcatgtctattcactggacggccccggtttcccgccggagattgtgaccagccccgcctaccgcaccatccagccgaaggtgacgaaaatcgtgccaagttcgtcgattgtgggcatgattttcgagaccccggagccttgccgcgtggtctcttccgattcggatggcattatgcagcattccgccttcacctggctattggatggcgaccagttcatcaccgagccggatttgagttccagctcgcagttgtttaacgaggagctgaaccattggatcgccacgcttacgcccgaacagcgcgagcgtgcggtggacgcgctgttcaccgtgctgcacgccaacggcgccaccagcttcagcgaggtgatgagcaacttccccgcttcgattccggcgatgcttggcgcgtatgtagggctgacccccgcagaccggcgtcatttggttgaggccctggcgatactgttcaaggcgtccacggccaaacgcaggccgacgcccgccccggcttccgcgccgagttctgcgaccgccaaaggaacagccgaaaccccagcaggaactgcgacaggaacagatagcgcggccccggccagcgccgataccgacaccgacactgacaccgcagcttcgccctcagcggaggacgcaactgaaatcgccgattagctcatagacatgtccacaaataatagttatactgcccgataagttattagacagcgtgaccatatcacgctggtgcatcaggaggaagagatgccacgtccacgccatgattccgaggtgctgcccgccaaagaacgcctagagaacgctttctgggaattgctcgccgaccgcgactaccgcaagatcaccgtcaccgatgtggtgcgtgaggctggcgtgaaccgtaattcgttctattatcacttctccagcctgcccgaattggccgattcagccatcctgcatcaggtcgaatcgattccgatcaaccgcacccccgacccaaatggcaatcccgaggaacaatggcgagaccgcgtcaccgccacgctctccgacccggagcagcggcagcgcctcgaccgcctggccctgttggccggcccgcacagcacgcttgaactgaccgaatcgctgcgcgacttctgccgtctgcaaatgctcagcacattgcaacgcgaccccaagaaccttgacctgaaaaccgatctcatggtcgagttcaccgtgggcggcatgctcgccgtgctgcaacgttggcccgaattgagcgacgccatcgaaatcaaagacctgcttaaagaagatgtggccgtgctggccatgggcatatacctggccatgagccaaaaggacatgcttaattactggaatcgcatcttcgtgcacaatgcgcaggattcggccgcccccggcatgcaggccaccgccacgcatgccgcgccatcccccatctcaccgtcgaacggccccgcaggattccccgggtacaccgcttgaccgaaaaccagtgagtctggattgtttccgtcgaatgaacccccgcgtgaggtttctcacaaggcgcaatcagcctctcatgctggcgtttccagccctcacacaggaagatggaagcatgagcgaaacatcgaacaaaacccgtctggaacatgactgcatcggccagatggaggtgccggcgaacgtctactggggcattcacacccagcgcgctatcggcaacttcccggtctccggcatcaccgatagccaacatcccgagctgattcgcgcctatgccacggtcaagcgcgcctgcgccatcgccaatgaggaattaggcctgatcgacccggccaaggccgaggccattcgcgccgcctgcctagaaatcgaggccggcaaactggccgatcagttcccggtcgatgtgatgcagggcggtgccggcacctcgtcgaacatgaacatgaacgaggtgatcgccaaccgtgcgctggaaatcgccggccaccagcgtggcgattacacatacatccatccgaacgacgacgtcaacgagtcgcagtccacgaacgacacctacccggccgcctgcaaactcgcgcttatcgacgcgatcgggccgctcgccgagtccaccaagaaactcgccaaggccttccacgatctggccgacaaacatatcaatgacgtgacgatcggccgtacgcaactgcaggacgccgtaccaatgacctatggtcaggagtttcattcgttcgccacgctgctgaaatccgatttggctgcattcgatcgcgtggtgccgctgctggcccagctcaacctcggtgccaccgccatcggcaccggcatttgcgcggatctgcgattccgcaagtccgccatcaagcatctggcgcagatcaccggcttgccggtcaccgccgcgcccgatccggtggccgccatgacggatatgggcgcgtacgtggccacgtcggccgccatcaagagccttgccgtgcacctgaagaaggccgccgacgatttgcgactgctcaattccgggccgcgctgcggtttcaacgatctcaacgtgccggctcgccaggccggatcatcgatcatgccggccaaagtgaacccggtgatccccgaatgcgtcaaccagtgctgcttcacgatcttcggcatggacgtgactgtgaactgggctgtggccgagggccagttgcagctgaacgccttcgacccggtgatggtgcatgagctgctgaccggcatggcgttgctgacgcgcgccatggagacgttccgcgtcaattgcgtggagggcatcgagatccacgtcggtctgggacgctcgtatgcccagtcctcgccgtcgatcgccgccgcactcaaccactacatcggctatgagcatgcggccgacatcgccgccgaagccgtgcacaccggccgtaccgtgcgcgaggtggccggcgaacgcaccgacctgcccgccgagcagctggacgagattctcgatccgattcgactggcccgtggcctcggccaaacctgccgcgagcatcgggactaggcgtcacggcgacgtcatcaccacgacgatgctgcaccgcggtgccgcggtggtgccggtggtgccgacggcacgccaccggtatcgcaccatcggcaccaccgcaacggccaaaacccgacgtgggcccgcatgtttacgacttcaccagaaatggtcgatacagtagggcatatgaccgaatatgcacaagacatcgcacgctggtttcaggtgaacgccggcaaactcatctggctggccgtcgtgctggccgtcgtgttcgcggccgaccgcgtgatcagccgcgtgctgcgcagggttctggatagttcgcagattcccagcgcctcgattttcgtgaatctcacgcgcgtgaccatctgggtcaccggtacggcgatggtgctgcaaccggtgttcggcatcaatccgaccaccctggtcaccgccctcggcgtcggaggcgtggcgatctcgctgggtctgaaggatacgatcgccaacatcatcggcggcttcggcctgatgctgggccgcgtaatccaacccggcgacctggtgaccattcaaggcgtcacaggtaccgtgcatgacatcacctggcgacagaccgtggtgcgcacccgctccggggacatgatggtcattcccaattcggtgctcaatacggccgccttgaccaagctcacgccggccagcgaaggcatggccacgctcgaattcacggccaaggcctccggcgacccgtccgctatcagtcaggatattctcgaccgcgtaaccaaagccaccgccgacgtggcactggagggccagccaccgctggtcaagttcaccggcttctccccttacggcatgaccggccaagtgcttgtgttcgcgcgcgagggtgtgctgccctccaccatcaaagatatggccgcgcgcgccatcgccggttcgggcactaaataccttgttgaagatggcggctcgtcagacaatctgtgatatctcccggctcacctctctgggtccggctatgacagtcatgcgaacagcatccaaccggtaagcatcacagtcagcagtaggtacgcaataacgccgggattggcataggcggtgcgtattttaagccccgccggcaactcctctggcgcaagatagaactcccagttcttgcgcttggtgataagcagcacgataccggcaatgcagaggcccaacatcactgtgccgtacaacatcatgatgcccatgccgcccatgttgccggtttcagccatacgcatgatttcggcctcgctgattgtgccgtcgaggatgcggggatcgatctgttgtatcaccaatggggcgagcactgccccgttcaggttgatcagcatgtgcatagccactgaataccgcaggcgggaggtgcgtgtgtatacatatccgaacatcagtcctaggccaaaggcgtagaagaactggaacacgttcatatggaatagcgcgaacgccaatgcggagaacatgattgcggtcttttctccgtaccggcgcaggcgggagataatctccttgcgaaaaatccattcttcgcaaaccggtgccaacaggcctatgaacaatgcgttcacccgccagtcgctgccaagaatcacgtcgttgatgcgattggtggcctgaccatcagtggctccggcagacaatatattgccgatcatattgcccaagagcattaccggaatgcacatgacgaaaatccgaatgaactcccccgccttcatggggtactgccgggtgcgaataaccggtacgcgagtgaaggccaacatactcagcggcatggccaccacatacagcggcccggaggaggcgagcaacacagcccaagcgggcacatcggcgccaagcagcgttcgtagtgcttcagtggccagaatattcagtccgatccagaacaccatcataatggcgagcgccgagccgattgtcgaaaaccggcgatgggccgtgaaccaccaatcgcgtggggtttgttgcggctgctgcgccgacggcattggttcgctcatacttatcccccatagtcactggccgcaaacggaccgatcacacgtgcaatactcttcaagaatacggcacggcgtttcgattgcattgggaatggggaaaatcatcaatgggcaaggaatgatctacgtcaatcaatccccatgccgagagagtcctctcctctgcgggattgttgtgggacggcacgcgattttgcccgattttttcgcggcggcccacaccactccacatatgactgatgacgccgcacgaagaaatggcgtcattgcaacgattcctcaatacaatctgtgggacggcacgaatgtacatcgtttgacgttcatgccatcccacaccggcgtgggacggcacgcgataatcgcccaaaaatcgccgccgtcccacacatatcattgccgataagccattcgacgatcgtacagtcacaaaacagaacagaaccgcacgatcatcgcaacgccattcagcaggcgagcgcggcgaccggacgcggggcgacaatcacgtcatcgcccaccgccagaccggccggcagctcgctggcgggcagctgcacggtggccttgagctgttcacctttgttccagcgctggtattcgccggaggtgatgaccgtgtccacacgaaccaaagagccaaggaagtgaatgacctccacgcgggcgcgttcgccgacgtgcgaatcgctgctgccagccaaggccagcatcaggttctccgggcgcacgagcacggccacggaatcgcccttggcggagccggcgagcagcggcacgcgctggccgaagaccacggcctcgtcgccattggatgcgccgagcaggcggttggtgagtccaatgaacgtggccacgtactcggtggcagggcgctggtacaggtcctgcggggcggcgatctgctcgatcttgcccttgttcatcacgccgatgcggtcggccacggccagcgcctcttcctgatcgtgggtcacgaagacggttgtggtgccggtggtgagttggatgcggcgaatctggtcacgcagctggacgcgcactttggcgtcgagcgcggacaacggctcgtcgagcagcagcacgcgcggcttgatggccagcgcccgggccagggccacgcgctgctgctggccgccggacatctgctgcgtgtacttcttggcctgatcggcaagccccacgagctccagctgttccatggcgatcttgcggcgttcggccttgcccatgccgcgcacttcgaggccgaattccacgttctccagggcggtcatgtgcgggaacagcgagtacgcctggaacaccatggccatctcgcgcttgttcaccggcacaccggtgacgtcctgtccgccgaccatgatgcgtccgccttggatgtcttcgagaccggcaagcgatcgcagcgcggtggacttgccgcaaccggatccaccgagcagcacgaccatttcgccgggcttgatgtccaggttgaagtcgtcgagcgcgtgaacggtggagccgggatagatcttgacgacgttctgcatctgaatggaaccaccgccgcgcttggcggtgtctttgagcagggccttggcggccttggtcacgtccttgccgcgcacgccctcgagggtagcggtgggatcgttcttgaaggcgtcctcggcagtggaggacacggctgccgggatggccggggacgccggggcggcgtccactgcggtaccggtttcctgacgggtgggagttgaatcgttgttcatcgggtcacttaccttcccttgacttacgcattgcgtcggagatcaggtcgagcgcaacgaggagcaccacgccgaagagcagagccagcagcgacatggcggtggaaatttgggcattggattggccgagctggtagagcgcgacctgcaggttcatacggccgagcagcgaggcgacggtgtattcaccgagtaccacggcgatggagatgaaggatgccgagaggatcgactgccacaggttcgggatgatcaccttgaagaacactttgggccaggaggcgccgagcgatcgggaggcttcgaccaacgtcttgacgtcgatggagttgaggcccacggcgatcgcgcggaaggcgaacggcatcacgagaatcacataggcgaagcacagccagatcgggttggtgctcaacacgtcggcggaaagccaacggtagatcggcccaagacccaccaccagcacgatggccggaatggtcagcggcagcgtggccacccattcgattgcacgctccaaggctttggagcgaatatgcacgatgaccatggtgggcaccagcaggatgagcatgatcacgacggtgacggcgctcaacgacagcgagatgccgacgccctgccatagcacgctcagatcggcgcccaacgattcgccgttgccggtgaaaatcgccgtccacggcgcggccgaccagcgaccggacaacgggtgacgcagggtgaagatgaacatggccagcagcggcacgaacaggaacgccagggtgacgaacaggatcacgaatttgatgatgctctgtttgcgcacgcgggcggcacgcagctgcggcggcttggttgtggaagtttcggtcattgccaacgtccggccctcttttccacggcgtggctcagcagcatgacgatggccacgacgatgatcattgcgaatgccagcacctgcgcgaagccctgctggttggggtccatctcattgcgcatggcaccttggatcatcaacggcaccagaatcgagcgctgcgagaacagggctgcggcggtcgcgtatgcggagaacgcggaggcgaacaacagcaggaacgccgagatgaagcggggtgcgaggatcgggcaggccacgcgcgtccagtattggacggtgttgccgccgagcgactcgcaggcttcgcgccactgtggacgaatggaatcgaccgcaggcaggaagatgatgatcatcagcggaatctggaagtagcagtagacggtcaccagccccggcagggagctgagccaattcgggttcacggtatagccagtcagggttttgatgagcatggtgccgatgccgttgatgccaagagtggcgatgaacgcgaacgcgagcatcacgccgccgaactgggcgagcaccgatgagatggcggcgaccatacggcgcagcggtccgttcggcttggcgccgatcaccagcgcgtaggaggcgagcgcgcccaccacggcaccgatcagggatgaggccacggacaccaggattgacgtgccgaacgcggcgatggtgttggcttcgaacatcttgtggaagttcgcaagcgtgaaaccgccgctgcgatcctggaacgcgccgatgatcacgatcacggtgggtgcgagcaggaagcaggcggtgtaggcgaagaacgggagcgtggtggtgagcgtgccaagctcctgacggtgcttcgccagtgcggacgaagcgggggtcgatgcggcggacggacccgcggccttggaggcggcgggtccgttcggtgcgatgggtgcgattgcggcggtcatcgtggactctcagttgccgatcgtcttgtcccagttgttttgaagccactcggtgatgcgggtggagtcatcgttgctgtaggtgaccggctggccttcgatggtgatggcgtccttcagggtggcctagtcgacggtgccgtcggccttcatggagtcgagcagcaccgggttggcgccgcccttgaaccacaggttctgggtttcggcggtgtacaggtattcctcccacaggcgtgcggcggcggggtgcggcgcgtccttgttgatggcctggttgtagtagctgacgacctgggctttggggaaggtcttgtacttccagttcacgcccttggacttgagttccttcttgtaggaggcctggttgtaggtccagtcgaagaccacgccggtctggccggagtcgatggtgccgttggtcacatcgatggtgttcaggttgccggcttccttgagcttcttgaagaagtcgagaccgggctgcaggttgttgatgtcgccgccggcgagctggttgaccatcagatagccgttgaaggccgcgccggcctcggtaggcttgccgttcagggacacggtgccggcgaacttcggatcgagcaggtcgttcagggaggcgacatcgccgtacttgtcggcgttccagcccacggacatgatgccggtgtagtcggcgtagtaggcgccgtcgacgttcttggcagcatcagggatcttgttccaggcctgcaccttgtacggggcgaaatagtcggtggaggtggcggcgatggcctggccgacgtcgaagacatcgggggcggcgtcggtacccttgttggtcttggcggcgtcgatctcctccttggaggaggcgttcgggttcagctcggtgatcttgatctccgggtacttcttcttgaagccctcgatgacctcgcc

SEQ ID NO: 2269 - DNA, 33525 bp, Unknown
  R119_18m  MAG No. k141_7174
caccggccaaaaccggttctgcggatgcatatagtaaaacgccgccgctcgggatttcggactcggcatcgatcccaaaatcaaagcccgggactcaccatcccacaccggcccaaacccatgctccacatgttcgctcatggtttccattctaagtcgggcgattgagcgcacgaggcaatcaggccgagaactgtttgccgaattccgagaagagctggcggcgggcgaagacgagcaggccgagcagcaccagcagggagaccagcccgctgaccatcaccagcacatcccacggagcccagccgagcggaatgaacgtcagaggcagcagaccggcgacgatgtcgaacgccagatacttggcgtactggtcaatggccttggcccgcagcacgataagcagcaccacgtcaaagaccagcgaaaccagacacgtgatcggtatgatgaacatggtgacgacatgattcatcgtcgccacaaaccagaccagcgcaatcgccagcatgatatagaaatatcgaaacatgaggcgaagcggccgcggcgcgtgcagaatcgcactgttgatgaacagcacgctgatgatcagcgcggccgccgatgcactggcaatcggtatcggccacgaaaacagatagctgaagaagccatgcagcagcagaatcgcgccggttacaaacgtgatgatctccaccgccaaacgcctcggacgcagatagatctgctgcgcggggaatgcggcgggagaggcctcgccgtgcaattcgttctgacagagtgggcaacgggccatatcgccggtgaaatcgacgttgcaggcatcgcaatgcttcatgccgacgctcctttctccacatgcgcgccggcgatgttcatacggccgctgatgccctgcgcggcgagaatccgacacaggttcttgatgacgttcagatcatggtagacggtggagatgccgatgctcaggtcgtcgccaaacgagcagaccgtgaaattcaggctggccggtgtggtgaggaagctcaccgaacgcacatggcgcgcgagtcgttcgtccaaggtgactcggccaaggttcgagacggtggtcgtggtctcgcggtcggcgatgaaccgggccagctccagcacccagtccttggcaggggagggcgcgagacgcagcgccggattcttttccagcgcaatcatgcggttcatatgcgattcgacgcgctcgcgactggtggcatggtcgagctgctcctgcacatggcgggcgatgtcggccaacggctcatcggtcagcaatccacccataccgttgccgtgcgcggtgcgggcggcggactgctggccgtcgccggtcgcgtctgggcccgttgcggaagttttcgcggagtcctcatcggcttcgatatcggccggcgtgtacgccacgtaagtcatgccgtagaagttgcgcacggtctccgacctgaagaaggcgcgcaagtcgaccggaatatccacgcgaatcgcgcgattgcgggcgcgcgagggcatgacgtcgcgaatcgcgcacagtatcgcggcgatgaggtaggaggtgaggctcactccgcactgatgcgctgcaccaagcaccttgctggcgctgacgtgatattccatgaacgtgggcgcgtcccggtcgatggggccggccagccggtagatcttcgtgccgggcgcggcaccggccttgtctttctcgtagtatttgtcgaagctgttttcggctttgtcgctgtccgagccgtcgtaatccgaaggcacgcccggcacgtcgtaccgctcggcgatgtaggcgtgcaacagtgacttgaacaggttgatggcgccgcgaccgtccgaaatgatgtgcgagacctcgagattgacacgattgcggaaataactcacgcggaacagcatgcttttgggcccgtaatgcagtcgcgagcatatcggcagatgttccggctccaccagcggccggccgtccgactgttcgaggtaatgccagaacatgccgttgagcaggtgcacgttgaagctcgggaactgggcgatggcatggtcgagcgcgtgctgcaggatgtccggggcgatgtcgtccgccagctcggccgaatagcggaacacggtctgcgaggagcggccagcctgggaggagtagaacttgccgatgttgtctagtcggtaccaagtacgtcttgccatgcgtcgcctccctccggtgcgttggcggtggtgccggtgccgggagccggcaccagcggtgtgtcgtcgaggaaatgctcgatgatccggtaagtggtggacaccagccctacggccgacgtgttgagcagataaccgtggatgccgtcgtgaatccggtaacaggagacgttgtcgttcaccaattgcagacgacgggcgtacgcttcgtcctcgtctctgagcgggcagtattcggcggacaacaccagcgtgcgcggctgattgctcaggtcatgcgcggtgagcggcgcgaaatacggattggtcaggtcggccacggacgaacggtacatgtcgatgtagtcggccatgtcctgtgcggtgaggatgtagtcggtgccgttggtccgcaccgattcgaacgggctggtctcgggattgtagtcgttgccgaccaccgggtaaagcagcatctgcgtgcgcggcatgaactcgccgcggtcgcgggccatgagcgagacggcggccgcaagattgccgcccgcgctgtcgccaaacagcacgatgctgtcgggatccggtgctgggattgtcgcagatatatcgcccccgccggtgggggctgtcggcgcagccgactgggggtggtcaacatcaacagaaccacccaccccagaaatcggcaattccccagcaaacagctgccgggctacctcatagcaattctcaacagcagtagggaagcggtattcaggagccagccggtactcgaccgagatcacacggcgttgcagacgtacggccatatgcgcgcaagcctgcgtgtacaggttgatgccgcctgtggtccaaccgccaccgtggaaaaacaggatcgtgccacgcggcgtgactgagggaagttccgtgttggcattgccggaaataccgtcggtgttgccgctcgacgtgctttccttgatgggtattttgggtaggactttgggtaatacggcgggcagaatcgcggatattgccgaggccactggcgtgccattggcggaagattcctccagggcttcgggcaggggcgctccataggcgaccagcggcgtgaacactcgcaatggtacggcatatccatccgccataggcgcgaaggcgtcctcgacacggcatttcggattggcgggtgcctgcttggcgataagctcttccgccacgcgctgcaatttgtacgacttgcccgcgttgggcttgatgtagctggcggccttcatcgcggcgaacaatgcctcgttgatcggcatgacgacaggtcctttcagcggcggattcggtagtgcgaacaccccaaccttagcccatgaccggcatgaacaaaaaagggaaggaacccgagagttccttccctgtgtgccgtatcagacgcgatacgcgccgattatcaggcggcgaagtattccacgccggcctcgaagatcggctggtacttgttgccgggcacgttgacgtacaggccgttgccggaacgctccgagtgacccatcttgccaaacacgcggccgtccgggctggtgatgccctcgatggcgagcagcgagccgttcgggttcacatctaggtccatgccgggggtgccggtctcgtccacgtactgcgtggcgatctggccgttggccctgagctgggcgagtacctcgtcggaggccacgaagcggccctcgccgtgggagatggccacggtgtggatgtcgccgaccgaagtcttggacagccacggggagaggtcggaggccacgcgcgtgcggaccagtcggctctggtggcggccgatggtgttgaaggtcagcgtcgggcaggcgtcggtcatcggcacgatgtcgccgtacggcaccagacccagcttgacgagcgcctggaagccgttgcagatgccgagcatcaggccgtcgcggttcttcaacaggtcacgcacggcctcggtgacggccggcgcgcggaagaacgcggtgatgaacttggcggaaccgtccggctcgtcgccgccggagaagccgcccgggatcatcacgatctggctcttgttgatctcatcgaccaacgcctgcgtggattcggcgacggcggccggtgtcaggttgttgatgatcagcgtggtcacgtcggcgccggcgcgctcgaaggcggcggcggaatcatactcgcagttgttgcccgggaacaccgggatcaccacatgcggcttggccacggaagagccgacgtacacggtcttcttcggcgcgtggaagtcgatggtctcgacggtcgcgcccttgtcctcgcccttggaacggtacgggaacacggattcgatgccggactcccaagcttcctgcacagcgttcaggtccagcgtctcgccggcggccttgaacacgtactcggaggtggtggtgccgatttcgccgatctcgaccaaattggagacggccggaagcttggcatcgtctgccagctcgacgatgaacgaaccatatgccggggtgaacaggtcgtccacggcgatgctgtcgttcagagtcacgccgatgcggttgccgagcgtcatcttgaacagggcttcggcggtggcgccatagcccggcgtggagacggccagggcatcgtggaagtcggtgagctcctcgatcacggagaacacctcaagcagcgcatccttgtccggggtcagaccgtcggccaggtagcgcggcgcgatgcgcacgatacggtgatcggcgtccttgaattcaggggaggtggcgcgcttcatgttgcccacggccacggcgaaggagatcagcgtcggcggcacgtcgagatcctcgaacgaaccggacatggagtccttgccgccgatggcgccggcgcccaggtccacttgggccatcagtgcgccgagcacggcggccgccggcttgccccagcgttccggctcgtcgcgcagcttctcgaagtactcctggaagctcaggtaggccttctcatgctcgaagccggccgcgaccagcttggccagcgactcgaccacggacaggtaggcgccggtgaactggttcttggacatgatgtacgggttgaagccccacgccatcgccgaagcggtggtggtctcgccgaacaccggcagcttggcgaccatggccatgttcggggtgagctgacgcttgccgccgaacggcatgagcacggtgcccgcgccgatggtggagtcgaagcgctccgaaaggcccttgttggaggccacgttgatgtcggtgaccagcttgttcatacgctcggccagcgtgccctcgccccacggggtctcgtaggactgctgtgcctcgacatgcacggtctggtgcttggaagcgccgttggaggccaggaactcacgggacagattcacgatcttgtcgccgttccaggtcatcaccatgcgcgggtcctcggtcacggtggcgatcaccgtggcttcgaggttctcttcgcgggcgtagatcaggaactcgtccacgtcctcggcggccacgtccacggccatgcgctcctgggattcggagatggccagctcggtgccgtccaggccctcgtatttcttgggcacggtgttgaggtccacgaacaggccgtcggccaactcgccgaccgccacggacacgccacccgcgccgaagtcgttgcagcgcttgatcagacggcaggcatcgccgcggcggaacagacgctgcagcttgcgctccaccggagcgttgcccttctgcacttcggcgccgtcgagttcgagcgattccacgttatgcgccttggacgaaccggtggcgccaccgatgccgtcacggccggtgcggccgcccagcaggatgatcttgtcgccgggggccggggtttcgcggcgcacatggtcggccggagtggcggccacgaccgcacccacctccatgcgcttggccacgtagccggggtggtagatctcgtcgacctgaccggtggccagaccgatctggttgccgtaggagctgtagccggctgcggcggtggtcacgagcttgcgctggggaagcttgccttccagcgtctcggagaccggcacggtcgggtccgcggcgccagtgacgcgcatcgcctgatacacgtaggaacggccggacagaggatcgcggatgcagccgccgatgcaggtggccgcgccaccaaacggttcgatttcggtggggtggttgtgggtctcgttcttgaacaggaacagccagtcctcgtcgtggccgttcacgtcaaccttgaccttgacggtgcaggcgttgatttcctcggactcgtcaaggccggtcaggacaccgttcttcttgagccacttggcgccgatagtgcccatgtccatgaggcagacgggcttggtgtcgcggccgagctcgtggcgcatcgccagataacgctcgaaggcggccttgacggtggcgtcatcgatggtcacttcgtccagctcggtgccgaacgtggtgtgacggcagtggtcggaccagtaggtgtcgatcaccttgatctcggtgatggtgggttcgcggccctcctcgctgaagtacttctggcagaattcgaggtcggccaggtccatggccagaccgcgctcgtcgatgaacttctggccggcttcggcgtccatctcgttgaaaccggcgatggtctcgaccttgccgggcaccggcacctgggtcttcagggtttccttggtctccaggctggcctcgcgggcctcgaccgggttgatcacgtaatgcttgatggtgtccacgtcggcgtcggtcagttcgccttccagcgcgtacagcttggcggagcggaccgtcgggcgctcgccctgggagatgagctggatgcattcggcggcggagtcggcgcgctggtcgaactggccgggcaggaactcggtggcgaagaccttggctccggcgaagtcgggcaggtcgtaggccacattgtccacctggggttcgctgaacacggtgggcacggtctggtcgaacagttcctgggagatgccttcgacgtcatagcggttcacgatgcgcagggccttgaggccgttcagtccgaggattgtgcgcagttcgcccgcaagctgctgggcttcgacatcaaagccgggcttcttttccacgtacacgcgaaaaaccatggaaatcctttcttgaaattattgaaaaattgaagaagtgcggtaaaagaacttggctcccctctctgaggggagctgtcagcggagctgactgaggggagttgtcatggcggtgaacgtcttgacctcccctcagtcgcctatcggcgacagctcccctcagagaggggagccagctgtatgttctgctacctgcacctaaacgacttattcggcgacttcgatgccttcggacttggcgagttcggcgaggcgctcctcgatctcttcgtaggccgggatgatgctgccgagaccacggcggaacaggtccttgtcaaggtgctcgaccttgccggagtggtccttctggtcccacagacggcaggaatccggggtgatctcgtcggccaacagcagcgtgccgtcggtggcgcggcccatttcgatcttgaagtcgaccagcttgacgtcgatcttggcgaagatctcgatcagggcctcgttgatcttgcgggccagcggggcgatctcggcgagatcctcgcgagtgcatacgtcgagggccaccaggtcatcgtcgttgacgaacggatcgtgcagatcgtcgttcttcaggaagtactcaagcaccggctccttgaacggcaggccttcctccacgcccagacgggagcagaagtggccggcggccacgttgcgcagcacgatctccaacgggaacatgttcaccttgcgtaccagctggccggtgtcgttcactcgcttgatgagatggctgtcgatgccgcgcttcttgagcaggtcgaagatgatggtggtgatgaggttgttcaggcggcccttgccggtgaagtcttccttcttttcaccatcgccagcggtggcggtgttcttgtattcgacccacagaacctcgggatcgtcggttgcgtacagttgcttggccttgccctcgtagagcttttccagcttctccatgactcacctttcaggagtggaatttctgggtgaactaacggtaaaagggtaccaatcgagggctacaacaacactcggcatgacgctacgatgcggccagcgcatcatacgtcgctgcatcgaacggccatacgctgttgggatggcggaggcggacggtattggtccgacaatcgactcattgccggtcgcatagtcgttcggagtaacagtatctacgcaagcacgcggacactcagatgttcgtcaatagacaaaacgtgagtgtacggccgcgcacgcacgataatgggagtgacgaaatggtgcaaggaggttcgtcatgattgatcatattggtttgtttgtttccgacgccgcacagtacgcggatttctacgagaagctgctggccccgctgggctacgtcaagaaagtggcatacccgaccgccgtgtgctttgccaatgacgaggatggtgacagcgtttggctggagtctccgaaggacggcaacccggtggtgccgtcccatgtggcgttccgcgccaaggatgaggccgccgtcaaggcgttccatgaggccggtctcgcctctggcggtaccgacaacggcgctccgggcccgcgcccgaactatggccccacgtattacgccgcgttcatccacgacccggacggcaataatattgaggccatgctgagctgatcaggccgtggactactccacggtaatcgtcaacgcatcggcaacacggccggccttggcacgggcgtcggcttcggactcgccgacggccagtgccacggccatacgacggtggccatgcacttcgggcttggcaaaaatgcgcaggtccgtgccgggttcggccagagcagcggccacatcggtgaactcggcctcaccgtcgccggccaccacaatcgcatggcttgccgccaccgagccggccggaatcgtgagcgccacatgctcgggggtgatcggcaggccgagaatcgcgcgggcgtgcagcgcgaactcgctcagacgctgggaggtcatcgtcaccataccggtatcgtgcggacggggggagacctcgttgaacagaatcgagccgtcggtgagcacgaacagctccacgccgaatacgccccaaccggtttcgccggtcgcctgagccttggccaccaagccttcaacggcggtacgtgcgatgtcgcgcgcccgctcggcctcaccatcgggctcggtagcaggctgccaggactcgcggtaatcgccggactcctgacgttggccgatcggcgcgcacgtcacaatgccggcggacgaagaaatggtcagtaccgtcagctcacgctccagcggggcaagcgcctcaacgatcacgcgcgacacatcgccctcatcggcggcgcggcggccctcctgcgcttcggtccaagcagcatcgatggcgtcggcggaacgcaccaccgactggccgtgaccagacgagctcatcaccggcttgaccacgcacggatagccgacttccgaagctccggcgcgcagctcttccagcgagccggcaaaacgatacggtgtagtcggcaagcccaattcttcgtgggccagtacgcgcaggcgctcgcggtccatgcaaatcgcggcgatttcggcgctcggcaccacctgggcgcccgcggccgcagcaccggccagcacatcggtggcgatggcctctacctcgggcacgatgatgtccggcttgatttcatcgaacaatgcctgcaattcggcggcattcgccatatccaacgcgcggtattcatgcgccacctgctgggccggagcgccggcataggagtcagcagcacacacccatgcgcccagtcgcatgagttcaagtgtgacctccttgcccagctcgccagcgcccaaaaacagcacacgggtggggtgcttgcccagcggtgtgcccagcgggtggttggctgcgcgagttgcgggggggacggcggaagtctcggcgggaattgcgggagaggaggcggaagtcacggcagtattcacggcgttctcagtcatacccacattctgccatgacgcgatgatttcggtatgtcgcgtgagcggagtgcctcgcgtggccaaaattacgggcggaatatccggcttcatggggcggtaaattccccatggggcggtaatgagtccatggggcggtttgttggttttgtgaaaccgcggaattaagccgttttgccttaccgccccatgggaatttcaccgccccatggggtaaataccgccccatgggcaggttgccgccccatgaagattcagatgcccgtaacccgccataaatactgcgtatagacatgccattgcgtgtgtaacagagccgtcgtaccttagcaattaccggccgatgaagtatggggcggtcgggccaacattttgggatgcgacatatagcgaatagcggcgtgccggttccggcatttcaggctacaagccggcacgctggcaatagtcgaagtacttaacgatttcgcctatgcggggctcgaattcggcgacgtgcgctcgctgagcctgctggagactccgggcgcgctggacgtggcgctggaacttggctcgctgtccaaaatgtatatggtggccggctggcgcggtggcatggcgattccgccgcattcgtggattggctgctcaacacggccggcgtggcgctgatgccggggcctgcttcggtcaggcgggcgaaggctgggtgcgcatcagtctgctcaagcacaccgccgagttgttccaggccgtggcccgcgccgatcgtgcgctgcgaagcgcgtgattcaatattgggcaaaatgcggcagcccataccatttccggcctatccaagcagcgcggccgacgctattgccgcgcggtggtttaggatgaggcaatgcgcgaaaacgggattgaagagagcattgatcgtccgctgactatcgctcttgtggtcgatacggtgggcaatcagggcaacggcacctccaattcggccttgcaatgggctgcggaattggagcggcaaggccatcatgtgaggcttgtcggtataggggcgcccgaatatccggcgcgtgtgaataaggtgccactcgtctcgtgggtggccgccaagcagctcatgcaattcgccgaacccagcgacacgttgttccgcaccgccttccaaggcgtggatgtggtgcatatctatatgccgttcaaattcggccgtcgtgccgctaaagtcgcccaccaaatgggcattcccgtgactgccggattccacctgcagccggagaacgtgctgtattcggccggcccgctacgtcgcattcccggtatttccagcttcctgtactggctgttcaagcactggctgtacaagcgcattgaccacatccatgtgcccaccgaaatgaccgcgagcctgttgcgcgcgcacgggtataaagccaagttgcacgtgatttccaatggttattcaccggtgtattcgccgaagaagccggccgatccggatgcctcggctcccgtgccgttccgtgttgtcgcttccggccgactggccagcgagaaagatcagattacgctgatcaaggcggtgtcgatgtcccggcacgccggcgatattcagctggtgatcgccggtactgggccgctcaagcagtatctcaagttccgcgccgggcgtttgctggcgcgcaaggccgatatcggattccacaagcacgccgatatgcccgatttgttgcgttcgggcgatttgttcgtgcattgttcgattgccgacatcgaatcggtgagcgtgatcgaggcgatggcgtgcggattggtaccggtgatcgccgcgtccgaattgtcggcggccggccagttcgcgctgatcgacgagtcgttgttccccgtgcgggacgcggccctgctggcccgacgcatcgattggtggatcgcacatcaggccgagcgcgccgaatggggcgagaaatacgccgaatacaccaaggcgcattattccgtggaagcctcggtccacaagttcgtggatatggaacgcaaggcgataggggagtaggagccttctcgtttgcggagaggttttccctcagtccgcctgcggcggccagctccctcatcggcgggagctacgaaaaaacctccctctggtgagggaggtggcatcgcgaagcgatgacggagggagagattagcgaagggttttacaacacctcaataagctgatcgacttcttcaggcgtggtggcccagctggtgcagatgcgcatcacggtatgcgtgtcgtcggccttctcggtaaagccgagcttgacctcgcgctccagacggtcgatggtcggctgatccatcgtcacgaaaatctggttggtgggcgcttcgaaagtgagcatgtagcccttggcgcgcagggcctcgcgaatacgatcggccgcctcattggcgttgcgggcgatcttgaagtacagattgtcggtgaataaggcgtcaaactgcgcgcccagcacgaagcccttggccagcaaggcgccgtgctgcttgatgcgggtcaggaagtgcttcggcgtgttgtgcttggtaaacaccacggcctcgccgaacagcgcacccaccttggtaccgccgatgtagaacacgtcggcgatggtcgccagatccgtgagcgtcatgtcggaaccagtggcggtcagcgcgtagccgagtcgcgcgccatccacgaacagcggcatatcgtacttatgcgccacatcggcgatggcctgcagttcggctttggagtagatggtgccatattcggtgctttgcgagacgtacacggatccagggaacaccatgtgctcgtagttgccgtccgcatagaaggtcttgcagaactcgtccagttcggttggatccattttgccgttgtgttggggaatcgtaagcaccttgtgcccggagaactcgatggcgccggcctcgtgcacgttcggatggccggaggcgaccgcgaccacgcctgcatacgccggggtgatggtgtcgatgacgacctggttggtctgcgtgccgccgacgaggaaccacacatccgcgtccggctggccgcaggcctcgcggatcttggccttggcctgatcgctcagttcgtcggacccgtagcccgaatacagatggttgttggcttcagccacggcttcaagcactgcgggatgggcggcgcgggagtaatcgttctcaaaagacagcatgacggaccttttgtccttgtgttagatgaattggatatgcccgagtgtacaacgtggcggttcccggcaggagcggggaattcatggagaaaaacaaaacccttccgcgaacggaagggttttactggggtggccaacgcggctcgaacgcgcgaccttctgaaccacaatcagatgctctaccaactgagctatggccaccatagtgtcgtattcagcaagctgaattcgcacaacaggtgaatactatacacaactttgcggatgtgtgctcatcggtgtgtcgcgatggaatcaagcggttggtttcattcttggggccaggctgtgggctgtctcaaatggtgggatgtggacgagtgggtcttgtgtggcgattgatgaaaagtcagggcacacaacggcgtgatggtgcggctggggattgcagagatgattacgtgagcgttcacaatgtgagcattatgtttcatatcaaccgcgacccgcctagtttcatgcgatgttacctacaccgaacaagggaagagaaacaccatggaaaaggttaaagcctttgcagattggctgaccaagtggtttacggtcatcgtcatcgtctgggccgtcttcaactacttcgtgccggccgccagcctgtggggcaaggcgtacaccggctacatgctgggcatcgtgctgttcggcatggggctgaccctgacgctggacgatttcaagcgcatcctcacccagccgatgatggtcatcgtcggcacggtggcccacttcgtcatcatgccgctcgtcgccgtggccctgtgcgcgatcttccacctgtccggcccgctggccgtgggcgtgattctcgtcggctgctgcccgtccggcacctcctccaacgtgatgagctacctgtcccgtggtgatgtggccctcgatgtctccatcggcatcctctccaccctgtgcgccccgttcatgattccgctgctgatgcagctgctggcctcccagtatgtgagcgtgccggtcgaatccctgttccttaacgccgtcaaggtggtgctcttcccgattgccctcggtgtgatctgccacatggtcttcggcaagaagatcgagaaggtcacggtggccctgccgatcgtgtctcaggtggccatcctgctgatcatcggcgtggtcgtcgccgccaatggcccgaagctgttcgtggccagctctctgatggccatcccggtggtcatcctgcataatctgtgcggctactcgctgggcttcggcttctcgaagctgatgtacaggatctacccgaagggcttccgctacgcgcagcagaaggccatcacgttcgaggtcggcatgcaggactccgctctgggcgccacgctggccctgacctccttcgcgtccaacccgctcgccgccgtgccgtccacgttcttctccgtgtggcacaacatctccggctccatcctgtccagctggtggcgcaaccatgacgaccggcacgagattcattgggattctgacaacggcgagaagggctccgccaagagcaccgtttccgtggcccacccgttcgacgccgacaaggccgccaaggtcgctgcctgaaatcctgagatggtgagaaaggtcgggtaaggtacgactccagtcagtcggtcactcacctttcctacctcgcataacatagccgctcccgcttactcccgattaatgtatcgggcgtttcgcgagggcggttttgctataattagtaatgcagaaagcggcaaggtgatacggcaaagaggccgggtcgctagaggttcccatcggatatggaagagcacgaggatgtgctggaaacagataacacagaagcggcatgtggtgaaaagaaacataatgtaacctccttggcggtgcccccgtgtgacatagtctccgcgggggcacctgctgtgtggcgttcgcttttttgcgacgcattcccgggaatattgcgttgggagggcgtgtgtgcgtgtgttgtgcgacgcattcccgggaatattgcgttgggaggaggggagaagtacagggcgcggattgtcccaagctagtgagtcgaggcccggcgcgtcgttgtccggcggaatcgtagtatagatattcgtgtgtgccagcagcacgccttatgtaacaggcgagcatgctgggatatccttcaaaccgctgatcgcacgcagcaatgcgccgacgggaggggagaaggccatcgggccggtggactgggctatcttttccgattcgtcgggtgtcgccaacaggcagatgccaagcgagtgtgctgaaaagtgtgggcgcagtgcggcggtcacacaaaagcaagagaaaccactgaatcggagaattcaagttgcctactattgaacagctcgtccgtaagggacgtcaggcaaagccgaagaagtccaagactttggccctgaagggcagcccgctgcgtcgcggcgtgtgcacccgtgtctacaccaccaccccgaagaagccgaactcggctctgcgtaaggtcgctcgtgtgcgcctgtcctcgggcatcgaagtcaccgcctacattccgggcgagggccacaacctgcaggagcactccatcgtgctcgtgcgcggcggccgtgtgaaggatctcccgggtgtgcgttaccacatcgtgcgtggcgcgctcgatacccagggtgtcaaggaccgtaagcagggtcgttccctgtatggagcaaagaaggcgaagtaagagatatgtcacgtaagggaccttccaagaagcacgtcgtgctgcccgatccgatctacggttccaccgtggtggcgcagctcatcaacaagattctgcttgacggcaagaagtcgatcgccgaagacatcgtctactccgcgctcgatatggtcaaggagaagtccgaccaggaaccggtggctgtgctcaagcgcgccctggacaacatccgtccgtccctcgaggttcgctcccgccgtgtcggtggcgccacctaccaggtgccggtcgaggtcaagccgaaccgcgccaacaccctgtcgctgcgctggctgaccgacttctcccgcgcccgtcgtgagaagaccatggccgagcgtctcgccaacgagatcctggatgcctccaacggcctcggtgcttctgtcaagcgccgcgaggatactcataagatggcagaggctaacaaggccttcgctcattaccgctggtaatcactcgccctgagtaaaactaaggaaaaagatggctgaagagatttcggacctccacgacgtccgcaatatcggcatcatggcccacatcgatgccggcaagaccaccactaccgagcgtattctgttctacaccggtaagaactacaagatcggcgagacccacgacggcgcctccaccatggacttcatggcgcaggagcaggaacgtggtatcaccatccagtccgctgctaccacctgcttctggagccgtcagtcccacgacaccaaggacaagttccagatcaacatcatcgatacccctggccacgtggacttcacggccgaggtggagcgctccctgcgtgtgctcgatggtgccgttgccgtgttcgacggcaaggaaggcgtggagccgcagtccgagaccgtgtggcgtcaggctgacaagtacggcgttccgcgcatctgcttcatcaacaagatggacaagctgggcgcgaacttctactactccgtcgacaccatcaaggagaagctgggcgccgctccgatcgtgatgcagctgccgatcggcgccgagaacgacttcaccggcgtcgtcgacctggtcgagatgcaggcctacgtgtggaacggcaccgaggagctcggcgccaagtacgacaccaccgagatcccggacgatctcaaggacaaggcccaggagtaccacgagaagctcgtggaagccgccgccgaagccgacgacgaactcatgaacaagttcttcgaggacggcgacctgtccaaggaagacatccgcgccggcgtgcgcaagctcaccatcgccaaggaagccttcccggtcttctgtggttccgccttcaaggacaagggcgttcagccgatgctggacggtgtcgtcgactacctgccgtcccccgaggacgtgccggccatcaagggctacaagcccggcgacgagtccgttgagatcgaccgtcacccggtcaagaccgatccgttcgcggccctggtcttcaagatctccacccacccgttctacggcaagctcgtgttcgtgcgcgtctactccggctctgttgtgccgggcgactccgtgctcgactccacccgcgagaagaaggaacgcatcggcaagatcttccagatgcacgccgataaggaaaacccgatggaccgcgccgacgccggcaacatctacaccttcgtgggcctgaagaacgtcaccaccggcgacaccctgtgctccatcaacgacccgatcaccctcgactccatgaccttcccggatccggtgattcaggtggccgtcgagccgaagaccaaggccgaccaggagaagatgggcatcgccctgtccaagctggccgaagaggatccgaccttccaggtcacgaccgacgaagagtccggccagaccctgatcgccggcatgggcgagctccagctcgacatcatcgtcgaccgtatgcgccgcgagttcaaggttgagtgcaaccagggcaagccgcaggtcgcctaccgcgagaccatccgcaaggccgtcatggaccagggctacacccacaagaagcagaccggtggttccggccagttcgcaaaggtcctgatgaacttcgagccgctcgacaccaccgagggcaagaccttcgagttcgagaacaaggtcaccggcggccacatctccgccgaattcatcggccccatcgaggccggtgtcaaggaggccatggagtccggtgttctcgccggcttcccggtcgtgggcgtcaaggccaccgtcaccgacggccagatgcacccggtcgattcctccgaaatggccttcaagctcgcaggttccatgtgcttcaaggaagctgccccgaaggccaagccggtcattctcgaaccgatcatgaaggtcgaagtccgtacgccggaagagtacatgggcgaagtcatcggcgatctgaaccagcgccgtggcaacatccagtccatgaccgacggcgtcggcgtcaaggtcatcgacgccaaggtcccgctgtccgagatgttcggctacatcggcgacctgcgttccaagacccagggccgcgccatgttcaccatggagatggactcctacgacgaggtgccgaagagcgtctccgaggagatcatcaaggcccagcgcggcgagtgacacgcgccacatcatgaagtggccggtgtctccagtcagcggtagtatcgtataccgctgactgggttctggctcttcaaagtggcacataacccagaaacccagtagaataagcgagtccctgtgcgaaagggcgcaggaaactcacgagacgtccaggaggacaaaagtaatggcaaaggaaaagtacgagcgtactaagccgcacgttaacatcggtaccatcggccacgtcgaccacggtaagactaccctgactgccgccatctccaaggtgctgcacgaggagttcccggatgtcaacccggagtacgacttcaaccagatcgactccgctccggaagaggccgcccgcggtatcaccatcaacatcgcccacatcgagtaccagaccgagaagcgtcactacgctcacgtcgactgcccgggccacgccgacttcgtgaagaacatgatcaccggtgccgcccagatggatggcgccatcctcgttgtggccgccaccgacggcccgatggcccagacccgcgagcacgtgctgctcgcccgtcaggtcggcgtcccgaagatcctcgtcgccctcaacaagtgcgacatggtcgacgatgaagagctcatcgagctcgtcgaagaagaggtccgtgacctcctcgacgagaacggcttcgatcgcgactgcccggtcatccacacctccgcctacggcgccctgcacgacgacgctccggaccacgagaagtgggtccagtccgtcaaggacctcatggccgccgtcgatgactacatcccgaccccggttcacgacctggacaagccgttcctgatgccgatcgaggacgtcttcaccatctccggccgtggtaccgtcgtcaccggtcgtgtcgagcgtggccagctggccgtcaacaccccggtcgagatcgttggtatccgtccgacccagcagaccaccgtcacctccatcgagaccttccacaagaccatggacgcctgcgaggctggcgacaacaccggtctgctgctgcgtggcctcggccgtgaggatgtcgagcgtggccaggtcgtggccaagccgggctccgtcaccccgcacaccaagttcgagggcgaagtctacgtgctgaccaaggacgaaggcggccgtcactcgccgttcttctccaactaccgtccgcagttctacttccgcaccaccgacgtcaccggcgtcatcgagctgccggaaggcgtcgagatggttcagccgggcgaccacgccaccttcaccgttgagctgattcagcccatcgccatggaggagggcctgaccttcgctgtgcgtgaaggcggccacaccgttggctccggtcgtgtgaccaagatcctcgcctgattttcatcagacaagaatcttcgcttgaactagcgacttaagaaatccccttcgaggaaactcggaggggatttcctataaccgcagcaggatatggatatgtaccacgacttccggcctggatgcgctagtgttgctttccaatagataaacggactgctgcactgcgagggtatgacactgatggcaggccgggaaagaaggtcgatgatgactggttcgcaagccgcacactgtggttccgtatccgcgctttcactgggactgcccgtctccacggcgattcccgaagccaaaggcacactgccgaaagccttgttcgtgggcaaggcaccgatttcaggcaaactcaagcagcgattggtgaacgaaatcgaatccattaccatgctggcgttggtccggtcgattaacactgggcttgcggacggcaaactggttccggaagtgctggtcatcggactgaagcttacggccaaagccactggcataccgaacgaggtcatcgatttgattgccgggcagcgtaaatcgggcatcgtgttcgtgtgcgtacgcgacgtgccgttcgagggcagcacacgtgaggaatgtgcgttcgccgtgcgtcgggcgataccggggcgtgccggccacacgccgatctatcgggtatatgccggcgattggcagccggcgggggaggcccagctggagctggccggctctactattgatgagctgtgggcctcgctgtgctcacagaccattctgggcacgccggagatcgaaaatctggatgcgcgcatcattcgccatactgaaattgctcggctcgaatccgaagtggacaagctcacccgcgaccatcagcgcgtcaagaatcctgttcagcgcaatgaaatctatgccaagctccacaaggccaaaacacagctcgcaaaactgcgcgaagcatagtgatatgaaaaccattggggtcccgctggcgggagctggctcgcaaagcgagactgagggtggtccaggtccgtggcctagggctacgcccaagctaattgaaatattcgtgcatcatacagcgtacagttaaaccatgttccctctgctcgaaaccctggtcgccgtatacgaggtgggccagttcacgctggctgccgacgaactgaaggtgtcgcagtcgacggtgtcgtcgcgtatcgcccaattggagcagatggtcggcgcgccgctgttcgtgcgcaatgcgaaaagcgacgtgacgcccacacaggccgggcggatgctgtaccagaccgccatcggcatcgacggattatggcgggatacgcgtgagcagatcgcccgcgtgcaggaggcgcgtgagccgctggccgtttcgttctcgcacacgaccgcggcgattctgctgccgaaggcgttgccggtgatggctcggaacatggacagtttcgacttcgccgtacacgtgatgaactcggatgcgattctcgaacgggtcagcatgaaggccgtgcagctcggcgtggtggaaaagccgatcgtgaacgattcggtggaccgcgtcaccctgtgcgaggaccggctggtgctggcgggggagcccgacggcgtgtggatggtgcgcgagcacggttccggcgtgcggtattacacggatttgtatttcaagaccgctcaggttgtgcctgcacgcacgatggaagtgtccagtaatgcggcgattgtggcggcgctgtccgccgggttcgggcagtcgttgatttcggaagccgccgtgccggcgggcgtgccggtgcagcgggagcttggcgatgagtttgtgcggcggttctatgcgctggtgccgagatccggtctgacgcacgatcagcgggagttggcggagatgattattgctgcgctgcgcgggtagtcagatagtcgactgaggggaggtcgcgaacgttgtttctctctctccgtccgcctgcggcggccacctctctcatcagagggagatcaattaggtatcgacaaaatcgatgatatgtattggttgcaatgatttgaccgatgtaaatgcttgagcttcaatagacaccgtgagagagttctgtacaaaatggtggaagcgcattaccaccgttgacatgttgttcattggcgttctgactctgctggcctcgctgttcgcctcctggctcaagcagttccccggattcagcctgttcggcgcgcttatcatcgcgctgctcatcggtatgatcatccagttcccgatccgcagtgcctacgtcggttccaatgatggccgcaaggcaggcgtcaaggacgccgctggcctgatttccaacaagctgctgcgcctcggcatcatcctgctcggtttcaagctcaacctcgccgtgctgttcacgcagggcatcaagtgtctgccgatcgcagctgtggtcgtcacgctgaccatcatcgtgtgctatgccatcgcccgcaagctcggtgtcgacccgatgctcgccatcctgaccgccggtggcaccggcatctgcggtgcggccgccgtcatgggcctagccggttccatcaaggtgcctgaggacaagcaggacgagaaggacaacgacgtgaccatggccgtggccatcgtagccattatgggtactgtgttcgcgttgctggagatcgcgctcggcccgctggccggcatgaccaaggaccagctgggcatcaccgccggtgcttccctgcacgaaatcgcccacgcggtcgccgccggcgacgctttcggcgcggtggacatcgccaccatcatgaagctttcccgcgtgctcatgctcgtgttcgcggccatcatcatcgctatctggtgggagaagaagcactccgaggtggagaacaccggcaagaagactgtggccttcccgtggttcatgctcggcttcatcggcgcttcgatcatcggcaccttcgtgccgctcatcgcctccatcaccccgcagctcgtggactttgcgtacatcgtgctcggcatggccatggccgcgctcggcatcaacgtgaacttcaaggccatcgcttccaagggcaagaagccgatgctcgccagcttcctgacatcgattctgctcatgtgcttcgccgcaggtgttgcgatgctgttcttctgataagcgctccaaatacaaataggcgaaggcgaacgacagtgagcaattggaatgcgtcacctaaaaatcacgtacttgcacaacggataaccccagccgaactggcaggccatcgcaatgaacttcaccacatacgggctcaggtccgtcgcgcccggcatccagccgatcagcagtgtgctgaacgtgaagttccagatccacagcagcacgaaaagcatcacggaacgggtgaagttgcttgacgatttgaacgtcacgttgcggttcatcacgaagttgtaggtcgccgaacacaccacggcgataccgttggagatctgcgagggcacgccgatcaagtgcaggatggcgaacgtcgcatactccacaatggtctgcgtggcggaaacacccatatacttgcccaacacggcgagtccattttgcttcggggttgccgtgcccacggtattttccgcagtgttcgttgtggccgaggcattcgtgacgtccgcgccctgattgtgcttcacatccgctccattgttcgccatgcccatatacctcccggatgtacctgtgacgttcgacctcgcgatgataccgctgaccgcgtcgggaatcgtcgtggcggtcagacgagaaaaccgcaggccgcagcaacgaccggcacacccagcgacagcaccagataggccgttgccgtggggtagcggcgtttgcggaagagcgtcaccatttcgttgatcgcggtcgagaacgtggagaatccgccgaggaaaccggtggccagcaccagccgccacggttcatcaagtgtcccgcccagtgccagcgccgcaaccagaccggtcaggaatccggcgatgagattgatggtgaatgtggacagcgggaatgcgcgttgccaatacgttttgatggtcgcgtcaagcagatagcggcaggaggcgcctacgccgccgcacaggcagaccaagattggtaggaatacggtcatcacgccttacctcccttgctggtcgtagcggcattcgtatcagcggacgcttcggcggatgcgttcgaggagccggccagatgcgttcctgcccacacgccggcagacgcacaaaccagacccagcgcgaacgtcaccagtagataggcaatgccggccgccacctgaccgtcgcgaatcgcggtgaagccttccaatgccaacgtcgacatcgtagacaaaccgccgcatacgcccatgccgagcccacggctggtgagctccttggcacgcgtgtcgaaccgggaagagccggccaaataggcggtcagacccgcatagcagaagcaggccagcatgttggccacaaacgtgccggtatggaagctgccggctgcgggaatctgcgcgaacgcatagcgaatcgcggtgccgatggcaccgccgcagaagacgaccaacacaatatcaagatggatatcggggagtttgtgcgccggaggagtggccgtgcgcgtgcccggccgggcatctgcggatggggattgcgagcccataatagcctttcctgaaaccgctgaatcctactgaagacacaacgattccatgcaatgtcaaatcgtgtgtaggaactatcagcagtgtgcggttcgaaacaagttcaggcgggtcccatcgccggttctccagattactcatggcgacgaatcgaacagtgagcgtatctcggatattggcctatcgcagtgaattgctcggttgttgccatacctcatgggtatggcgaaacatggtttatggctattggttaatgcaaggcgattattgtttaatagaacacgaggataacgggccttaagcgctcgatgccggaaaacaaggagttatgaacgtatgtctgaaaccatgaaagctgcgattttcgtggagcctggcaagatggccgtggaagaagtgccgaaggcgacgcttgaacaggatgatgacatcgtgatccgcgtggtgcgcacgtgcgtgtgtggctctgatttgtggttcttccgtgggctgagcggacaggccgcgcacagccaggtgggtcacgagtccatcggtgtggtcgaagaggttggcgcggcggtcgaatccgttaagccaggtgatttcgtggtcgtgccattcccgtacagctgcggcaagtgcccggtatgcaaggccggcttcgaatccgtatgccctcacggcggctacttctccgcctgtcaggccgaatacctgcgcgtaccggaggcggacggcaccgtggccaaggtgcccggtttgccggaagactacgatgacgcgacgctcgcttcgctgctgaccgtttccgatgtgatgtccaccggttatcacgcggcggtttctgccgaggtcaagcccggtgacaccgccgtggtcataggcgatggcgcagttggcctgtgcggtgtgattgccgccaaaatgcgcggtgccacgcgcgttattgccatgagccgtcacgaggatcgcgcggcgctcgcccgcgaattcggtgcgactgatatcgtgcccgagcgcggccaagaagctattgacaaggtgctaggaatgaccggtggctatggtgcggacgcagttctcgaatgcgtgggctccaagcagtccttcgacacggcgattggcctgattcgccgcggtggcgtgattggtcgtgtgggcctgccgcacgacgtggagatcagcgccgaaggcacgttctacggcaacatcggcatcaagggcggcccggctcccgtgcgccactatgacctcgatgacggtctgctggatgcggtgctcaagggcgagatcaaccccggtcgcgtgttcaccgccgagtacgacctcgaccatatccaggacgcctacgaggcgatggaccagcgcaaggtcatcaaggcgctgatccggttctagggtcaggtacgcagcgaacggttctcaccaagaaccgtgtgagccattcgcacaaaatcgcacaatcgaacagggcgccggtgtgatggggggggggattgggggtgagccggttcggcttgcgtccttataccgttgttttcgtgtagaatcggctacctctatacctctgttttcgtgtagagtagcatatgcctatactgttgttttcgtgtaatgaggtgattgctcatgttgaagcgcaagatgctggataagctgatcgcatggaaacaaaaagcgggtgggcgtgaggctcttctcatcgaaggcgctcgccgtgtgggcaaaagcaccattgtcgaggaattcggccgcactcagtacaagtcatatattctcatcgatttcacacgtttgccgcgcgacgttcgcgacatcttcgaaaaccagcgtgatgactttgacacatttttcatgctgttgtctgcgtattaccgcaagcgactgtacgagcgtgaatcgttgattattttcgacgaggtgcagcggtatccggcggcgagggagctcatcaaatatctggttgcggatggccggtatgactatgtggaaactggttcgctgatctccatcaagaggaatgtggcgaatatcgtcatcccctccgaggaacggaaaatggacatggggccgctcgattttgaggagttctgctgggccatgggggaggagctgcttgctgaaacgattcgcaaatcgttcgagcgtctggtcccgttgcctgatgctctgcataaacgggggatgaggctgtggcgcgaatatctgctggtgggcggtatgccgcaggcggttgccgattatgtcgagcagcgcgattttggcgaggtggatttgatcaagcgtggcatcctgcagctgtacagtgatgatatcggcaagttcgccaatggcgatgccggccgcgtgcggggcattttcgctcagattccagggcagctgtccaagcatgagaaacgattcactctggcatcggtcgataagggggctcgatctcgtgaatacgattcggcgttcttctggttggaagacgcccgcttggtgaacctgtgccgtaattcgactgaccctttggtggggctgggattgtacgaagataacgattcattcaaatgctatatggcggataccggtttgctggtgtcgcaggcgtttgccgatcgagagacaacgccggatgatgtgtaccgggatattctgttcgataaactctcgctcaacgaagggatgctggtggagaatgcggtggctcagcaattccgggcgaatgggcgcaaactgtatttcttctcgcgctcggatagggcggatgccacgaaaaccatggaaatagacttcctcatcgttcgggaatacgataatgccgcgatgaagcctcgcatcagcccgattgaagtgaaatccacgaaacgatacggcgtatcttcgctcgacaaattccgcaaaaggtatgcccaacgattgggcaaggaatacgttctgcatccccgccaactcgaagtggatggagaacgcatcaagctgccgttgtatatggcccactgtctgtgacgcgagaagatggattgtgccgagtgcgcggttgaaacccatgttgatgagttccgtcggcttggtgttggcgggacacgagccatgcttctatttcaaggccggactaaagtgcgcagaaattcgtgttatcccaagctcagacaatatatcgctcagccaccgcactttcgttaacatctattcaacgttcttcattcggtatggacatcccaccttggatagacgcctcataagctgaacaatgacagcactctgcttgtcactgggaatcttgtacgggatggaagctgccacattcacgcagccgcgttcctttccatcgccttcatctcgtcttccagccattttgcaacatctttccagaactggccacccatcctcaccacagccgccgtgtattcaatgccattggtttcccgttgctctttggaactatggtgattgcgccgccgatggtatgtaatgcgaatagttgacttcgagcgctcgaagtcggtagaacgttgcatatcaaggaaagttcaaggaaaggagcttgccatgagcaagtgtatgctcgtcacgtatttctccgccagcggcaccacgcgcgccgtcgccgagcatctcgcgcacgccatcggcgcggatatcaaggaaatcgtgccggcccagaaatacacggcagccgacctcaactggcgtgatgccgccagccgatccagcgtggagcacgtgcaccgcgacatgcgcccggaactggcttcgccggtcgacgtgagcgactacgacgtggtattcgtcggctatccgctgtggtgggagaccgcaccgcgcgtggtgcgcaccttcctcgaaagcgccgactgggccggcaagaccatcgtgaccttcgccacctccggttccagcacgcgcggcgccgacggcgtgcaactgcacgattccgcccctgccgcccactgggtgcccggtcgccgtatggccgctagcgaaagcgaagccaagctcgccaggtgggtcgagggattgaatctgtaaaatcgcaaggccggacatcgaagccgagaaatgccgccaaggggccgccgaattattgatgttcggcagccctattggttctttcgggagcggttctgacgtcaccgaacggcagtgcggatgcgaacacttcctggatcgttgaatgagggctgtcggtaaggccggataatgcggcgatgcgggagatgaacgcgcgaatcaccggggtggcatcgagcgggtagagcagtccgtagtgcatgatgaccggttcgggccagtccacggccacgttgacgagctgcgggtgaatgccggcccacatcggtttggagatgagcaggtcgccggattcggcgcagtcgttgaacgtgtcgaggtcgtatcagatcgacgtcttcgccgagatgggtgacgatgtcgttgatcgcttcggagtcatcgggcatcgacaccagttccaggcggatgtcggtgtgtttgccggcatcgcgctgccataggtcgaggatgcggcggccggggtgcaggatggaaacgccaaggcggacggtggcgatgccgtcggtgctgcgccgttgtgcacggcgtagaatctcctcgcattggcgcacgatcatctgcgcgtcctcgacgaactccttgccggctttggtgagttgcactccactgtgcgatcggtcgaacagcgtcagaccgtattctttttcgaacgtattgatctgtttggccaccgccggtgtggaaatatgcaggcgatggccggccttggcgaagctgccggtctgcgcggcggcgcgatcggcatggccgtattcggtgtggtcgccaccttcacgccctcgcttgacggctccctgcgtgccgtgttcgtcgcggccgaagtcggtgcggaatggcgcgttcaaccggaacgtggggtcaacaggatggctcaccagttcctcgaaaagctcatgggtgcgttccggcgtgtgatacccggcgttgagctccgccttgatcggcgtattgcccgaaccagttcagcagcagattgtgtatgggcgtgcgcaccgggaacagcagcggcacatccttgagattctgcggggtcaacgattcgcgttccgccagcgggtggtttccgggaaccatcgctgaccagtgctttgtaatgccggtgcgcaggaactcgtattgacttggtctgcgcacactcgcgcagcatccggccttcctcggtgagcgtgatggtgtgactgccgcgttcgaacagcgtgacgcccagttcctcttccaattgtttgagctgacgggagagcgtcggctgggaaatacgcagcaactgcgcggcccatgtgatattgccttcctcggcaaccgccagaaaatatcgcaggacgcgcagttccatcctcggggctccttcggtgtggatggacttctattgccattatgcccgccgcccgtgaactcattatgctaaacgcggatagtttcggtaatgacgcggcgaactgcatgcgagaggcggtgctcaatagcgaaagcctctcggctgctgtcgttggtcgtgatgatactggagaccatgaagctcgtgcggcggcgggggagggcgaggtcgagaaagaggcaacggcgtgacgcttgataataggtcagacagtaaggtggtggcggagcagtgccgagcataggcaacgatcaacggccgcaggcgatcgaagtgcgcggggcgcgcgtgcataacctgaagaacatcgacatcgacattccgctgggcgaattggtgggcgtggccggcgtctccggttcgggcaagagctcgctggcgctcggcgtgctgtatgcggaaggttcgcggcgctacttggaggcgctgtccacgtacacgcgacgccgcctgacccaggccagtcgcgcccaagtggacgaagtactgcacgtgccggccgcgctggccctgcaccagcggcccacggtgactggcatccgttcgacgctcggcacgatgaccgaactgctcaacagtctgcggctcctgttctcccgcgtcgcctcgcacgtgtgcccgcattgcggggcgcgcaacgaaccgacgctgaacgtggcggccggactgcccattacttgcgtcagctgtggcaaggaattccacgtgcccggcgccgaatcgctcgccttcaactcggccggcgcctgcccgacctgctccggaaccggcattgtgcgcgaagtgaaccgtgcggccctggtgccggatgagtcgaaaagtatcgacgacggtgcggtgctgccatggggctcgctcatgtgggaccttatgaagcaggtgtgtggcgcgatgggcgtgcgcaccaacgtgccgttcagcgagctcacgcccgaagagcgtgacatcgtattcaacgggccggccgtcaaaaagcatattctttacaagccgaagaaaggcgacgatttcgccgaactcgatttcacctacttcaacgccgtatacacggtggagaacgcgctcgccaaagccaaggacgagaaaggcctgaagcgcgtggcccggttcctcaaggaaggcccatgcaccgactgcggcggcacacgactgagcgtcgccgcccgggccccgcatgtgcgcgggctgaaccttgccgaagccagcgcgatgaccttggatgcggcggtggattgggtgcgcggcgtgccggaatctctgtccgccgacatgcggccgatggccaccaacatctgcgaatcattcctggacgtggcccgccgactgttggatttgggcctcggctatctggcgcttgaccgcgccggtgccacgctttcgaccggtgaacgccagcgtgtgcagctcgcccgtgccgtgcgcaaccgcaccactggcgtgctgtatgtgcttgacgagccatccatcgggctgcacccctcgaatgtggacggactgctcggcgtgatgcgcgatctagtggcggacggcaattccgtggtggtcgtggaccatgacgtgcgcgtgctcaaagccgccggccatctcattgaaatgggaccggttgccggcgctgaaggcgggcatgtgatcgcgcaagggacggtcggcgaggtggcggcgaatccaggcagccgcattgcaccgttcctgacagatcaggcaaacgcgcgtattcgtgagcgcgtggcggaaccgcaggtgttcgaccttggccacatccgcatgacaaccagccagttgcatacggtcaagccgctggacgttgatattccgcgcggccggctcgtggcggtgacaggcgtctccggctccggtaaaaccacgatggtgctcgaatcgctgattcccgcactcaaagcgcaggcggcgggggagctgttgccggaacacgtgcgcgagcttgagaccgcgggcatcagtcgcgcgaatctcatcgacgccacgccgattggcgcaaacgtgcgctccaccgtggccacctatgccgatattcacgacgaattgcgccgcgccttcgcccgcgcggacggcgccaaggcgggcggctggaaggctggcgatttctcatacaacaccggccgactgcgttgccccacgtgcgacggcaccggttcgatctcactcgacgtgcagttcctgccggacgttaccatcgaatgcccggattgcggcggatcccggtatgcgcccgaagccggcgcgattcggcgtgcggttaaagcggctaagggcaaagcggcgaagatgaaggtcccggataagcgcaaagctgccaaggaagaattgagtgaggcgacggatcagggtggcggcaacatttccctgagcctgcctcaactcatggcaatgagcgtggaccaggcgctggccgtgaccagcgacctcaagaaggttcacgcacgtctgaccaccctgcacgacttgggcctcggctacttgacgctcggcgaaccgacgccggcgctttcgggcggcgaagcccagcggctgaaactcgccagcgaaatgggcaaggcccaatcggacgcggtattcgtgttcgatgagccgaccatcggtctgcacccgttcgacgtgcgcgtgctgctgggcgtgttcgaccggctcgtggcgagtggcgcaacagtcgtggtcatcgaacatgaccttgacgtgatcgccaatgcggactggatcatcgacatgggtccgggcggtggcgaaagcggcggacgcatcgtcgccaccggaacgccggaacaaatcgcggccaatccgaacagcatcaccgggcggtatctgcgctgactcgtatggcggtaacgcgcctttgcataggaccctgcgcgagtaggatagccgtccatggtgcagattcatggcattagacgcgcaagcgcggacgcgaaatatcggcagatgaccgggcagccggtcaagccgctgattctcaaactgtgcttgccggccgtcatctccaactgggtgaccactgcctacaatctcacggccacggtctttattggccagcttggcaccgcgcagtccggcgccatcggcatcgcgttctccatcatgaccgtgatgcaggcgctcggcttcttctttggcaacggcgcgggcaactcgatgagccgcgaactcggcaa

SEQ ID NO: 2270 - DNA, 103004 bp, Unknown
  R119_18m  MAG No. k141_8427
caggatcaaggtcaccatccgcatggcctacggcttccaccacgcgaacaatcccatcgccctcgtcatgctccgccgcggcggactcgacatacgcccaccacaaccaagaacccaacccacgaaaacagcagaagcctcttttttgtgctatcccgtaaaactgcgggacggcagctctttttcgccgtttgagccgtgccgtcccacatcaccctttgcggaccgtgacaccataacaccgagaatggcggaatttcaacgattccgtaattcgtactgcgggacgccacgctagtcaatcgattgacactcgtgccatcccgcaacagtgtgggatacgacgtcaaaatccgcgaaaatcgcgtgccgtcccgcgcgtacggcaccgcacgaatacatgctgatgaaccgcatagaaaatggctccccgtgtggggagccatgagctagttactaactagcgatgcgtcacttctcgttctggccgtggcacatcttgtacttgcggccggaaccgcacgggcacggggcgttcttgccagtgccagggaaggtgcggccgtcggcccacggcgtcttgagctcttcgctcttcggacgcttggaaaccgggaccttgctttcggcgtggctgatcggagccggtccggcaacaggcagcgtggactcgccggccccggaggcggctgcggattcggcgatcgcctgcttggcgtccgtatcctcgtcctcttcctcgacttcgccctcagcggcctcgaccacggattcgccgttctcgtcagggccggaggccacggcgatggtgtcggcgctttcggcggtctcctcgacctcgtcaacggcctcgtcggtggtggcgacctgcttgatgtcgatgtggaacagcagctggacggtctcctccttaatggcctcgatcatggagttgtacatctggtagccttcgcgctggtattcgaccagcgggtcgcgctggcccatgccacgcaggccgatgccgtccttgaggtaatccatctcgtaaaggtgctcgcgccacttgcggtcgagcacggcgagcaccacgcggcgttcgagatcgcgcaagccggtctcgccgatggtctcctccatttcgccgtactgctgcctggcgtcctcgacgatcaggtcgcgcacggcctcgacagccttcgcacccttgaggccgccgacgatcttcctgacctcgtcttcatcgaccttggttgggatcacggtgttgagcgccttgaacaggccctcccaatcccagtccttcggtttctcggatcccttgttggcacccttgatgtaggactcgacggtgtcggaaatgaaacgcaggatgtccttgtggatgtcttcgcccttgagcacggcctgacgctcggagtagatgacggtgcgctgcttgttcatcacgtcatcgtacttcaacacgttcttgcgaatctcatagttacgggattcgacggccttctgcgcggtgcgcacgcccttggtgacggacttggcctcgatcggctggccttcctccatgcccttggccatgacctgggccaccagctgggtgttgaacagacgcatcaaatcgtcttccagagacagatagaagcgggactcgcccggatcgccctggcggccggaacgaccgcgcaactggttgtcgattcgacgggactcgtggcgttcggtgccgagcacatacaggccgcccagctccttgacttcctcgtgctcgtccttgacctgggccttgatctcgttcagggtgcccggccaacgcttctcgtactcttccggggtgtcttccggagagtaaccttcggacttgagcttggcgtcggcaaggaactcgacgttgccgccgagcatgatgtcggtaccacggccggccatgttggtggccacggtgacggcgcccttgcggccggcgacggcgaccacggcggcttccttctcatgctgcttggcgttcaggacctggtgtgggatcttcgccacgtcgagcagggcggagaccacttcggagctttccacggaggcggtaccgagcagcaccggctgtcccttggcgtgacgcttggccacatccttgacgatggcggccagcttctccttcttggtgcggtagatgaggtcgtcctggtccttgcggatcatcggcttgttggtcttgatcggcagtacgcccagcttgtaggtgttcatgaactcggcggcctcggtttcggctgtaccggtcatgcccgcgagcttgtcgtacatacggaagtagttctgcagggtgatggtggcgaaggtctggttctcggccttgacctccacgccttccttggcttcgatggcctgatgcaggccctcgttgtagcggcgacccggcaggatacgaccggtgtgctcgtcgacgatgagcacctcgccctgggtgacgacgtagtccttgtcacgcaggaacagttccttggccttgatggcgttgttgaggtagccgatcagggcggtgttggccggctcgtacaggttgtcgatgccgaggaaatcctcgaccttggtgatgcccgggtcgaggatgccgacgaccttcttcttctcgtcgacgtcgtagtcctcgtcgcgggtgagcttcagcaccagcttggcgaactgacggtaccagcgggtcacgtcgccttcggccgggccggagatgataagcggggtacgggcctcatcgatgaggatggagtcgacctcatcgacgatggcgtagtggtggccgcgttgcacgaggtcggccttctcccaggccatgttgtcacgcaggtagtcgaagccgaactcgttgttggtgccgtaggtgatgtcggcgttgtactgcttgcggcgctccggcggcttctgctcggtgatgatgcagccgacgttcatgccgaggaagcggtagatacggcccatcagctcgctctggtagctggcgaggtagtcgttgacggtgaccacgtgcacgcccttgccttcgagagcgttcaggtaggtaggcagggtggcgaccagggtcttgccttcaccggtcttcatttcggcgatgttgccccagtgcagggcggcaccgcccatgagctgcacgtcgaagtgacgctggccgagggtgcgcttggagacctcgcgcacggtggcgaacgcctcgggcatgatctcgtccagactcttgccgttttcgatttcctgcttgaacttcggggtttgggccttcaggtcctcgtcggagagggcggaaatctcgtcctccagggcgttcacggccttggccacgttctccagcttcttgagctggtggccttcacccattcgcagggctttgtcaacaatatcgaccactgggttctcccttgactgataagtggtggtgtccgcgtaccagaatagcgcctcgcaccgtcagcaatcgaatttttcgacctttttacgaaaaaatggaccgcttccatattggaagcggtccatgcggtatcagctgatcgtgtcagcaggccttatcttcaggccttcttgacgttctccggagtatcgatttcgaacacgccgtagctccaaccgtgacggtggtagacgacggacgggcgtccggtctccttgttcacgaacaggaagaagtcgtgtccgatcagttccatctcgtacagcgcctcgtcgatgctcataggctcggcgatgtgcagcttgcgacggatgacaatcggcgtatccccaacctggacctccacggattcgccagggccaagatcggaggcgaccgcagcctgcgggctgttgttcggctcttcctccgacacctccggctcgggctccggggcgataacacccagatccaccgggaccgggttcgcgtaaccacgacggtgatccttgcgacggtcacgagtacgacgcagacgcagcgtcaacttatccagcgccatgtccagcgcactgaattcatcggtgctggaagcctccgcacgcaccacagtacgtccggcgataacggtgatttccacgcgcttggcggtatcggcctgacgcgggttgccctcatgggtcagcacgatctgcgcgcgctgagcatctggggcgatagcggtcacacgattcatcttggtctcgaccacatcacggaacctttgcttgacctgcgtgtggcgtccggtaacgacgatttccatgttgacctcctctaactcaagcggtgtaacccgctatatgtgttccgaacggcatcatcaccgaccgggtatgtttcattgtagacgaacaatgggtgaacggccggaaactcgcccagagaatatatgtttattcccgggcttttctctgcaatgaaacgatgtatatactggggttttggcagcagtctcctataagaagatttgataccggtttatcaggctggctcgtttgttcgtcatggtaaatactgcaatggataggcagcgttttcttgctctttctcgcacataccaagctcttacagatttgattcgtctccatacgacacgccacaacacgcccgacacgccccatccgatattcggcgcgtcgttcacgaatcgcccaactatgcccaactatggagaaaacaggataactgggcaacgtcatggcctcaccgcagggcgggatgccgccttttccgcaccttatgtataattgcaggcttgagacctcttgatggccgcggccgtgatcttcattgggatcggctgaggaacttccgggctccatagagcacgatggcggataacgtccgcccagggtgacctgagagatagcgcaacagagaacagaccgcccgtcctcgacgggtaagggtgaaacggcggtgtaagagaccaccgggcctctggtaacagtaggtcgcatggcaagcctcatcgggagcaaggccaagcagatggcggtaagggctgctcgcccgtgtcatcgggtaggctgctagagcctggcggcaacgtcaggtcgagatggatggccatccgtgccgtgcgttcgcgcacggcacgacagaacccggggtataagaggtctcatttttttcttggctacaccaacaattcggcggcgactcggcggagggtttcggggctgtgtcctttgcggccgcctgcggaccaaaaccgacgctgacggacctgacgatcgaggccatgggttttgcgggctatttggcggcccaattcccatgcggcatcttcaaagatgccattttgctcagcttcgccacacacctgttcagccagtttgcggtccacgcctttgcgagcaagttccaggaccgcaccacgacgacccatcatgcgaccggcacaatagcgtacggccgattcggcataagcgcggtcgtcaatcagttgcacgcgaatcagccgttcgatgacctcgtccacaatcgcctcgccatagcctttgctgagcaatcgttcgcgcaacgcgccggatgcacgcggggccgcgtccagcaaacgcaatgcagcctcgcggcaagcgtccaaatcattgggatcttcgacaacggcagcgtctctcccccgtcgagaaaaacgtcccggcggtttcgactgaacacgctgctcggcaatgggcatgtcttgcgacgcaacaggattgcgccgcaagaatgcttcggcactaatcatgttcaggccttagctgcgccggccttggcacgggtcgttttggcagcaggcgccgctgcggccttgctgtccttggccacgtcggcagcggcggcctcgctgacagcggccgctgctgcggcttcgccatcttccgcgaactggtcggcggaaccgatcagaccgaactcggccttgaccttattctcaatctcctcggtgatggccgggttgtccttaaggaactgacgaaccttctcgcgtccctgaccgagctgatcaccctcataggtgaaccacgaaccggacttcttgaccacgccaacctgctgagccatgtcgattaccgagccctcacgggaaatgccttcaccgtagagcatgtcgaattcggcggacttgaaaggcggggccatcttgttcttgaccaccttgacgcgcgtgcggttgcccaccgcttcgtcgccattcttcagggtttgaatacgacgaatgtcgagacgcacggaggcatagaacttcagggccttgccgccggtggtggtttcgggattgccgaagaacacgccgatcttttcacgcagctggttgatgaagatggcggtggtgccggcctgagccaacgcgccggtcatcttgcgcagcgcctgactcatgagtcgggcctgcaaaccaacatggctgtctcccatttcgccttcgatttcggccttcggcactagggcggcgaccgagtcgatgacgatgacgtcaagtgcaccggagcgaatcagcatgtcggcgatttcgagggcctgctcgccgttatccggctgggagacgatgagtgagtcggtgtccacgccgagcttgcgggcgtaggccgggtcgagtgcgtgttcggcatcgatgtaggccgccacgccgcccttcttctgggcattggccaccacatgcaatgcgagcgtggtcttaccggacgattcggggccgtagatctccacgatgcggcccttgggcaggccgccgatgccgagcgccatatcgagggccaacgaaccggtgggaatcacctcgacgttctgctcgggctggtcgcccagtcgcattgcggaacctttgccaaagctcttctcaacctgcgccagcgcggtgtccagcgccgccttgcgcttgggatcgagctcgtgcttgtcctcggctgccgggtccttggccggcttggtctcaagtgccatgatcttctccttgtcgaagtcgtgcgcgaatcggatgcctccaccgtatgacggacatgccatgtgaggcaatccaaaccaaccattgtggttccagcttgcccgagctcggccatctgacctccctaagacctactgcggtaaggcttatggcggatgacaagcaccctgtgcacacgtatgcggcttcttgtcactgtgaataactataaccacacacacgaacatttgttcgaatttggcgtgcaacacgccgaaatcgccaatttcacgattcagcgactccgtaatcccgcagtgtcagacggcgggcatgggcggcgcgttatgatcgtggccccaacgcttggagtccggaacctccatttggtcacagagcacattccagaccacgcgtggctcctcccccgcgtccagcgcctcgaccacggtcatattcgccaatttggacatccgttgatcacgcgacagcgaacgaccgtaggtccgaccgaacacctcttcaagtaattcccagaattcccgttcacgcatacacgccagtgtgccaccacccgcaggacagcaaaaacccgcatcgccacaagcgatacgggttcacagctagacatagattacgggatgcggcttcacaccgccaaccgatcagccctcgaccgagtcgagataatcggccaccatgcgcagcatgcgcgaagtggagactccgagcgcatcggcgatggagctcagcagttcggagctggcttccttctgcccacgttcgacttcggaaagatagcccagcgaaacgcccgccttctcggagacctcacgcaacgtgcggcgatcgcgcgtacgcagttcgcgcagcacgtagccgatagcaccacgcagcgaaacctcgcgaggctcctcctcaaccaccacgggctcggcggcggcagtcggcttgtacgacggcgaatcctcatcccacatacgttcacgaacggcttgacgctgatccttggccttcttggcagcctgcgccttgagcacctgctgctgggcgaacatcaccgcacggcgctgggccggagtcagttcacgcatacgggcgacacccggctgcacagccatcggcttcttggtggccacatccatctgttcgttcactcgggtcatcgtttccatcgccatcgccccttccaaggtcggttcagtgtttccactatgtacaacacgacggtcccgcggttttattccttaaaacttgctgtgaatagactcaagttttgcagaacgtggaatacggtgaggcgacgaacctcttcgcgcatgccatcaagatggagttcgacggctttgagcacttcggcatggtccgcggtgaggcttgcggggatgcgcaggcccacatacaccagtccggccggcttatcaccgtccggaccggggccggccacgccggtggtggaaaggccgatgattcggtcgccgtattccggctggctgtataggcgagcggcaccgatggccatccgccgggcgacttcggggtgtacggcgccttctcgatccaatagggccttgtccacgtgtaggatcgaggccttggcattgatgtcgtaggtgacagcggagcccagcaacacgttggaggcaccgggaatacgcacgaacgcatcggcgagcaggccaccggtcagggattcagcgcaggagattttcgtattgttcgcctcgcagatcttgaggatgccggccgcgagactgtcgcacaattcctgcattggaatatccgtcacttccgcttcggggcgacgaacgtgttgtacaggtacacggcacccgagtagaggcacaggaccaatgccacgtagatgatggcgtaggtcaggaagtagtaagcggtcatccagaacggcgtggcctgtccgttacccagagaccagaacggcagcagcagcatggacagacccacgcactggaatacggtcttgagcttgccgggccatgcggcggcgatgaccttgccgcccggacgctccatgacgaagaagcgcataacggtgatgccgatttcgcgaatcaggaacaggatggtcacccaccagccgagctcgccaaacgcggagcatacaatcattgcgccgcaagtgagcagcttgtccgcgatcggatccatgagcttgcccatttcggtgacctgattgtatttgcgggccatccaaccgtcgattttatcggtggacgcggcgatgatgaacagtaccgcggcgacccaacgcatgatcaggttgttctcaccccaggaaccggcgagaatgtcgagtgtcaggaaaatcaccacgagtacgatgcgcgagtaggtgaccaggttcggcggcgcgttccatccgtcgaacagcgatgatttgggcgatgactgcttgtccattgtgttctcatccatagtgttcacgttacccccatactcctaccttgagtgagtggtggctggatattgactgctattattcgggaatcaggtttcgtgctgatgctgtccgcgcttctctccctccgccccttcgggcacctccctcatcagagggaggtcgatgggtgaattattcgccgagttcgggttgttgcggggcgctggcttcgagcgagctggtttcgcctcggatgaaggcgagcacctgcggcaggtcctgcggctgaacaagcacctcgcgggccttcgagccttcggacggcccgaccacgccgcgcgattcgagcaagtccatgagtcggccggccttggcgaagccgaccctgagcttgcgctgcagcatggaggtggaaccgaactggctagtgaccacgagttcggcggcctgcagcagcacgtccatgtcgtcgccgatctcctcgtcaggctccatgctgtctttcttttcggcttccttggccatctgttcgatgtcttcgcggtacttcggcttgcgctgggtgcgtacgaactccacggccttgcgaatctcggattcggacacccacgagccctgcacacgaatcggcttggcggaacccatcggcaggaacagcgcatcgccctgaccaatcagggtctcggcaccgaccgtgtcgagaatgactcgcgaatcggtggcggacgaggtggcgaacgccagtcgggatggaatgttggccttgatcagaccggtgaccacgtccacggacggacgctgggtggcgagcaccagatgcacaccggcggctcgtgccagctgggtgatgcgctggatggagctttccacatcgttcttggccaccatcataaggtcggccatctcgtcgaccaccacgaggatgtacggatagggggccaccttgcgctgggagccggcgggcgcatgcaccttgccggcgcgcacggcctcgttgaagtccttgacgtggcggaatccgaagaattcgaggtcggagtagcgtgcatccatctccttgaccacccattcgagggcctgtgcggctttcttcggatcggtgatgatcggggtcagcaggtgcgggatgcctgcgtaggcggacagttccacgcgcttgggatccaccatgatcagacgcacctgttcgggcgtggcacgcatgatgatcgaagtgagcatcgagttgataaaactcgacttaccggaaccggtggcacctgccaccagcaggtgcggcatcttggtcaggtcggcggtcacgaagtggccttcgacgtccttgccgatgccggagagcatcgggttcgggtcgcccacggccttgtcggagcgcaatacgtcgcccaagtgcacgatttcgcgatcctcgttcgggatttcgatgccgatagcggacttgccgggaatcggtgaaaggatgcgcacatccgaactggccaccgcgtaggcgatgttgcgctgcaggttggtgactttctccaccttgacgccggggccaagctcgacctcatattgggtgaccgaagggccacgcaggaagccgacgactttggcgtccacgttgaactgttcgaaggtggaagtcagtgcccggatcacgcgatcgttggccggggtgcgcatcgcatggggctgacctttggtcagcaggttcaggtcgggcaactgatacggcctattggcgtcgtcgtctgtaccgttgccggcggcggcattcggctgtccgtccgtattgggcacgccctggccgactccgctgccatccgcatcggcgcctgcgtaggctccggtcgcggctgccgcggccgcggcaccggcggccccggccgctcccatcgccccggctgcccctgcgagcgcgacagtaccggcctgggcggcactgggtgcccacggatcgtctaccgctcccccaccgggcatggcgatggtctggccactggtgatgacgcgggttcgggaagcgtcgccatcatccgcatcggcagcaggcgcagggctggataggtgcggacgaccgtcgtacgaagacgatgcaatggttcgcgcaccggtaatctcgccggtcatcggatcgaccaccggggtttcggcggtggcaccatgctggctggcggcacggtcgaacggatcgtcggcagcatacttgtcaagggttttgtcgtcttcggtcttggatttgcggccgaacagtcgtgcgaacaggctgggccgtgcatcgccggcctgatcgttgtcgttgccgtcatcgtcgccgtcatgcgagggaacaccgtcggcaaaggcgagtgtggtatctcccacacggacctcgttggggaactggctggcgcttccgtcggcctcctggcccatcggcacatacggtttgcgttggattttagctgcgattttgcgcgcatcctccggcaaatcggtgacgtgggtgccggtaatcatcagcaaggagaacaggccgacgaccacgaaaatgatgatggcgaacacgttggaaaggccccaggcgagcggtgagccgaggaagaagccgaacaggccgccggcggattgcagaatcgtgatgtcgaatccggtgtggtcggcggcgatcgccacgtcgatgatcgaacaaatcgaccacatgagcagcacccaaccggtgaccacacgcgggttattggaccctttaccggaattgcgcatgagtcggaaggccacggcggcgagcaacaccggcagcacgacgctcatcagaccaagcacaccggccgcgatggcgtgaagcagctggccgaatggaccgctgacacggaaccattcggacgcgcagaacagtacggcgagcacgagcagcaggaagcacaaaccgtcacgacggtaggctgggtcgtattcgccgacgccggtgacggcgcgtacgccggagccgaacgcgcgcggaatcgcgagcaggatcttcttccacaacggctcaggttcgaggtcaagctcggactggaccttggtttcgccatcatgggtagacccgttgtctttggatttacggggtttggtgctgttggaggatgctgttcgtgccatatcgggtctgattctactagtacgggggtgcatggttggtgacgacaccgtgacgatatggtcgattgacgaatcccgacagccgattcgccgcggttcgtcgaggttcgtccgagtcgattccccgctggagcgcgaatatgccttatcatgggttgcatgacacccgcagagcgtgcgagcgcagtcgcatttgcactcaagaactgcgcactggaagcgatgacgccgggcgaggcaacgatgcgcgccgcggttgcctacgaacgtggcttggagccagtgacccatctcatcgacgtggcggacgagcagaccgccatgcgtctgcgcgccgccgccgaccctgccggaaaggatcgtctggctgccggcagtctggatgatcatgccacggatcgcgcggatgcggtgttcgcacgtaccgtgttgttggcggaacgtcggtggaatccgtctggcgacttggacgagttgaccgccattcataaggggctgttcgaaggcgtgttcgaggatgcgggcaagttgcgtacctcaaacaccacacgcgaggtgacgaacgaccgggctcgggccgcgaatccggaggcgttcttcccggctgggctcattgagaccggcgcgcacaacatcgcgatggagttggcggacaagcgcaacctgcatgcgttggatcgcgacgtgttcgttcacgcgttcgcttctatttatgatgagctcggttatctgcatccgttccgtggcggcaatgcgatggtgctgcgtatattcggttcacgcttggcgcatgacgccggctgggatctcgactggggctcagtgacgcgcgaggagtatcgctccgccaagcactcggcatatcggggcgacacgtctgcactggagacgatgttcgacgcgatactacgcccggcgaatccgacgcgcgtgttcttgatcgccggctggaatcaggggcctgcacactgattgcgggtgattgcaccggcctttggctgattcctacgccgtgatatcgcccagatgatgctgggtgtattcgtcggctcgggcgtcgatcgggtcgtagtcgccggcgtcggcgtgcgcgataatggccatcgcgttgtcgaccagtttcgggttcagggcctgcagccagtggatgcgcgggtcacggccgaaccatcccatctgtttgcgggcgagtcgcttggttttctgtgcgatgtccgcgaaggcgtcgttcacatcccagatgccgtccagcaggtcgatgatctgctgatagccgagcgcgcgtacggcggtggcacccagatgcgggcgcagccgttcgacttcttcgatgaatccatcgtcatacatctgcttggtgcgcaggtcgatgcgatggtccaaatccgggcggtccaggtcgagtccgatctgtacggacggaatcacgtaccggtagcgcggcaggctggccgaatacggtttgccggtaagctcgatgacttccagcgcacggatggtgcggcgtgggttgcgtgggtccatgcgcgcggcggcttcggggtctttggcccgcagctcgtcgaacaaagcaccggcaccctcggttttctcgcgttcctcaagacgtgtgcgcacgtcgggatcggtgccggggaaggtgatgtcatcgatggccgctctggcgtacaagccggagccgccgacgagaatcggccggatgccacgtgattgcaggtcggcgatggtctcgcgcgcaagctgctggaatcgggccacgctcatcgtgtcttcggggtcgatgatgtcgatgagatgatgcggcacggccgcctgttcttcggcggtgggtttggcggtgccgatatccatgccacggtacatctggtaggcgtccgcgttcacgatttcggcccgctcccccgcttcggccagacgccgggcgatggcgatgcccaaccccgtcttgcctgacgcggtgggaccgacgatggagacgactcgttgcgtcatatacgccccctcagtgtcgcacggaataggtctgtccagcggccacatcggggtcggcaagcagattatggcggccggcgtgtgtgacggtgaccgtgacgaaatcgccgatttcaggtaccggttcgccttcaggcacgccgatgtgcaccagcacgccggttttctcgcggccggtgacacggtgggtgtcggtgtccttcttgccgagtttgccggtgatcatcacttcgacgtcgcggccctcgaatgtggcgaggttctcttcggtgatctgctcctgcaacgccaccagtcggtcgaaccggtcctgcaccacgtcgcgcggaatctgttccattgcggcggccggcgtgccggggcgtggcgagtagatgaacgtgaacgccgaggagaagcgcgcctggcgcaccacgtccatggtctgctggaagtcctcctcggtttcaccggggaatccgacgatgatatcggtggaaatctgtgcgtcgggcatggcctcgcggatgcggcccaagatatcgaggaacttggcggacctgtaggagcggcgcatcgcgcgtagaatccgatcggagccggactgcagcgggaagtgcagttgatgcatgatattcggcgtttcggccatggctgcaatcacatcatcggtgaaggcggccgggtgcggcgaagtgaagcgcacgcgttcgagaccgtcgatggtgccacaggcacgcaacagcttgctgaaagcgtatcgatcgccaataccataaccaaacgagttcacgttctggccgagaagcgtgacctccttggcaccatcggccacacattggcgaatctcatcaagaatgtcaccggggcggcggtccttttccttgcctcgcgtggtgggcacaatacagaacgtgcaggtgttattgcagcccacggaaatcgccacccacgagctgatgcgggaggcgcgggcggcgggaagctggctcgggaactgccgcaattgttcagtgacctggacctgcgccttgccggtcgcacgattctgatccaatagcttaggcagatcttcgatgttcttggtaccgaacaccgcggaaacccatggcgcagtatccgcgatcttcttgcggtcaagctgggccatgcagccgccaacggcgatctgcaggttcggccgaaccagtttgacgcgattgaatcggccgatggtgccatacatgcgttcggctgcgttctcgcgtaccgcacaggtattgagcaccagcagatcgaggtcattgtcattgatctggtcctcggttgcagggacgtagccattggcctccagcacgccggcgatgcgctcggaatcgtgcacgttcatctggcagccgagcgtgtggatatggaatacgcccttgccgcgctcccccaacaagctatcggttccatcggctgcaatcgaggcacgctccgcctcggtcatcatgtcttcattcataacgaccgattctatcggcggggttcgtcatgctccggtcacgtatgccattggttgtcacgatcttaaatatgggttcttggaaagattccccgcgaacatccagattgtctggaatccgccgagtatattggtggacgtgatacttgaccgacatagccgactcaaaacctccgatctgcaggcccgtctcaaagcgttggatcttccgggaggcaccttcactcccgaacaggtcgttaaattcgttgacctcatgcaggtgtatgaaggcgcgatgtacgagatcagcaccaagctggagattctcgacgacgagttccaggtgcggttcagccatgacccgatacatcatatggaacgccgtctgaagtcggtgagttcgatcattggcaagctggagcgcaagaatctgccaatcagtgtcaattcgattaaggacaatctgttcgatgtggccggcatccgcgtgatctgtaattaccgcgacgacgtgtattccgtgtccaactatctgtcgtcgcagtccgatattcaggtgctgcgcgtcaaggattacatcaagaacccgaaacagaacgggtatcgttcattgcacgtaatctacgcggtgcccgtgtttctctcctcgggcgcgcattacacaccggtggaggtgcagttccgtaccatcgccatggattattgggcgtcgctggagcatgcgctgcgctacaagaccgatttgccggacaacaagctcagcgagcattcacagacactgctcgactgcgcccgttcgctgcagaacatcgaagtgcaaatgcagaacatccaccgcgacatcaacggcgcgccgcaagtgggtgaagcgcctaagaccacggactgaggtgctatggaatcggcctgcgtccgattcattcaccgttgcagccacttcggcagcctggccggcgcttgggccagcagggtgccgaggaagatgagggcgcagccgaggtaaccgcgcggggtcatcacttcaccgagaagcaacgcaccgcctaccgccgagaagaacgattcgaggctcatcagcaggctggctcgcgtcggtggcacccattgctggccgaccacctgcaaggtgtacgcgatgcccaccgagccgatgccggcgtacagaatcggaatccaggaatgagcagcgccggcccagtcgaccgagccttcgatcagcgaacccgcccagctcagcacggcggtggtgcagaactggccgaatgaaagcttgatggcgtccacggtgccgcccaaagtatcgatcaccagaatatgcacggcgaacagcacggccgtgaacacgagcaggatatccgccaggccgatcgaaccgaaaccatcggtgatgcacagcagatagaagccggcgatggacagcaccacggccacgaacaccagcatgccgatgcgccggcgcaggaacacgcaggccagcaacggcaccatcacaatgtacatggcggtcaggaatcccgcgcggccggccgatttgccgtacagaatgccatactgctgcagggtgctggcggtgaacagcacgatgccgcagagcacggaaatgaccaccgggttggcgagcaatcgcgccacggccgaatcgggcttgttcgcattcagctcggcaccggtgatggtaacgacgtcggatgcaccgttcgatgcggcatctgtggagacggccctgggggcctcggtcccaacgacatcgaccccggctgtatcgcccttatccgcgctcccccggccacgctgccacagcagaatcggcaccaaagacagcgcgcccagcgtgaagcgcgtggcgttgaagaacatcggcgacatcaaatccatgccctggacctgcgccacgaacgcaaaaccccagatcagcgcggtcaacaacaggctcagcatgcctacgagttcttgtcttttcacggggagacagcctaacgtgcgaatgtgacagacatgaaaaagcccggccacaatgtggtcgggctgtgacgtttgacgagcaggctacatgccgcccaccaatcggctggcgaggctagtccctgttgccgagcagctgcaggatgtacaggaacatgttcacgaagtcgaggtacaggttcagggcacacaggatggagatcttcttgaccatttccgggccctgggcctcgtattcggtcagcagcgcgcgcgtggactgcgcgtcgtagatggccatgccggcgaacaggatcaggccgatggcgcagacgatcttggtcatgccgtcgacctgcacgaaggcgagcacgatctgcgagatgatgagcacgatcaggccgatcatcaggatcgggccggccttgagcatgtcgaacttggtagtcatgccgaacatggtcagcgcgaagaagaacgcggcggtgacaccgagcgccacgccgatcgagccgaggtcgtagaccatgaagatcgagctcaaggtgaagcccatcaatgcggcgtacacatagaacatgacgcgcgcagtggccgacttcatcttggtgacgcgcatgccgagcaccacggccagggcaatctgcaccacgcacaggccgatgaggcccaccatgccggtggccatgaggaagctgtagtaggctccggtgatctggccgagcacggcgaccacggcggtgacgaggatgccgatggtcatctcgccgtacaccttggctacggagacgcggcgggcctcctcgtagttgtaggtcatcgtcgtgttgatggtggcggcacccgcgccggcaccggccgcatcctgcggcgcgtactggtaggtgggggcgccctgcggctgggcatagtagttctggccgtaaccggactgtgcgtattgctggccatatccagactgttgggcggcgttgtaatcaggcgtgttgtattgcgggttgtattgcccgttgttctggggctgctgaccgaatgtcataatcgctcctttagcgtttgttccagtaccaatcttagaggaacaaagctgaacattccatgaataggatcgatcggctcgttctgctcatcgcaaagcgtaacgggcgtttccaccatgcgcgtggcatgcaccgtaatcggcgaatcgtcttgcagcacatagcccaacgccgaaatcgcctcccgtatgtttatctcggagcgtacggccaaggcgcatctctcctccgcggcggacaagctcaatatgggccgcgtacagatggcgaggctggtggagcgggccgattcgccggcgcgactgtaacacgtcgggttatcgagccatatcagtcataatggagaacatgagtgaagcgattattcgaacgttacgtaaagacgattatccggcgctgatcgacctggtgcgccgcacttggtacgccgaatatgatgagcggaccggcttgctggcagccgaggccgattgggagaactgtctggcacgtgtgaccacggcctttgtcgcggagctggaagataaacccgtcgcattgattgtggggcgtatcgacgagctcgaccatcgcagcccgctgaacatgcaccggcgtcattctttgcgcaagctattgcaactggcgtttgcccacgacggcatggcagctgcgagcgagattctcgggactcttcatgtcgataggcaactgcgtaagcaggcggcgaacattggccatgagtattcggctgaagtggtgctgttcgtacttgatccggcggcgcgcggtcacggtctgggccggcgcatgttcgagacgatgatgagcgcattccacgcagccggcatacgtcagtacttcctattcacggataccacgtgcgatgtcggattctatgtacatcgcggcctgacgcaggtgtgcgagcagtcactgcccgcatccgtgccgggagaaaacccgtcttcgttctacttgtacgaggggtcggtgcccgagccggcgtgatgcgcccgccgccgggcgaacactggtaggcttgagcacagtcggcacgtcggcataccgtccaaaggccggcgacgaagggattgacatggcaatcagcgcgaaggaactaccactcgggaaagtgttcaccccggatttccggttcacaatcccctcattccagcgggcctacatatggaaggccgagaacatcctgcaactggtaagcgacttggatgacgcctgcaagtcacccggcaccccgtacttcctcggctcgctgattctggtgcgcgagggcgacaaccgttatgacgtgatcgacgggcagcagcggctggtatccctatcgatcatcatcgccgtgctgcgcgatctggagcgagacccggacctcatgcgccaactcgacgcgctgctggtggagcccggcgacaagctgcgcggcatcgtcaccgagcctcgcctcacgttgcgcgagcgcgacgcggcgttcttccgcgaacacgtgcaggaggacaacctcgaatccgtgttcgacatgaacgacgacgatctggcgaccgctgcgcaacgcaacatcgtcgccaacatccgcaagacgtacgacgagatctccaattggtcggcatccgaacgccagcaattcgcgcagtatctggtcaacgaggtgacgctcgtcatcgtgaccaccgacgatctcgacggcgcgcatcgcatcttcgacgtgatgaacatgcgcggcctgccgctcaccccgtccgacgtgttcaaggcgcgcgccacggccagcctgtcgaccgccgaacttgacgtgtacgccgcccgctgggatgacatcattgacccgcttggcgacgatccgcatgactgtgaggaattcttcgcctatctgcatctcgtgctcacgcacaagccggccaccgacaagctcatcgaggatttcctggccgacgtgctgcaaccgtacatcgacaaaggcacggtgcccacgttcatcaaccaggtgctggcaccctacgcgatggcgtggcggatcatcgcgcgccccagcgataccgtactgcccgccgaggtgcgtagccggcttgagggattggacgattaccgcagccacgagtggaagcccgtggccatgtgggcgttggtcaattcgtatcgcgggctgggcgacgccgatttgtcgccgtttgtggttcgtgcctcacgtaccgacagaaccacggccacgttggaatcgttgggcgcccatgacgagcgtcggctgctggaaattctgaccgcattggaacaggtgaccggcatccgtacgctgaatcgcactggagcgttggagcggcgcggttatgcgaacgccgccatccgtgatcttgacaagggctatttggtccagcgcgtgaacgggttgcatgtctcggacggcgaccgtgaaggcgcattggtccgtttgcatggcgagatgcagggtgacggcgatttggtccgtctgctgctgattcgcgccaacgagcagaaggccggcatgcagttggatcgaccacgccggttcagtgcgctgccgattatgccgttggatatcgaacggtcgaaatcgtttgcggactggccgcaggatcagcatgatttctggatgtaccgactcggcaatatggcgctggtgcagggccctgaggatcagttggacaggttgagtgaatatccggcacgtcgcgaccgcatgctgttgcgcgcggattcgcgtcgtttcccgctgaccaatcagttgaaggatttcgctgactgcacacctgccctgctggaggcgcggcaggaagagtcggtccgactcatcgtggaatactggggcatccggtatgacaaggacgcccgtgatctgaccaagcagaatgtcgatgagttgtcgaagacctctccacggccgtctcatagttcgcggcgcgtcacgatccggcaggtgattgacgctggtctgctggtgccgggcgagcgtctggtgtgggagcggccgcgcaagggcgagcgctggttcgccacggtcaccgaaaacggtcgtctccgtctggatgacggctccgaatatccgactccgaccgccgcggcccgtgccgccgccggaggacgtcgcggcggtggtctggacgtgtggaagcgcacgcgcaacggtcagaagctcagcgacatctggaagcagttccgcttacaggcgcagtagtctacagtaagccggcacatcattgttggctcccctccgtgaggggagccacacgctcatttattccagcgccgccacgatttcagccggtgttttgcaatattcgggaaaatgactgattaattcggcatccgatgtgaccacacagttggcaccggattgttgcgcggcaacgatgatcagatcatcttcaaaatcccgatgccgtttttgcagggaaaaagccctatcacatgtcgactcatcgacagcgacgatgtcacacatctccttcacctgctcgatacaacgccatggcacccgtgacgacagaaagccgcgagtgaaattctccacttccgattcattcggtttgaattccctacgaatcgccgatgatgataggtatgcgatatccttcagcgacaatgacgcgcacaacaacgtaacgttgttcttcgcgccaagttccataaccgcttccgccatcttggcgtgatcatcacgatggagcaaatagtccaacagtacgttggtatcgagcaaaatacgctgcatggaaacgtcggtcatcaatcggccctcttcatgttgtaatacgcatcaagtcgctcgtcgtacattttgtcgcggaactgcttgtaggtaaggccttccatgaggtcggtgtcttctgagatcagtccggtcttgaccagttccttgtgtacgtatccggcaccttctcgaatcagtttcagcttgcgctgcttttcctcctcgcgggcttgctcttcggcggtcgtttccaatgccggcacttccttgcggtcggcgatgtataaccacagcgaccggattacgtcactcaccgatacgcctttgcccttgaggacttcttcgacctcgttcttcagtttcgcatcaatgcgaacgttcatttggaccatggtcatggcaacctccattccaaagatgctatacagtatagcattttggcatgcgtggaaaaggccggtatccgttggcggataccggccttgctcccctcagtcagcttcgctgacagctcccctcaagagaggggagccaagaaggtggttacttcatgaggttgcgcagcacgtactggaggatgccgccgttacggtagtagtcggcctcaccgggcgtgtcgatgcggaccaccgcgtcgaactcggtcttggagccgtcctcgtgggtggcggtgacgtggaccgtcttgggggtcacgccctcgttgagcttctcgacgccggcgatatcgtaggtctcggtgccgttgaggcccagggactcataggattcgcctgccgggaactgcagcggcagcacgcccatgccgatcaggttggagcggtggatgcgctcgaagctttcggtgatcacggccttgacgccgagcatcaccgtgcccttggcggcccagtcgcgcgaggagccggtgccgtattccttgccggcgagcaccacaagcggcaccttgttgtcgatgtagtcgcgggaggcttcgaagatcgtggtcggcttcttggcgaggaagtcgtaggtgaagccgccaggcgtcacctcctcgcccacggaggcgagcagctggttgcgcagacggatgttgccgaacgtgccgcgcaccatgatctcgtggttgcctcggcgagaaccgtaagagttgaagttcttcggctccacgccgcgctcggtcaggtacttgccggccgggctggaggccttgaacgcgcctgccggggagatgtggtcggtggtgaccgagtcgcccaggagggccagcacacgggcgccgtggatatcggcgaccgggtccggcgtggccttcatgccgtcgaagaaggtctgcttgcgcacataggtggacttgtcgttccacgcgaacagctcgccttccggcacgtcgaggcccttccagcggtggtcgccgtcgaacacggaggcgtagtccttgaggaacatctcgcggctcacgctgccgtcgaccacggcggcgacctcggcattggtgggccagatgtccttcaagtacacgtcgttgccgtccgcgtcggtgccgagcggctgggtctcgaagtcgaagtccatcgtgccggcgagcgcgtaggcgatgaccagcggcggggaggccaggtagttcatcttgacgtccgggctgatgcggccttcgaagttgcggttgccggaaagcacggcggtgacggtcaggtcgttggcgttgatcgcctcggaaatctcgggcagcagcgggccggagttgccgatgcaggtggcgcagccgaagccgacgagctggtagccgagtgcatcgaggtcgtcctgcagccccgcggccttgaggtagtcggccacgacctgcgagccgggagccagcgaggtcttgacccagggcttgggcttaaggcccctggcatgtgcgttgcgggcgatcaggccggcggcgatcatcacggacgggttggaggtgttggtgcatgaggtgatcgaggcgatggccacgtcgccgttttcgatgtcgaaatcgccacggaagtcggtggacacggccaccggatccttgacggtcttctcggtctcgtaggcgggggcggtcttctcgaacatgctcttggcttcggacagcagaatgcggtcctgcgggcgcttcgggccagcgatggacggcaccacggtaccgaggtcgagttcctcgtattcggagtactgcggttccacgtaatccgggtcggaagcgtcgccccacagcttgttggccttggcgtaggcttcgaccagggcgacctgctcttcggagcggccggtcaggcgcaggtagtcgagcgtgacattgtcaatcgggaagatgccgcaggtggagccgaactcggggcccatgttgccgatggtggcgcggttggccagcggcacggaggcgatgccttcgccgtagaattccacgaacttaccgaccacgccgtgcttgcggagcatgtcggtgatggtcaggaccacatcggtggcggtaacgccctccgggatggagccggtgagcttgaagccgaccacgcgcggcacgagcatggagatcggctggccgagcatggcggcctcggcttcaatgccgccgacgccccagccgagcacgcccagaccgttttcggtggtggtgtgcgagtcggtgcccacgcaggagtcgaggtaggcgagcgtgttgccgttggcctcggccttgctcatgaccaccttggccaagtattcgatgttgacctggtggataatgccggttcccggcggcaccacgcggaagttcttgaatgcctgctgaccccagcgcaggaactggtagcgttcgccgttgcgctggtactcgatgtccatgttttgctggaccgcgtcggcgatgccgtacttgtcgatctgcacggagtggtcgatgaccatatcggactggacctgcgggttgatgacctccgggtcgccgccgaggtccttgaccgcgtcacgcatggtggcgaggtccacgatgcagggcacgccggtgaagtcctgcatgatcacgcgggacggcgtgaactggatttcgtggctgggttcggcgttcggatcccagtcgagcagggtcttgacgtgctcgtcggtgatgttggcaccgtcgatgttgcgcaccagattctcgaccagtaccttcagcgagtacggcagatgatcgatgccgtcgagattggcgatgttgtagtaatcgaagtccttgccggctgccttgagggtagccagctggtcgtcgcgtaaggacatgcttcctccgaaatcatgaatcggcttatgatgccgctgattatccgctacacatggtacgggcacgttaccgaggctctggcgtgtcggcttgaagtatgagacaatcgcgccgccgtctcaatgccgacgcgagagcttgcccgtcagtccgcgcacgaacggcgccagccacaggcacagcgcgaagatcagcgcggaaccggccaacgcgatcaacgtggccaccatcgtggcgccggtcggcagaatcagggcgaagaagttcgccacgaacgggacgaacgcgccgatcacgcccgccgccgcgaacaccgccaccagcacgccacgccaaccgttgagtggtctggccacgcgggccagcacgaacacgcccatcgcgaacaggatgatggcgctggtggcgcgcagggcggacaggtccgcggcatcgccggtcacgttccagcccatgaccggcggcagcacccaagcggccagcagcaccgacagcgcagtggcgatgccgcccggcagcgcgaacgtgaccacgcgcttgaggaatcccggaatatagcggcgcgtgttcggcgcgagcgccaggatgaacgcgggcatgccgatggtgagagcgccgatatacgtgatatggcgcggcaggtatgggtatgggatttgcgtcagcactacgccgagcgagatcagcgcggagtacacggttttgacgaggaacaggctggccacgcgctccatattggccatgacctgacggcctcgtgccacgacgtccggcaggtgcgagaacttggaatccaccagcaccacctgggccacggccttggtggcgggcgccgcattgcccatggcgatgccgaggtccgcctccttgatggcgagcgcgtcgttgacgccgtcgccggtcatggcaaccacgtggttctgcgtgtgcaacgcctgcacgatggccttcttctggtcaggcagcacgcggccgagcacatcgacgttttcgagcacgcgggccagttcgttcacgtcctcgggcagttcgcgcgcgtccatcgccaccggctcatggtcgcctgtcagtttcactctgcgggcgatggcacccacggtcactggattgtcaccggaaatcacacgacagcgcacaccctgctcacggaaccaagcgagcgtccgctcggcgtcctcgcgaatcttctcagagcacaacaccaacgccaccggctcagcctgcacatccagttgcgggccgtccgagacattggctccctcaactgctcccctcagtccgcttcgcggactgaggggagctgtagaccgcgcaacaagcaacacacggttgccgtcattggcatactcgttaacctgctgcaacaccgacgaatagtcaccctcaagcgcagaaataatcacctccggcgctcccatgtaccaggtctcgccggatttacgcaccgcactccatttgcgcgccgaagagaacgggacacgagactcaaccgcacctgccccatatccttgggccttgagcccggcgagtacggcttggccggtgccgttgggctgctcttcgttgcagcagtcgtagagggcctgcgtggctgcctgttccgcagccgcattggcggaatcgagcatcacgagccggttgaaggcgataccgccatcggtgatcgtgccggttttatcgaggttcagcgcgtccacgcgagccagtgtctccacggattcaagctcctgcaccagcgtattgtgacgggcgagacgcatggcggccaccgcgaagttcagcgaagtcagcagcaccaagccttcgggaatcatgcctactacgccggcgaccgcggaaaccacggcttgccgccattcgccggtggagagtgccgtgccccaaccgccgaccgtatgaatctgcgaaagaatcagcagaatacacagcggtaccacgaggaaggtcatgaatttcagaatcgtgttgatgcccttgttcaggtcggacacggttttcttgtataccttggcctgcgcggtgagcgtggcagcgtaggaatggctgccgaccgcattgaccttgaccaatgccatgccggagaccgcggtggcaccggaatacacctgctcccccaccttgtggcgcacggtacgagattcgccggtgagcatggattcgtcgagttccagtccccaggtctggatgatctgcccgtcggccggcacctgttcgccggcacggatccacagcaggtcgtcgagcacgatctcgttgtggggcacctccacgtccctgccgtcacgatgcacgaggaattcggaggccacaaggatggaaagcttatccaacgtgcgcttggccctgagttcggtgacgatgccgatgcccgtgttgatgatgatgacgaaaccgaacaccgcgtccctccaggaaccggtgatcagcaccagtaccatcgcggcgaagatgatgccgttgaacagcgtgaatacgttggctcgcacgatatcttgaaccgaacgcgaggtggatgttttcaccgcattcgattggccactttcgatacgctgcaccacttctttggaggtaagaccggttgctccgatctcaggcatttccacggctgttgttgcactcatattccccagcctaccgcgtcttgtttcgcaatccactaaggatcagggatgattcagggtgctttctcagcttcaagggcctgattcggctcaggaaacggtgactttgatctcgcgttcgtggggttcgtcgcgcgtgatggtgagcacggcgtcagtaatagtcattggcttggtatcggcagtgtcgccagaatcggcactgttggtgttgaggtgaaggatgacggcgtacagcagttcatcttcgggcgcatgctttggatcaatgagagcgactggaataccggcttcacgcgcattggtcaacgtctggttccagctctcccggttggcgtcggtaacgtcgatgccgctgataaccacgattttgaccgcgcgagctacgaaatcggcaacaccctgctgtgcggtggccgcattcttgtcgacgccagtatgagcatccatactatcggcaccgttttcgctggtagtgccggcgtcagaagattcggtttcaccggatacaccatcagttgcgtttgccgagcttgcggatgtttcgagcgaggcatagtagacattgagtttgtcatcagacagcgcattgatggcggactcgtctgcggcggtgtcagtcgaccccacaaagccgactgtgacatccgtgggatgtgtggaatcgtgggcgacttccggcatgctgtcttgggtatcgccgaccgccctaccggccggcgtgcaggcggccagggacaacacagccgccatgcaggccagcaatccgagaattcgtcgtgtcatatgctcacctgtcagcgggtaaacagggccaccgtctcaacatggtgggtcatcgggtagatatcgaaggcacggatgtctttgagctcgtagccttcgccgatgagtgtcgcggtgtcgcgtgcgaggctggtgggatcacaggcgatgtagaccacgctggatgcgccggccgcggcaatctggcggcagaccttggcacgagcaccggcacgcggcggatcaagcactacgacattcggcttggccagatgcgccggcacatggtccagcgtgcgcgagacgtcacccgcgcgggcgtccacgtcgttcaggttcatggcgcgcagattgcgctgggcgttcttgacggccacacgcgcgccttcaacgctgagcatgcgggtgcgttcaccggtcattgtggccagcggcagggtgaacaggccggaaccggaatacaaatcccagattacggcgtccgccgctgactgcagctgcccgttgaccaggttgatcacgtgcgtaccgagggcgatcggcgcttggcgatgcacttgccagaaaccgttggcgtcaacctgatagtcgaaggtcgtgccgttgatggtcacctgttcggtgagcagctgggagccggcgcgcagttcgccgtccacaagtacggcgtaattgtcgtctgctgccgcggtatcgacgatctcgccgcgcggttcgggcacggaaagacgaatctgggagccgggttcaaagccgccttcccacacgtgttcgcgcttggcgacgtccagcagcgtgcgcgtggcaagcggcatggtgtcgatggccacgcggttgtgtgtgccgcgccggcgcatggatggcatgccgttgtcgtcggcaatcatttcgatgcgggtacgccaattgaggccgccggcttccttgtcgccgggcatgcgctcgatgggaacggccacgtcgatatggccgagtcggctcatctgttcggagacggtgatggccttccacttgagctggccgggcaaagagacgtgcacgagatccgcaccgcccactcccccgcccatcgccaagggaccggcaagtggccatgccggggtgactcggtcttcggacggctcgagaacctcgacgacttcgccggtccagaaccggtcgtcccggtcgtggggctcgtcaagctcgactcgcacgagttcgtcaggcaaggcgaagcggacgaacaccacacgaccgtcgatatgggccacgcagcggccttggtcggcgtatcgttcgatacgaacttcagcttgcatcatcgtcctttccgattgcgctcggttcgagttcggcatcaacagcgacttcatcagtctgtgtcttcctagccgcgaccttatgccggtgcatcggcgtggcaataatgaggtaactcacccaaatcgccaatgcccagaacggaatgcccatgagcaggcgggtcacgccgagtgcagccacatggttggtcagatacagcggcacctgcaccaccagccgcagcaggaacagaccgacccacaggccggtgacaatcatataggcgcgtttcagggccttgtcgtccatccagtcatggaaccatgccttgaaatgctcggtgggcaggctacggatgaattcgacgaccaaacccagtccgggcacgcgcgcaatcagcgacacggcaagcaacgcggcatagccggcattggtaatgaatccgaagatgtagtaattgcgggcctcatgagtctgccatgcccaaatcaggcagatgcctaccgccaccagaccagagaccgcgcccattaccgactggcgctgaatcagtcgcacaataacctgcaataccgccaacacggccgaaaccgcaatggtgagattcagattgctcgtggccacgaacagtacgacgaacaccacgccaggcagcatggattcgatgacgccacgcgggccaccgatggcgtcgatgacggagaaatcctcgccttcattgccggcgtcggctagagcggacaggccggtgcgtttgttgtctgccaagtctcttcctataaatcagcgaacttcggagaacatcgggccgcgagacagcgtggtcttcacttcggtctgctggtcctggctcagcggacccttcggcttgttgtccggaatgtccttgaagtgttccttgccgttctcctcgccggcttcggccgcggccttggcggccttacgctcagcgggggcgaccggcggatgcatcgggatcagatcgcgcggcgccaaaggctcctcgccacgctcgacgacgatgtcggcgaagaacttgttcagcgcctcggtctccgggctgtccggatcgatagcagccttgccggagaagatgccacgcagcatccagcgcgggccgtccacaccaacgatgcgcgtgttcacggtcttgccgcccttgacattgaccggcagcttcagttcggtgccgaacacaccgtccacttcagaagcggccttgttggcttcaagcaggtcaccgcgaacgtcatcccacagtcccagggtcttgggtgcggcaaaggcttcgatctccaggctggaggagccgaaggtgatggtggaaccaagcacttgctgggtggcgcggttggccttgatgcgcagctggatgccctggaggaagggcaggtagtaggcgccgagatccagataatcgtcataatcgggcacgtcctcatcgttgacatcccacgggcctcgctcttcgccgcggccctggtattcgctggccggctcggcgagcacggtctccgcgctctcggcctttgcggcagcgttcgcttctgcggcggccaccttgtcctcatcgacaggctcaacggccggctcggcttccttcttgctcttcttcttgccgaatccgaacagtcccataattcctcgtttcatgtaacggttgcaaccttgctaacactagcactcaggcttagagaaagctgagcatcgcggccgccggtgtccggttcgattcgtagggaggccaaaatagtatggccgcatgaccatcaccattaccacgtctaacgtcaacggcattcgtgcggccaagcgcaagggcatcgaggattgggccggcaagcatgcgccggatgtctggtgcatacaggaggttcgcgcgcctcaggacgatgtcgattctattttcgatgaatttggtttcgaatacgccaccgccggcaaaatcgacgcgccggccgacctccatgccatgaacgaggtctgccgggtgaaaggccgcgcgggagtcgggctgctcaccgacttggaagtgcttgacaagcgatatggtctgccaggtctgagcgaggatgtggattcggggcgttggatcgaaaccgatgtcaaaacgcctgagggctatacgatcaccgtggcatccgtgtacatacatgccggcaacaccgatgatccgaccaaaatggaacagaagtatcgttttctggacacgatgctgaagcgcatgggcgcgttgcgggacgaggctgcgcatggcggcaaacaggccgtgctctgcggcgatttcaacatcgcacacacgccgctcgatatcaagaacgccaaggccaatgagaagcacgccggatttctgcccgaagaacgtgcctacgtggacaaatggctggacgaatacgagttcgtggatgtgatgcgttcgttggccggcgacattcaggggccatacacctggtggagccagcgagggcgcgctttcgacaacaatgtcggctggagaatcgactatcagttcgccacgcccgagttggcggagaccgcacgcggattcgtcatcgacaaggctcccacgtatgacaaacgctggtccgatcacgccccactcacgatcacatacgaggtatgacatattccgtgggacaacatccgaaaatcgacgattttcgcgggtcgtcccacgccccacagcatgagtaatcatcgactacgccaagaatggcgtaattccgggcttcgtgagaaatctgctgtgggacaacactcatgtccatcgattgatgttgatgttgtcccacaaattgtgggacaacatcgggaaaacaccaatttttgcgttttcgtcccacgcgaaccataatgcaaacctgcacatacgaatattgggttctttccacggatggaaagaacccaatacaatgcgctcaaacgcagattatcagtccagaccgagttggagcttgccgccggggatggcgtcgagcaggtctcgggtgtactgcttctgcgggtggtcgaagacctcgtcggtggtggcgtgctccacgagcttgccgtgctgcatcaccacaacctcgtcggcgatctggcgaaccacggccagatcgtgggtgatgaacaggtagctcaggcccttttcggcctgcaggtcgttgagcaggtgcagcacctgatcctgcaccagcacgtccagagcggagacggcctcatcgcacacgatgacgtccggatccagagccatggctcgtgcgatggcgatacgctgacgctggccgccggaaagctcgttcgggtaacggcccatcacggaagccggcatctcgaccatgtccagcagttccttgacacgattggcacgcgacttcttatcgccaatcttgtggatgcgcagcggctcctcaatggaacggaagatggagtacatcgggtcgagcgaaccgtacgggttctggaacaccggctgcacatggcgacggaaaccgagcagatccttggccttgaacgtggaggtgtcgcgtccttcgtagaacactttgccggaagtgggatccaggaggtgaagcaccatgttcgccacggtggacttgccggaaccggattcgcccacgatggccagggtggtgccgcgcttgacggagaaggacacgtcgtcgacggccttgaacatctccttcttgcggggcagcttgaattccttggtcaggtggtcgacggtgatgatgtgctcgcttttctcgagcgtgcgttcgccggcgacgtgatggtcgagcagggcgtccgcgttctcgccgcgttccttggcggagatgatgcgctgggaggccagcgacggggcggcggccacgagtcgcttggtgtacgggtgctgcgggtgctggagcacctcgagggacggaccggattcgacgacctgacccttgtacatcacgacaatgtgctgggcgcgctcggcggcaagacccagatcgtgggtgatgaacagcacggcggtgcccagcgagtcagtgagcatgtgcagatggtcgaggatcttcttctgcacggtcacgtcgagggcggaggtcggctcgtcggcgatcagcaggtcagggcggcaggccagaccgatggcgatgagcgcacgctggcgcataccaccggagaactcgtgcgggaactgacgagcacgggtagcggcgtcgggcagaccggcctcggacagcagacccgcgatgcggtcatccattgtggagccgatgacgtacttcttggcgaggtaccaggcctgatcatcggccacaccggccttgatgaggtcgtcggccacgcgccaacgggtttcggagcccggaacccattcgttggtgaagcgggcgacggccttgtcgaaggcctcgccggacacgccggcttcggtcagggccttcttggcctcggtcatgagctcgggcagttccttggcgccgaggaaggtctcgtcgtcgttgcccttgacttcgacctcgtcgccggccagagccttggcgagggcggagcgcttctcgtgggccacgtccatgttgttggccttcagcgcttccttgacctgggagccgatacgccacaccgggttgaggttgctcatcgggtcctgaggcacgaggcccatcttggtaccgcgcagcttgtcgaactcgctctgcttggcgccggcgatctcctggccgtcaagcttgatggaaccgttgaccacgtgaccggtgccgggcagcaggcccagcacagccatggcggaggtggacttgccggagccggattcgcccacgatggccacccactggccggggtagacggtgaagttggcatcgcgcaccgcatgcaccggcttgccggtgtcagtggtgaagtcgatggccagatccttgacctcgagcagcggaccatgctctttctgcatagccagcatcttggcgttggtgttgtcagtcataatgattctccactcccctcgctcaggccgtacggctcttcggatcgagggcgtccttgacggcgtcgcccatcatgatgaacgcgagcacggtgatggccagtgcggcggacgggtagaacagcaccatcggatcggtctgcaggttggtctgcgcgctggagatgtcgccgccccagctcaccgtggtggtgggcaggccgacgccgaggaagctcagcgtggcttcggccacgatgtaggaggccagcgaggtggtggcgatgacgatgatcggggccagggagttcggcaggatgtgacggaacaggtttctggcaggcgtggagccgagggccgtggaagcggtgttgaattcgaggttcttcgattccagcacggcgcttcgggcgatacggcatacgccgacccagccgaagagcgtcagcaccagcacgatcttccagatggacttggaggtcttgaacatctgaagcaccacgatggcgccaagcagcataggcagcgcgaagaagatgtcggtgatacggctcagcaccgcgtcgacccaaccgccgaagaagccggcgacggcaccgatcagggtaccgacaatcacgactagtagcgtggagagcacgccgacagacagtgaggtacgggtgccgtagaccacgcgggtgtacacgtcgcagccctgcaggtcgtagccgaaggggtgtccggcggaggcggggctcaaggagttgcccagatcgcaggcgttcggatcctgcttggtgaacagaccgggggcgatggccaccacgatgatgaacaggatcagcaagccggagatgatgaacagcgggttgcggcgcagggttcgccatgcgtcggcccacatgctggtggccggtgcggattcgtcgacggaatcgacgtcctgcaacggggtctcgtcgagaggagctacgtaacggtcctgaccgggcagggtttccatgaagtattcggttcctggctcgccggtctggttgagctcgttttcagtggtttcgtttgccatgtgactcactcctccctatcacgcgtaacggatacgcggatcgagggccgcgtacagcatgtcgacaacgaggttgcacactacgaaaatcagcatgagcaacgtgacgatggacaccaccaggtttgcctcgcccttcagaatggactggtaggtgaggaagccgatgccgtggatgttgaagatctgctcggtgatcatggcaccacccatcagggcgccgatgtcctggccgaggtaagtgacgactggaatcagggagttgcgcagcacgtggcgcagcatgacctgaccgttcgacatacctttggcacgtgcggtgcgcacgtaatcctcggcgatgttggaggagatttcggagcgggtcagtcggatgatataggccatcgacaccgatccgagcaccatggccggcatgagcagatcaaggaagccggggtcggcgcctgccgtcaccggcaatatcgcccactgaataccaaagacatattgcatgacgaagccggtgacgaaggtcggcacggaaataagcagcagggagacgatcaggataacggtgtcgtaccacttgcccttcttgaggcccgagataatgccgaagaccacgccgaagatcgcctcgaacacgaacgccatcaggccgagcctgatggtgaccgggaaggcgcgggtgatttcgtcgagaacgggctggccggcgaaggtatcgccgaagttcagggtcagtgcattcttcaggtagatgaagtactgaacgatgaacggctggtcgagatggtattctgcgcggatctgggctgcgacggcctcattgacaggcttgtctccgaacatggccttgacggggtcgcccggcagggcgaatacaagggcatataccagaagagtcgtaccgagaaccacgggaatcatctgcagaatgcgtcgcagaagatacttacccatacggttgctccttatttcctagaccggccagaaagggtatagtacgcccccgccggtcgataaatactccgacagtttaccgcatgcccggactgtgatatgtaaatttgcgttaacgcaaggtttgagattgggcaatgctggtggatatgtccatggttgcggtcggatagtggatactttaacttggttcccgatggcgtgagcaagcacccctcacacaacaaaaagggcggggatcttgcgatcctcgccctttatttccgaactacctaacggtatccgttcagtgagtcagactcacttcttggacatctcggtgtaggtcgggaggttctgccaatcgaaggcgtagccggacttcacgctgagggaagccgcgccggaggcgttggagtagtacagcgggatggccggaaggtcgttgaggaggatttcctcagcctgctggtacagcttgttggcgtcatcggtgctggaagcggcagcggcctgcttgcacaggtcatcgaaggccgggttcttgtagtcaccatcgttggagccgttgccatcagcagcagcggtggagtacagctgccacaggtagttctcggcggacgggtagtcaggctgccagccggtacggaaggcgcccttcatctgacggttggtgaccgcgtcacggaattcctggaaggtcgggatcgggttggtggccgcgtcgatgcccaagttgttcttgagctggttcacgacggcgtcgtaaatcggcttggcaccaccatcggcgttgtaggagaaggtgagctggccgtcgtacttggagatggcgtcagccttggcccacagttccttggccttggaggcgttgaacttcaggttgtcggcacccttgagggagtcggagtagcccggggtcttcggggaggtgaactcggtggcggcggtggcgttgccgttgagcaccttgtcgatgagctggtcacggttgatggccatggagatggcctgacgacgcagctggccttcctcgtcgttcttgaagtggtcaagggaggacgggatggtgaaggtctggatgacggagccggcctcggagtaagcctggaccttcttgtcggtcttgaaggtcttggtgaaggcggccgggacggattccatcacgtcgaggttgccggcctgaatgtcacggtaggcggcggagtcgtcggtgtagaccttgaaggtcacgccgtcgttcttgggctgctcgttacccttatagtcagggttcttgacgagggcgatttccttgttgtgatcccagtggtccagcttgtacgggccattggagacaggcttctcgccgaaggccttcggatccttgtagaaggattccggcagcggggcgaaggccgagtagccgaccttaatcgggaacacggagtcggactggttcaggtcgacggtgaaggtggtgtcgtccacgaccttgaggccggagagctgctcgtcacccttgaggccatccttctgcagatcgtcatagccggcgatggtggagaagaaggaggagcacttctgggcgttcttggcgttggccacgtaggaccaggccttggtgaaggactcagcggtcaccggagtgccgtcggtgaacttccagccagacttgatcttgatggtgtactgggtggcgtcatcgttcggggtgatggactcggccacttcgttggaagccttgccgtccttgtcgaaggagaccagacgggagaacagcaggtcgaccggcttgccgccgccggtttcgttggtgctgcccgggatcagcgggttctgcggttcggagttgtacgcagtgatgatgttggagccagcggtgttaccggaggcagcgttgctgttagagccgccgcaggcgctcagcagcatggccacggagcaggccatggcagcgaaagcaagagctttcttcttcatatgatttctcctattcattaggttgcggggcgttgcagcctcgcctcatgcaaacggggctggattccccgtcaccgtgagacttgcatctcacgatgtctcgaacaatccaaccccgttgctgattacctgtcatttttgcgcacttgggagacaagcagtgtattttttgttacacccatgtaaaattcaggggttcttgccggctaggttcagtctttgctgagtttgttaaccaatgtccacatagtggtcatgcccgcggaaaggcctgtccgtaacggttcttgagctgctcgatggagacgtgcgtatagcgttgtgtagttttcaaggaggaatgcccgagcatctcctgcacttccctcaaatcagctcccccatccaacatgtgcgtggctgccgaatgacgcaacgcatgggggctgatgtccggcacgccggcctctcgggccgctctgtgcacgatgtcacgggctatgcgttggtcgatacggccgcctcgtgcgccgaggaacagggcgttggcagcacgggacttgactgcatccgttgccgtacgggccagtaccggccgcccctgttccagccaagtctccagcgcacgctgggcgggtagtccgaacggcaccacgcgttgcttgttgcctttgccggtgactttgatggtgcgattggagaagtcgatgtcggcgatatccatcgacaccagttcggcgacacggatgccggtggcatacagcagttcgagaatcgcggcgttgcgctgcgattcggcggtgactcgggcgttgtcgcgcttgtctgcacgggcgggtgcctcactgcggtttacggtatcggccgacttatcagctgtcttgccgctgccgctgccggacgcggctgccgctcccccatcgtccttgtactggtttgttgcaacggcatgttcagcgacatccaataattgctcggcctgggattcggtgagcaccgcgggcagcgtgctgggaatcgagggagtcatcagtgtggcggccgggtcggtggtggtcagcccatgctcataggcccacgcgaagaacccgcgcacggccacggttttgcgggccatgctgctgcgggcgtgatcgcgcgattccaccgccatccagctgcgcagatcatccagcgtgatctcgttcagatcggtcacgccgcgcagctcgaacagatgcaggcatgccgtgagatccgcgcgatacgctttgagcgtattcgctgacaggccgcggttggacttcagataggagatgaaggagtcgatatcgccgtcgaactgcgtagatgacactctcgttctcctccgaattctttatggccttgggttacggccggggtggcgtgttgcgccgctccggcacgggtttcaatgtggcaatctgttcctgatggatggtcacgttctgggccgggcgcgaaccattggcggcggcgtcacgcaccatctccaacgtgtatccatcccaggaaaccacatgccccacatagtcgcggaacttcatacggtggtcgaccgggtcaatgccgtcggtgatgcgcaccaccacgcgggcaccggccggaatctgccttggtaacgtcatacgtcatcatccccttagccatccgccgcatcaacttctatgcgtttcctgaaaaacggtacagactaccttactcctttgggtctttcgaacagcggagccacacggtcttctcacgaaaacaagcgggaacttcatccccctcgcgcagccttcttcgtgacgggcggcgaggggaacctgcacacgggctgcatggcggggcgcagttacatggcggggcgcagttggacgatggcctgacgcggatggatgaaaccggtgatggcttctccacggcgtgcggagaacagcaaggtctgctgccagccggcttcggggacggcgagctcgcgttccgggaatccggcggcagttgtgccggcttgctgcgcggtggccgtaccagcttgtgcagcggtgatgccggctcgcgtcacggcggccttgtaccggcggaaggggtcgccttcggcgaagaatcccatcacatcctgctcgccgtcggcaccagcgtgcagttggtcggccatatcggtcagacgtgccgccatgcggcgcagcagcacttcgacgttcagcgagtcttcctcgaccatcgcacgcgtgcggtccgggtcggtcagggacacgcgggtcatgtccctccagcagccggcagccagcgcggcggcgatgttgcggtccgggttggcgaccagttcgttgatcagcgcggtggacaccacatgcggcatgtgggagatcatcgccgcggccttgtcatgcgtttcgtcgtccacgacgatgacgcggttgccgacgtccttggtgatcatcgtggcgacgtcgaggaagcggcggtagtccgtggactcgtccacggtgatggcccatagggcaccgtcgtacagatgcgggtcggcggcctgccagccggacagttcgttgccggccatcggatgggcgccgacatagcacttccccagcgcggcagccttgacctgatcgcggaccatgcccttgactgagcccacgtcggtgagcgtggtgttcggatggtcgcccataagcggggctagggcggcgaggattgagggcatcgccttgagcggattgcacagcacgaccacatccggctcggcatccatgagttcggagagcgtgctcttgcagaaaatgccatcggcttcggcctgggcgtaggggtgcgagcgatggttccacgcgatgacgcgtacgccgcgctcggtcaggcggcgtgcgagcgagccgccaatcaatccgagtccgacgattccgactgtgtctaccacagcagttccttccttgctccctcggcgtactgccagccttccgacgcgcgattggtgatgtggacgccgccctcgggcagcatccaggcgtcgaccggcgggttcgggcgttcgcggcgtgggtagacggccagggtttttgcccagtcgccgtgtccggcgatctcttccagtgcggtgcggaatcttggctcccagggggcggcgtcaagggtggcgatgaagctgtaggttccgtcgtggcctttgatcgggcgcgagatgaagctggtcatgttcagccccgcatcacgcaggacgtccagcaggtcggcgagcacgccggggccggtgaccagcgggatgaaggtgatgatggtttcgaagtcgccggcgtcattgcggtgggcgcgggcgttgaattcctggaccacatcacgcggggcgatgacaaggaattcggtgtgcgcgccatcgaaatcctgcacatgttcggcgagggtgtcgagatcgtagagttcgccgcagatgctggggccgagcgccacgcggccgggcttcaggtcgcggcaggcggcggcgttggaggatgcgggttcgggctgcaaatggtgttcggtgatgaaccgggtgcattgggccaggccgtgcgggtgggcgctgacggggttgccggtgcagtcgcagatgctgtggccgcgcacggtgaaggcgttgaaggccacgtccacactgatccgggcgaagccggccgcgtcgggggcgtcgatcagcgcatcgagattcgggaccacatagccttcgacgttgttttcccatgcgatgacgccccagccttggcgcgactgtacggcctgcatgatcgcgggcacgtcgggcagggcggtgaggtcgaagtcgccgagtgtggcgaactggtcggcggccgtcattgccgcctgatgggtgaaggtgccttccgggcccaagtaaaacagtttcatgtgtgccataaggttctatggtagcggccgtaatcccctacgcccgccgatacgcgacgcattcccggaaatgtgccgccatatatagttacgcgcgcgattcagaatgagtgggaataacgaaccagcgggcgggaagaatgagcaggacgacttggaccagtatcaggccgtacagccagatgtagccggcatgctgggagaagaacggcatgtcgccttggaatccggcgacgatgaccgccttgccggatgtggtggtcagtgccatgccccatgcggtcagcgaggaggcgatgaggtgcagggccagtccgaccgcgcccatgcgcgaacgggcgcaccatgtcgataggccgatcagcagaaatgccagcaccagaccatacggaatactcagttctgcacccatacggtgggcgaacgtgcccacaaaggcggaagccacgcccgccgcaatcgtgatcaacgatttgaccagcgcgttctggcgatacgaccacggacgcagttcagtagtgctcttcacagtcatgcgtttcagtataggtggggatatgacttggcgaggaataaacttggctcccctcagagaggggagccagagagaatggtcggctacagtcgcaccagatcacttaccctgctgggcggcgttctggcggcgctgtttggcgcgccacttgtaccagtcctcacggccgaggatgatcttgcgcacgcggatggactccggggtgacttccacgcactcgtcctcgttggcgaagtccagggactcctcaaggctcatcttgatcggcggggtcagggtttcgagcacgtcagcggtggaggaacgcatgttggtcatgtgcttggccagcgtgatgttcacatccagctcgtcgggcttgttgttcacgcccacgacctgaccctcgtacaccggggactgcggttcgacgaagaagttgccacgggcctgcagacgctgcatggcatacggagtggccacaccctgacgatcggaaaccatggaaccgttctgacgaatggtgatggcaccagcccacggagcatagccagcggagatggaggaggaaatgccggtgccgcgagtggcggacagcagagcagtgcggaagccgatcagaccacgggacggcacggtgaactgcagacgaacccagccggagccgtggttggtcatgccgtccatacggcccttacggtcggccatgagctgggtgacagtacccatgtactcttccggcacgtcgatggtggtattttccatcggctcgttgaccacaccgtcgatcttcttggtgaccacctgcgggcggccgacggtcagctcgtagccttcgcgacgcatctgctcggcgagcacggccagcgccagctcgccacggccctggacttcccaagcgtcggggcggtcggtgggcaacaccttgatggagacgttgccgatgagctcgcggtccagacggtccttgatcatgcgggcggtgagcttgtggtccttgccctcggtgccggccagcggggagtcgttggtgccgaaggtcatggagatggccggatcgtccacgtggatgagcggcagcggcttcgggtcgttggggtcgacgatggtctcgccgatcatgatgtcgttgacgccggcgacggccacgatgtcgccggggcccgcggactcgaccggggtgcgctcgaggccctgcgtgcgcagcagttcggagacgcggaagttctcgagggagccgtccacacgggacaggccgtaggtcttgcccttctcaagggtgccgttgtagatacggaccagaccgagtcggccgaggaagtcggaggagtcgatgttggccacgtgagcctgcagcggggcgccttcctcgtattcgggggccgggatggtggagatgatggcctcgaacagcggctcgaggttgtcgttgtccggcaggccaccgtcggcgggctggttcacggaggcgtagccggccttggcggcgcagtagatgaccggcatctccagcagctggtcaaggttcaggtcgatgccctcgtgctgcacgtcgtcggccaggccgagcagcaggtcggaggtttcgccgacgacctcttcgatacgggcgtcggggcggtcgaccttgttcacgcacaggatgaccggcagcttggcttcgagggccttgcgcagcacgaagcgggtctgcggcagcgggccttcggaggcgtccacgagcagcacgacgccgtcgaccatggagatgccgcgctcgacctcgccgccgaagtcggcgtggccgggggtgtcgatgatgttgagggtgatgccctccgggtggccgtacttggcggccagcggaccggtgtattccacggccgtgttcttggcgaggatggtgatgcccttctcgcgttccagatcgttggaatccatcacacgatccggcacttcctcacgctcggaaaacacgtgcgactgctgaagcatggcattgaccagggtggtcttgccgtgatcgacgtgagccacaatcgccacattacggatatctccacgaaccgccatcgaaacctctcttaatactgattttcttgcgtaatcgttcggtacttgcgttctcgagtacttgctcttggatatcaacctgtacctacacacaaaccgtcacgatgttactggcacaccttgacacacaacgggcccggctttctgagaattagtcacatgtcatctggcttgcgagactttttgtattccacactctcgactcccctccctgaggggagctgtcgccgtgggcaactgaggggcgccaagtgtatcccctgaatctcccctgaatcatccctgagtacagcaccgtcatgggtagttactgagtaacctgatatccaacgatagttactcagtaaccttcgcccaaggcaaaccgtctatgcaaaggggatgcggtatggcaatcagagaagcgctattagcactgttggagcgaggcccggccagcgcctatcagcttaagaaggacttcgaccgcaccatcggtctgacttggccgctcaatatggggcaagtttccactacgctgcagcggttgaaccgcgacggactgattgaagagaccgcgccgactactagcggatccaatgatgtcggcaccgcagcggccgcaccattatggcgattgaccaattccggcgcccaagagcttgaccgatggtggcgctcccccattaccccggaacaacgcggacgcgacgaactggtgatgaagctggccgtcgccgtggaaatacccggcctcgatgtttccgaactcatccaacaccaacgccacgctttgcagcaactgctgcacgacatcacccgactgcgccggcaaacaccgcccaccgaactcgccacacgtctagtactcgaccaccatattttcatcactgaagcggaattgcgctggctcgataccgtggatgagacccagctgcgagcacaactggcgcagcaccccgtttcggcacctctcacggcaagctcagccgcactcaccgccaccattcaatagtgcataggagcacatcatgacttctcccgttctttcttctctcccgcaatcttccccatgcgcgctggaattacacgacgtcactcgcgttcacggcaaagatgcacgtcgtgtcaccgcgctcagtcacgccaatctcacgcttcgcccgggtgaattcgtggccatcatgggccccagtggttccggcaaatccacttgctcaatcttgcgggcgggctcgatgtgcccacgcaggggcacgtgctggtcgaaggccgcgatctggccacactgtcagtggccgaacgcgcggccatccgccgcaaatcgataggctacgtgtttcaggatttcaatctgctgccttccctgagcgcagccgagaacgtgtcgttccccttggaattggatggctggaatccccgcaaggcacgtgaggccgcgatgcaatccctcaatgaagtgggggtagccgatatggctgatcgccgacctgaagacatgtccggcggccaggcgcaacgtgtggcgattgcccgcgcactggtcggcccacgccgtctactactggccgacgagccgaccggagctctggattccaatgccggcatgacgattctcgaagtgttgcgcacccgcgcagatcgcggcgcggccgtactgctggtcactcatgagcctcgcttcgccgcctgggccgaccgcacggtgtttttgaaggacggccgtatcatcgatgaaaccggctccagcaatatggatgatttgctcaaccttgaggaaaggggagcatgatggcacgcgcagccctcaataatcttgccaatgccaccgtcggtcgctctgcccaaattccccatgccgctaggccaagccttggcgcacgttgcaaccggtatcgggccgcgctgcgactcggctggcgcgacgcactacggcacaaggcccgcaccctactgtccttgctgctggtaatgctgccaatcgccgcaatggtggcctccatcggtatgaccaccaccataccgcccaccagatcgcgtgcgctggcgacaatcccggctgatacgcaggcggtcatcaccgccaccgccaggccccgcaccggccaaccgttccggcagtcacccgaaagcggcggcacgtggcaggacgatccctcccagcagccggcctcggccgccgagcttgcgaagattctgccgcaacaggatcggctgctcccgtattggcagtcgcccgaactcatcgccatcaccggcaccgcgttgcaacccggcgaacagaccaaggctgggatcgacgtgaaaagcgggaacgacattgatctgaacgcggcctccaccgcgaccatgaccgaggcttcacctgaggcattgcaacgaatgttgccgaagctggtcaagggttcggcgccgcagaataatacgcagattgtcatcagccgcacattggcggataatctcggcgcttctctcggtagcacggtgacgttcgtcgctccgccgttcgatggctggatgagcctggacgggcgcatcggcgaggcggtggccgacactcagcgtgcttggacagtcagcgggctgaccgatgaatccgaagccgcggcatggggcttggaaggctggatgtcagccatattggaatctgatggcgtcggtgtggatggccattatttggtggtcggtccagagccggtcacgtgggcgcacacccgcagcatgaacctgttgcaggccatcgtcatttcccgccatgtgctgactgacggctatccgcccgcatcgcagctctacccgatgcagatcgatgcggctaccatgttgaaccacatggtcactgtggtcatcaccatgctggtgggtatgttgctggtactgtttctggtcacgcccgcgtttacggtgtcggcagatcagtcacgtcgtgtgcttgggctcgcggccgcatccggtgctgcaccacgtgacctcagtcgaatcatttcctcgcaaggtctcgttatcggcgccatcggtggcgtgctgggctcggcattgggattcgcgcttaccttggcggccggccctgcgataggcgcattgcgtggatccacgccgctggagatcctgcacggattctcgtggggctcgctgccgatgggtattgtcacggcaatcatcattggatttgccgcgacgattgcgccggctcggcatgtggcgcgtatgcatccagtcgatgcgttgaaggattgcccgacaagagaggaaatcggctacggtgaatccgcgaatggcgtggatacgaagcttcgccgtaatcctttgagactgctccgtgttgcggttggtccgattctggtcttggccgccatcgtatgcgccgcgctcagtctgacattgccattacccacgctggccgatcacaatccgggcgcggttccggccggaaccgaaacgcatatggctctgcttgttgccacgattttgttggctgtcatagggcttgcgttgtcgattcgcacttttgcacggtggtgcggcaaagcgggttcccaactgaacatcggcgcacgcctggcactcagggatgcagccgagcatcatcgacggttcgttccggcggcatgcgcagtgctgattaccatgtgcatcgcctcgtacacactggtaatcaccggctccatggtggcggaccagcgaaattccacgatgacgatgacgtatggaccgtcggggatggccattggggccgacgtgcatgtcagcaatgagttcgaccgtgctgtggtgtcggatgcgatacgccggcttggcaaagagacgccgatacgcgctcattacccggtgtacaccgaggatgtcaagcgatggtcaaagctcaatgatacgaccgaagtcgattccgacaagttgaacgccgaacacggctacatgtatgccgctgcattgctcccggccggtcacacttgtgataacccaacgatccaagagcaaccggacacgtccacatgggtgggccaggatgccgcttcggccctgtatccaaacgttccgatacgttgtgtgccgatagaccgatcccatcagccaacgtattcgaatatactgccgagtttccgcggcgtgaatctcattatggatggcaatgcgatgcgtttgtccggcttcccgaacgcggatgaggcggcacaggtgcttgatgcgggcggtgtggtggtcggtgatgccggcacaatcgacgcgggaggtatggtgcgtgtggccatttcgccgaatccggcaattgcaaacgaatctcaggccacacatatcgagaagcgcaaggccatctacgtgcgcggcgcgtacccgctggtgatgagcccggcaacagcacaggcgctcggcatcaaacaattgcagtatctgggtgagtatctagacttcgccggtggcaactcccccgttaccgtaaagaaggcctcagcttatgcaatcgaaaatctgccgctggcatccacgagcactgacgggaatcgcctgccgtggggtgacaatatggcattggtgcccattggcctgttggcattgctggcactgatggccacgctcgtttcactgctgctggcccgcacgcaggcccagcgcgacatggccacgatggtcgccgtgggcgcgccaccccgattcctcagacgttacggcctgacgcaggctgcggtgattctgctggccggcgcgccagtgggcgtggtatccggcgtggcgttgggatggctgcatgtggcatggaaccgcaggatcggtgtggacggtcattggctggaaaccgtgccgatctggggattgcaggcggcgctggcattcggcgtagtggtaaccggactgctggtggcgtggctggtcacaaaaccaccgcgcaatctcacccgtcgttccctcgattgatcagtgacatacggcaacccttgccgtgtcattcgggagctataagacaaaaagtggcccacacattggtgtgggccactttagtagcgaaggctgaagtgtaatcagtcttcgagattgaggcctttgcgctcgggcaagcagagggctgctatgcaggcgaggatgaaggcggcggcgaagatgatgaaggccacggccttgttgccgccggacagggtcaggaaccacggcatgaggagcggcgcgatgatggcggcgatgcggcccaccgcggcggcggcaccggcggccgcgccacgcagtcgggtcgggtagatttccggggtcacggcgtacaacacgccccacgcaccgaggttggaggcggacagcagcatgccgaacacgagcacgagggccgctgatccagcctgcgagaacgcgaaggcggccacggcggagacggccaggaagatgctcagcgtcttgcggcggccccagacctccaccagccaggcggccaggaagtaaccgggcagctgggcgatggagatggcgagcgtgtagccgaatgacttggtcagggagccgaactggtcggcgagcagcgacggcatccatgtgaacgcgccgtagtaggagaagttcacgaagaaccacgtggcccagatggcgatggtgcgggccaggtacttggagccgaacagctcgcgcgtcttgatcttcggcagcggcttgcccttgggagaggttaccggggccactcccccggcttcctcgaagtagcgcacggccttttcggcttcgtcttcgcgacccttggcttcgaggaatcgcacggattctgggatgtgcacacgggtgacaatcgcgtagagcagtggcagcgcgccgatggccagcgcccagcgccagccccagtcaccggtgttcgggatcacgaagtagccgattatggcggcgatgatccagccgacggcccagaacgattccagcagcacggtcatgcggccgcgctgtttggtcggcgaaaactcggagaccagcgtggaggcgaccggtagttccgcgcccaagcccagtccgatgatcagtcgggcgccgagcagcatgccgagcgaccaggacagcgccatggcgccgttggcgatgccgaagatgatcagcgtggcggtgaacacggttttgcggcccacgcggtcggcgatgaagccgcccaccgccgcgccgatggccatgccgacgaagccgatggacagcacccacgacttttcggtcggggtgaggttgaagtgcgggtcggctgcgatggcggcgaccacgaaggaaacgaggccgacgtccatggcgtcgaatgcccagccgatgccggaggcgacgaggagtttacggtgcgccttgttgaagggcagccggtcgaggcgctcgttgcgggtgagctgcgcgggttgcgctggagtggtggtgctcacgtcgtttcctttctggtaagtggcgtcagatttagtgtcgggtcaggtcagtgtaggactcttcgatggccaagctgatgcgttcgacttgttcgcgggtcagcggcttgcggaaggtcatgcgtaatgccgatttggcgatggacggttcgaggcccatcgccagcaacgtggcaggaatctcgtggcgcccgatggcgcaggccgagccggatgaggcagcgatgccgcgcgcgtccaggtcgacgagcagcgcttccccggtgacgccggggaagatgaaggaggcgtgaccgggcagacggcgttcggggtcgccggtcaggtcggcgcgaggcgcgacccggcgaaccgcgtcgatgagcgtgtctcgggacgcgaccaactcacggcactgcacctgcatgcgcgcattcgattcgttgagtccgatggcaagcgccacggcgccggccacgttctgtgtgccggagcgcaggccgcgttcctgccctccgccggacagcaccggttcgatgggcgtgcggccgcgtaccagcagtgcgcccagacctttgggcgtgccgaacttgtgcccggatacggacagggcgtccacatcccagtcacgaaaacgaatcggaatctggccggcggcctgtacggcgtccacatggatgggcacgccgtgcgcgtgggcgatgcggaccagttcctccacgggttccacggtgccgacctcgttgttggccagcatggtggagaccagcgtggtacgttcgccggcctcgccgtcaagctcgcgttcgagcgcgtcaagatcgagatgcgcctgcgcatccacgggaatgcgcacgacttcgaagccgaaccattcgtgcagccatgccgccgattgggccacggccgggtgctcgatagcggaaatgataatgcgcgggcggctgcttgccagttgtttgccatcggtttcgtcgagtccgtagaccggccgcaggcccagtttgcgcatgcgcgccatggcgatgcctttgatggccagattgtccgattcggtgccgcctgaggtgaagatcacgtcatccggccgggcgcccaacgccgcggcgaatgatgcgcgggccgcgtccagcgcgcgggccgcggttttaccgggctggtgcacactggccggattggcgtaggcctcagtcaggaacggggtcatggcctcgatgactgccgggctcactggttcggtggcggcggcgtccaggtacagttcgccgggttcaccggatgcgttgggggtatcggccatgactagttccaatccaatccaaggtcgatgctgcgcaccgagtgggtgagcgcgcccacggagatcacgtccacgccggtggcggccacggctggcactcgctccaggctcatgttgccgctggcttccacgatggccttgccgtcgatgagctccacgccgcgacgggtgtcgtcgagcgagaaattgtccagcatgatggtgtccgctccgccggcgagcacggcgggaatctggtcaaggcggtcgacttccacttcgatatgcgtggtgtggcccacctgttcgcgcacgtggcggatcgcgccggccaggtcgatgccgcgcgcggcgagcgccgccagatggttgtccttcatcatgaccgcgtcggacagtccgtagcgatggttgtggccaccgccacagaccacggcgtatttctcgaacgggcgcaggccgggcgtggttttgcgcgtatcgacgatgcgggtgcgctcgtagcggcgtggccgggtgacgggtccgtcatagtcgtcgccgtagatggcgttcaccgcgtccacgaaggcggcggtcatggtggcgatgccgctcatgcgctgggtgaagttgagggcgatgcgctcggcggtgagcaggtcgcgtaccgggccttccacggtggcgagtacctggccacgctggaatcgttcgccgtccttgacggcggcggtgacggtgacggccgggttctgtgcggcgaaggctgcggcgaacacgtcgatgccgctcatcacaccgttttcgcgcgcggtgaggtgggccgagccggtttcgtccgcggggatggtggtctcgcaggtgatgtcgccgtagggcgcgtcttcggcgagcgccgcttcgacggcggtgcggatgatgtgtgatgtgagcatgggtcagtccttgatgtaggcgacggagtgggcccagttgtcgactggctcgctgtagtcggtgcgggcgtgggcgcctctcgactcggtgcgggcgagcgcggcgatggcggccacatagcctacggtgaggatgttgcggttctccaaagcctcaacgctgcttgcagcaccatcggcgtttacatcagcctgggcgtttgcggcggcgaggccttggccgagttcggcgatggcggttttcagtccggcctcgtcgcgcagcacgccgacgccatgccacatggtgttctggatgcgggtacggtcccacaccttgtcggcggcggtatcgtcagcagcagccgtagcggcaggagcggccaacgcgatcggcgcatggtcgaacacggcaccggtggcggagttcaggaacggttcgggtgcccagaccgcgtcgtcaccgtccgcgacggcggcaagaccggcgcggcgtccgtagacaagtccttcgagcagcgagttggaggcaaggcggttggagcccatgacaccggtacgagcgcattcgccggccgcgtacaggccggggatggaggtccgggcgtccagatcggtgcgaatgcctcccatgtagtagtgcgcggcgggcgccaccgggatcggctccttgctccagtcgaagccaagcgaacgcgtataggcatcgatggtcgggaatcggtgggccaggaagctggccaggtcggggttctcgcgggtcatcggcgagacgtcgagcatcacgggcttgccgccttgcgcctgcatcacgcggaagttctcgcgggccacgacgtcgcgcggtgcgagttcggcgcgcggatcgatgtccttcatgtaccggtggccgtgttcgtccagcagcaccgcgccttcgccgcgcacggcttcggagacgaggaagtgctcgcccacggccatggcggtgggatggaactggtagaactccagatcggcgacctgggcgcccgcacgccatgcggcggcgagaccgtccgcggtggcgaccggcggattggtggtgtacgggtacatacgacccgcgccaccggtggccaagatcacccggccggcggccagatccttgtcctgcccgtcgatcagcaggcggacgccggcgatgtggccgtcccgcacgatgagatctttgaggaaggcgttctcgatgatgtggatgcgcgggttcttgcgcaccatggcggagacgtccagttcaagcactttgccggtggcatctcccccggcatgcaccacgcgggcgcgcgaatgagccgcttccaggccgcgcagcatgtgtccctgcgcgtcgcggtcgaagtggacgccggccgcggcgaactcgcggacgcgctccgcaccctcacgggtgaggatgtccacggccttcgggtcgcacaggccatggcccgcggccatggtgtcggcggcgtgcagcttcgggtcgtcgtcggagaaaatggccgcggcgatgccgccctgcgcatgataggtgttcgattccaccagtccggccttggttaccaaggtcacgtcgtgtccggtgccggccacggccagtgccgcggacagtccggcgacgcctgcgcccacgacgacgatttcagtgttgctcattgtgttgctttcctctgtttttgcgtcatctgctcccctcagtccgctacgcggacagctcccctcatgtacgaggggcgccagggacggatcacgggtgaacgcgcagcatgcgctccagtgccaccttggcttcgcgggcggtgtcttcgtccacggtgatgcgattgaccacgttgccggcttcgaggttctccaaagcccaagccaggtaagccgggtggatgcggtacatcgtggagcacgggcagaccaccgggtccaggcagaacacggtcttgtccgggtactgcgcggccagacggttcaccaggttgatttcggtgcccacggcaatggcggatccggcgggtgcgttggcgatctccttgacgatgtacgcggtggagccagtaccgtcggcggcgtcgaccacctgcatcgagcactcggggtgcacgatcaccttgacgcccgggtatgccttacgggcacgttcgacctgttcgacggtgaagcgctggtgcacggagcagaagcccttccacagaatcatcttggcgcgggcgtaatcggccggatcggcggcgccgccctgtgccttgaacggatcccacagcggcatctcactcagcggaatgcccatcgcgcgggcggtattgcggcccagatgctggtccgggaagaacagcacgcgcttgccgcgggcgaacgcccattccagcacggcgtgcgcattggacgaggtgcatacgatgccgccgttgcgtccgcagaacgccttcagcgcggcggatgagttcatgtaggtgaccgggatgatctgctgcaagccatcggcgtccggctgggtgccgcagatctcgccgagctggtcccagcattcctggacctggtcgatgttggccatatcggccatcgagcagccggcggacaggttgggcagggtcacgctctgttcgggcgtggagaggatgtcggcggtttcggccatgaagtgcacgccgcagaacacgatgttgtcggcgtccgggcgttcggtggcgttcttggccagctggaaggagtcgcccacgaaatcggcgtgcttgatgatctcgtcacgctggtagaagtggcccagaatcaacagtttggagccgagacgctgcttggcgtcggagatgcgctgctgcagttcctcgtcggaggccttgcggtactcgtccggcagcacctgctggcgcggcgcgttggcgggcagacggtcgagcatcgaggcaccgggaccgtagctgggtgtggtggtgtcgaagtgccatgggtcctgggtcagtcctgcatcgcaggtgctttgcgcgcccagcttggcgatgatctcgtcaacggacggcgcagtggatagtgcggtcatagcggttcctttcctatatacgtctgtgatgccggcccgaagcgggtcggcgggaaaaatcagatgcgcgcggatggaatcagcgcgtcgagagcgtcttcacgctcgccttgtctggacagttccacgatgtcgtcgccatcggattcgtggggcgtgccattctcgacaggtcgtttggggatgtagcggtagacggtggccggtcgttggcggccttcgcgcaccttctccccggtgtcttcaagatctcccgaggcaagcattttgcggcggaagttcgccaagtcgagggtttcgccgccaatcgcctcatagacgccgtgcagttggcgcagggtgaacgtggggccgagcagtcgggtggccacgtcggagtattcgattttggagcgcaggcggagcagcgcgtagtcgatgatctggcgatggtcgaacgccagctcgggcagttcgtcttcggggaaccatcgtacgttgtcaccgtcctcgaagcccgcggcctcggtctggccgacgagcgcccagtacacgacggataccatgggcaatccgccatgggaccgggtcgggcctccaaaggtgtacagctgttcgaggtatcgcgggtgcaggtctgtggtcgattcgagggccgcgtaggcggactgttccaacgaccgatcggagcgcaggtcgccgccgggcaacgcccagcagcccaggaacggctgacggacgcgcttgaccaggggcagccagagacgggaatgggccgagttcgcggcgttgccggaatcggcggcactgttgccggtatcgcctttcgggccgagtgccagaatcaccactgacacgccgacctgtggcggtgcgctgcggcgctcggacacattgccgaatcccatgccatgcctctttccataccggttgttctccccgcattgagagcatagcactacttatagtcacaatgaccataaatcacatattggatggtctagcgcacgaatattggtcaggtagcgggccccaatcgctacgaaatcacgtccgtatcccccgatttcgactgtgtcatttcggcgacggacgggaggaacggcgctagggagggtagttcgtcgagactcttcaggcccatttggtcgaggaaggattcggaggtgaccaaaagggccgcgcgggattcggggtccacgccgtcttccttgataaggccgcgtaccgtgagcgagcgaatcacgccatcggagttgacaccgcggatcgcggccacttgggctcgggtgacgggctggcgataggccacgatggcaagcgcctccagtgcggcctgactgagtctcgcagtctggccgtcggtgacgaatgatgagacgaccggctcgaacgcggcgcgactggcgaactgccagccacgagcggtgcggcgtagttcgaagccgcgcgggcggatgccacgggattcatcgccctcatagtcatcgtgcagggcttgcaatgcctcttcgactgtgttgcggtccaatgccaaaatgcgggccagctcggtggcggtctgcggctggtcggcgaccatcagaatcgcttccagacatgcgggcagcccgccgggaaaatcgtctaccgtgaaatccacgtattcggggcgcgtctcctccactcccctcacctcggcctttgcggattcagccgtcgattcggcatccgccatgtgctcggttgcattcgttgcgtcaatccgttcagtcaccagtcgccgtccttacgcaaaatcgccttcggaaatgttcacgtcgttcatcgtttcgtctacgccggatacccacctcaggtgcagttcggcaaacggaccatcttgctgatactgcagcacaccttgtttgaagaacacgagcacggccatgaaccgagccaccacctcaatacgagaagtgcagtcccgggtcaattcgctgaacgacatcgactggtcgcccttggattccagtgctgcgatcagccggtcgcgcaccaccagcgattgggcccgcagatcgaccagcggcacgtgcagctggtggatcgatacttcggaggcgggcgcgttggcgatgacctgggcggccagttgggcgagttcgagcggggtcagcgtccataccagctcaggcaacatggcggcaatgccctcgtccatggccgccggatgcgggaatcggccggcattggcggcgatacgcgcccggaaatcaccggcggcctgcttgtaggcgcggtattggaggagtcgggcgaacagcaaatcgcgttcgcgcagcgcctcgagactttgctcgtcgtactggttgtcttcgccgccgggcagaatcgccacgcttttggcctcgaccagaatagaggcgatgtcgagaaaggcgctggcctcatccatgtttttcgtgaaatcgagcccgcgcacgtatgtcaggaattcctcggtgatcgaggagagggaaacttcggtcagctcgagtttgttgttggcgatcatgccgagcaaggcatcgaacggaccggaatagacctcgaggttgacccggaagccggaagtggcggattcctccgtgctgatttcggcttccgcggagctcccctcagtctcgctacgcgagccagcttccctcagagaggggagccgagaaagggaagtctcattcatcgtttatcgaaacaatcgttacgccacgatgccgcgagcaatgagctcacgtgccacctcacggtattcctttgatgtcttgtgctcaggtgcatagaccaccacgggcgcggcggcaaccgtggaatcgggcagtttgatggagcgggagatgaacgtgtggaacaccttttcgctgaacgcctcgtaaatgcgctggcagacctcttcgcagtgcagtgtcttggtgtacatggtgatgagcacgccatccacttccaatgcgggattgatgcgggactgcactttttcgatggactgcataagtagggccacgccacgcaaggcgaagaattcggcggccacgggaatgatcacgccatcagctgcggcaagcgcgttcacggtgagcaggccgagcgatggctggcagtcgacgatgatgagatcgtattccgacttgagcttgcgcagcacactgttcaggatctgctcccggcccacttctgtgaccagttggacctcggcggcggacaaatcgatgttcgccggaatcacatcgatgttctcgaatgcggtgtgctgcaccacatcatgtgggtccacggaaatatcgaacagcgcggtgtaaatcgtgttctccacggtattcgcgttgacgcccagtcccacagtggcggcgccctgcggatcgaaatcgacgataagcacgcggcggccatactgggccaacgcaccggcgatattgatggagctggtggtcttacctacgccgcccttctggttgcacatggcaatgacacgcgccggaccgtgctgttgcagcggttcgggtgcggggaaggtttcgtattcacgtccaagcaaatcggtaggcatactgtctaccttatcaacatccgggttcgctgggggtgcaacgacatacgttcccgccataggcagcgttccttgacggaatgcgctgtctttatcgcggatgtctcgccagtcgtccatcgttgccctcgccccctttgccgggaatacctgctcgcctatcctaatgtactcgccgggctcgcctcggaacaccgttttgcagcgggcattccagtgttccgaggtttatggatctcgtctcgtactatgtcgatgcgcttactcggtgcgcagtgcggtggccgggtcttgcttggctgccttgcgcgagggaatcaggccgccgatcagcgtgagcaccacgcttaggatcaccagcaccacgccgccggtcaccggcagggcggcattgacgtccgcattgccgatgaagtgatgcaacacggcgttgatcggaatatcgagcagcacggtcaagcccacgcccaacaggccggagcataggccgatgatgccggtctccgcattgaacacctgggacacgttgtgcttcgaggcacccattgcgcgtaggatgccgatttccttggtgcgctccagcaccgaaatgtaggtgatgatgccgatcatgatcgaggaaacaatcaacgagacggacacgaacgcgataagcacgtaggaaatcacgttgacgatggtggtcaccgagctcatcatgagccccacataatccgtgtaggtgatcttgtctttcttcgagacggtgttgttgtagtcggtaatcgcgtcggcgatgtggtccttgtcttcgaagctgtcggcgtagacgttgatcgagctgggcgcgtcacgactcaccacaccgaatgcggcgaggttgtcgtcgtaggtgccggtcgacacgtactggtcgtagatcgcgacaagcacgtcgttcgaagccgtggcgatatacgagtcgaaactgtcggcgagctgctgttcgctcatcgcggccatcgcgtcggcctgatcgcccgtaccggaccgctgcccggcactcatcatcgacttggccatgttcgccttctgcgtcacgcccagcgaaaccacgtaggtgcgcgcgtcggccgccttggtggcgtcgtccgagggcgagaacgtcatgccgttgagcacgttcgtgttcgggttggccttctgatcggtgacgatggcgctggaggccgcacggtcgatcagatcattggtcagagcgcgcgtgtatcccacgccagcggccaacggtgtggccgaagcatccttcttcgccttgacgacgcccaccaccttgagtttggtggccgtttcgaggcgctgctcgattacatccttgtcgttgccgatgaatcggtagtggccgtcatcgcccttgacgtactggtcggatgccggaatcatgtacagcgtctggtcgagcgccttagcatagtcgatcttgtcttgtggagtgctgaccttgtcgccggcgttgagcttggacatcatctcgtggtagtcggaggcgggcagcaggccgagctcgtacagcgtggtcagcggcacgctgttgttgtcgtcgagcaccagcaccacctcgtccttggacttcggccatgaaccgttgaccacttggtagttgtcggtgatgaccttgcctacgagcttgctgtcgtccgctccaggcatgatctcattgaacgagtcgggcgcggcgttctcatcggttttgccggtcagcatcgacatctgctgcgaggtgatcgacgaggtgccggacatgccggacgagcttgtggacgccatctgcgaggccattgaagtggagtcgctggcaccgatcgtcacgccgtccgcattgaccagcgtgccatcggggtcgtggtcgaacacggagaatttcacgtcatacgtgtactggataccggcggaacccacatactggtgaatctcgctcttggaattatccaggtatttcttgaagcgggtcaggttgttttcggtaatcgaactggtcaggctggatgcctgcttgacgctgcggtcgtccgggtagatgccgtcggttctgtgcgtcttgccgccgtatccgtcatcgccgcccatctggccgcccatcatgctgctcaggtcgaaggtctgggagtcgatggtgatcgggtaggcggtcatcgtgtcacgctggatgtcgctgatgtatgcgttcacgccagtcgacaccgatagaatcagcgcaatgccgatgatgccgattgagccggcgaacgaggtcagcagggtacgcgccttcttggttttcagattgttgaagctcaacgccagcgacgtgacgaacgacatcgacgcgcggcccatcgtcttgtgcacggccggctgttcggccgtctcatccacgacaaacgggtcggagtcggagcgaatcacgccgtcgcgcaggttgacgatgcgcgtggcatattgttccgcaagttcggggttgtgggtgaccatgaccacgaggcggtccttggccacgtccttgagcaggttcatgatctgcacggacgtgtccgaatcgagcgcgccggtcggctcgtcggccaggacgatgtccgggtcgttgaccagtgcgcgggcgatcgccacgcgctgcatctggccgccggacagctggttcggctttttattgatgtgttcgccgagtccgaccttctccagcgccttgcgcgcacgttcgcgacggtcggccttgccgatgccggaaatcgtcagcgcgagttcgacgttcgacagaatcgtctgatgaggaatcagattgtagctctggaacacgaagccgatggtgtggttgcggtacgaatcccaatcgcgatccttgtattggcgcgtcgagatgccgttgatcaccaaatcgccgtcgtcataccggtcgaggccgccgatgatgttgagcaaggtggtcttgccggaacccgagggacccagaatcgcgacgaattcgctgtcgcgtaggttcaggctgactttgtcaagcgcctgttgaacgaaatcaccggttttatagcgcttcgagatcgatttgatctgcagcatgaatacctcttcctggctgacggttcgctgttatgtactgtattgtcacgccttgaatttccggccgactttggtgctcccccccgccgcgattccgctatgggcgggcgcgtcgcaaaatggtgtgtctcaccgcgctctggggtgtgaggtcagatacgtttcgatcagggtttcggggcttacgtgcgtgtagatctgcgtggtggtcacgctggcgtgcccaagcagttcctgcacggtgcgcacgtccgcgccgccttgaatcaggtgcgtggcgaaggaatggcgcaaggtgtgcggatggagtggtttggtgatgccggcccgctccccggttgctttgacgatttcccataccgattgccgcgagatgcgcttgccgcgtttgttgagaaacaatgcgcgtctctcgggaatcttggcgctggagcgccgttccagctcgccacgccccgcattgaggtatgcggtgatggcccggcatgcgtagctgcccaatggcacaagccgctgcttggagcccttgcccatgagtcgcgcgatgtgctcgtccaggtcgatgtcgtccagattcacaccggtggcttccgagacgcggcagccggtggcgtacatgaattcgagcagggccttgtcccgcaataccaccggatcggttgagccgccggctgccgccgcgtcgagcagacgggttacctcatccacggtgagtacgtcaggcagggtgctggcacctttgggtgccttgactgcggcagaaacgtcggcagtcaccgcgtgctggccgagcgcgaagcgatggaattcatggatcgaggccagtcttcgggctttggagcgggcggactcccccgcctggtcaagggcggcgatgtagtcttcgacgtcttgtttggttatggcgtccggttcgtggatgccgcgggtttcgagccaatcaatgtatttggcgatatcggattcgtaggcggtgacggtggccgtggcgagtcctcgctccacgccgatgtggacgaggaactgctctgtgagtttggtgaatccgttggtcatgtgtttgttctcttccccacccgctgcgcgggagcccccctcgtcagaggggggctaataataggaaaccccgctcggaagcggggtttctagtgtgaagtcacgacttcaagcaatcaggcctcaaccggagcgttgacgtcctcaggcagggcggccttggcggcgtccacgatggtcttgaaggtgttcgggtcggagacggcgatctcagccagagcgcgacgatccagctcgatgccggcgagacgcaggccctggatgaagcggttgtaggtgatgccctcagcgcggacggcagcgttgatgcgctggatccacagcttacggaaatcacccttgcgagccttgcggtcgcggaagttgtagttaaaggagtgcagcagctgttccttggccttgcggtacaggcgggagcgctggccacggtagccggaagccctctcgagaacaacgcgacgcttcttgtgggcgttcactgcgcgcttgacacgtgccataatctattcctcagctttctaaagtcttattatttccgggtaagccctatgctcacttctgcagaagctggtgcagcttcttggcctggccgccgcgcagcacatcgtcggcggacagttcacgacgcttgcgagcggacttgtgctcgaggttgtgacgcatggcggaaccgacatgcttcaccttgccggtgccggtgatcttggcgcgcttggaagcggcggaattagttttcatcttcggcattgctgccctccttgctggtttgcttcttgtcggaagtcttctgagaaatcgcggactgcgcgtcggccgcggcctgagcctgagactcctgcttggccgcgagacgagccgcctggcgagcctgacgctcggcgcgggactcggcgccacgacgacgctgctcggactgggtgtggaccttcttgcccttcggcgcaagggtcatgatgatgttgcggccctcctgcttcggcttggactcgacggtgccgtattcctcgacatcgtcggccagacgctgcagcagttccacgccaccaatcgggcgggagatctcacgaccgcgcaacatgatggtgaccttgaccttgtcgcctccgttaaggaagcgggtcacatggcccttcttcacgtcgaaatcgtggtcgtcgatcttcaggcggaaacgaatctccttgatttccgcggtgctctggttgcggcgagcttcacgagccttgatcttctcgttgtacttgaacttgccgtaatcaatgagcttggcgaccggaggcttcgcgttcggggccacctcgacgagatcgaggtttgcctccttggccaggttcagcgcgacggaagtcgcgatgacgcccacctgctcgcccttcgggccgatcaggcgtacctgcgggacgcgaatctcgtcgttaatacgtggttcgtcgctgatgatgactccaatcctctacttcaattccgtggcggggcctttgctggagtcctgttcaatgctttgggttcatggcaagccaaaaccagcgccaatatgcgctcagcttctgcagacgcatatcagttctttgcgtcattcctgattgcgcgttgtatatcgcaatcgctaggctgtttgccttgaacccgaggccttgaaaggcttccaggtggggttgccccgctttcttgatttctcaagccaaataggaatcttaccacatgcccggacattcgcggaccgtgtgtcgatgggtggataccggctacagtaggcataatgactcaggtatgcgtgatttttggtgcgggcgaatactatgcgggcacgcccgtggttcccaccggtgcgtatgtgattgcggccgatggcggactcgaccatacgcgcgagttgggcatcgtgcccgatgtggtggtgggcgacttcgattcgctggagggccggccgccccgcaccgatgtgcgcaccatcgcgctgcccgcgttgaaggacgacccggacatgctttccgcgctgaaggtcggctggtcggcgggttgccgcgagtttcacgtgtacggcgggcttggcggccgtattgaccatacgatttccggcattcaactgatggcgctgctggcccgacacggggcaagcgggtatctgtatggcgacgggctcatcgtcacggccatcaccgatggcaggctttcgttccccgcgcatccggtgcccgaggacggccgcatggtgtcggcgttctcccactccgatgtttcgcttggcgtgaacgaaccggggctgaaatatgagctcaagaacgacacgctgaccaatacggtggtgcagggggtcagcaacgagttccgcgacggcgtggacgcggccatcagcgtgaaacgcggcacactgatcgtcaccttccccatcgaagtggcgttgccacaggtgagcagattccatgaattcggcggcgatatcggcgagctggacaccgaagtgtccaagctgctggttcgctgacttgcatgccgcgcgcttgctcgtgatgattcgagacattcctccaaaggagaggaaaatcacatgtcggttgcgggcaatccaaattgtgagcgctcacaaaaaatacggcatttttacccaaaacgcacgctgaaacgttgccatgtgtacagagtcggcattacagtagcaactgttggtaaacaatggcccggtgtgccaaagcgcgccaaggccaccctacaagggagaattacatgacagttaagattggtatcaacggcttcggtcgcattggtcgtctcgccttccgtcgcatcttcgagctgcaggctcgcggcggccaggctggtgacattgaagttgccgccatcaacgatctgaccaccccggctaccctggcttacctgctgaagtacgacagcacccacggcaccttccgtcatgacgatggcactccggttgacgtcaaggccaccgaagactccatcatcgtcgacggcaaggaatacaaggtctacgccgagaaggacgccaacaacattccgtgggtcaagaacgacggtgtcgagtacgtgctcgagtgcaccggcttctacacctccgccgagaagtcccaggctcacatcaacgctggcgccaagaaggtcctgatctccgccccggccaaggatgacaccaccccgaccgttgtgttcggcgtgaaccacgacatcctcaaggcttccgacgtgatcgtctccgccggttcctgcaccaccaactccatggccgccatggtcaagctgctggacgagaagttcggcatcaaggccggcttcatgaccaccatccacgcctacaccggcacccagatgctgctcgatggcccgcgtggcaccaagaccggccgcaacctgcgcgccgccgccatcaacaccatcgcccactccaccggcgctgccaaggccatcggcaaggtcgttccgtccgtgaacggcaagctgcagggccacgcccagcgcgtccaggttccggacggctccgtcaccgagctgaccaccgttctgaacaccgagaccaccgccgacgagatcaacgaagccttcaaggctgccttctccgacaccgattactacggctacaacgatgagggcatcgtctcctccgacatcctcggcgacacccacggtggcgtgttcgacccgacccagaccgacgtcaacaccattgacggcgtgaccctggctcgcaccgtgtccttctacgacaacgagtacggcttcacctccaacatgatccgtaccctgctgtacttcgctgagatctccgagtgaaccactgcggtctaggccgctacggttcgtttgagaactaagctgtgagacccccgccttgtgcgggggtctcttcgtagtagaacggtaatcatggcaaagaaaagcaagcatgataagggcgcgggttccaccccggcgacagtccaactggagaaggcgggcgtggaattccacgtatacgaatacgagcactccaacgaccatatggatgacggctacggcgtggaggcggccaccaagctcggcttcgacgagcatcaggtgttcaagacgttgatggcggacaccggttcggagcgtgtggtgggcgtggtaccggtcagcggacatatggatttgaaggccctggctgcggctgtaggtgccaagaaggcctctatggccgatcccaaggtggcaatgcgtgaatccggctatgtggtaggtggcatctcgccgttgggccagaagacacgtcataagactgtgttggatgaaagcgccctgcaattcgaccagattctggtctccggcggcaaacgcggactgtccgtaggcgtgaacccgcaggacctgctcaaggtcttgaacgccgttgccgcaccaatcggcacgtggtgaccgttcttggctcccctctgtgaggggagccaaggatgactacttcttcctgcgcaactccgacggcagcacgaagtgcatgttttccttgatggtttcgacggacttcataccggtgaagcccaagttttgcagagcgtcaatcacaccggacaccagttcgtccggcacggaggcacctgaggagatacctacggattccagaccctcgaaccatgccgggtcaagctcgctggcatcatccacgcgatacgctttgccgcgctctcccaagccctcctgcgccacctccatcagtcgcacggaattcgaggagttggccgatccgacaatcaccacgcaatcggactgctgggccaccagtttgaccgcagcctgacgattcgacgtggcatagcagatatccgaactcggcggctcttgaatccacgggaacttggccttcagcgcggcaatggtgccggcggtctcatccacgctcaacgtggtctgcgagagcagcaccagcttgttgtcgggcgcaaaatccaacgaatcgacatccgattcatgctcgatcaagtgcacatgttcggggttctcccccaccacgccgactgcttcatcgtggcccttgtgcccgatatagacgatttcatacccctcgcgcacgaaacgcagcacctcacggtgcaccttacccaccagagggcaggtggcatccaccacatgcatgccacgacgttcggcttccgccttcactaccggagatacgccatgggcggaaaacaccaccggaatacccgcttgggcagcagcatccggaatctccgccaattcctggacgaacaccgcgccttgcccggccaagtcctcgaccacatgcttgttgtgcacgatctgccggcgcacatataccgggggcagcccatcctcgcgcgtcagctttccggaagcctccgcggctttgagaatggtctgtacggtaagaatcgcacggtccacacccgcgcagaagcctcgcggatcagcgagcacaacgcttttggtcatcggaacctcctgaacgtcaatagtgttttccagtgtaaagcagggattacaggaatctgccgtcacaacttttccgcgtctcccacgaatcaccggtttccaaggaatccacgtgcttctcgcatgatggtgtgagactcgtcactccacgtattgctaccgtgtctgtacgaattgtttattatatgccggctatcgccaatccccgcctcgatagaggagacgcgctagactggggccagcgatagcaggagctaccggcccaccaacctcactacgggagtgattccatgacgagtaaaacaccacgcaccggaaatcagtattcgattcactatggcgattattccgccgtcatctgcgaactcggcgccaagattcgccgattcgattatcaaggcaaggaaattttctgcccgttcggagtcaacgacctgacccccacctgtaacggctatgtgctggccccgtggccaaaccgcatcgaaaacggcgaatacgatttcaatggcaagcattactgcgcgccggtcaacgaatatcatcccgcaccgcgcaacaacgcgaaccacggatacgcctaccactacatgtggaagcttgaatcgttgaccgatagcgccgtgacgctttcactgcgcttccccaacctggacggatacccgttcgatgtgaccgtgaccgtcacatacgaactcggcgacaacggcatgaccgtgaccgtcaatgcccgcaatgatggcgacgagccggcaccgtgggctctcggcctgcatccgtggctggccaacggcaagcagggcgcgacttccgccgagcgtgacgccgactccgccgcctgccacctgcagatcaaggccgccagtcatgtgacggtgaacgaggcgctgattcccaccggcaccgaaccggttaccggcatctacgacctgaacgatggcccgacgctcgaaggccgcgcctttgatgatgcctgggtcgacgtggagcgtgccgccgatggtacgaccaccaccacattcacccgcccggacggtattgaagtgaagctcattggcgatgagacgatcaatgcttggcagtgctacaccgccactggcgcgccgttcgccgagcatccgtatggtatcgccgtcgaaccgatgaccgccccggccaatgccttccgcactggtgaccacttggtgacgctcgcccccaatggcgactacaccactgtggtccgctacgaagtagtccagaagtagttctgttacgctggctcccctccagaggggagccaattttttatccttatgtgccgccgcgtcttgggacttgtgcgatacgattgtgagcggtaacaatctgtttcacaaaggagtgtgcactatggctttgaagcctcgcactggcaaccaatatgtcatctcgtccggcgaatggagtgccgtcgtcaccgaactgggtgccagcctgcgcgagctgaagtggcgcggcgaagacctcatcgtccccttcgacccgaacaaggtcatcccctgctgcaacggctgggtgctggcaccgtacccgaaccgcgtgaccaatggtcagtattctttcgatggcgaagactaccagatgccgatcgacgagttcgaccgccaatcctccctgcacggctacgcctaccgctacatgtgggagctcgttgatttgcaggaatcacatgtgacgctctcctggcgctcccccgacatcgccggctacccgtttgatatcaccatcaccgccacttatgcacttgacgagaacggtctcacggaaaccttcaccgtgcacaacaacgacagcgtgaaggccccatgggcatttggcatccacccgtggctggccaacggcaagcacgccaccggtcaggccattaccgccgacaacgagtcctgccgtcttgagctgcactgcgatacccacgtgaccgtagacgaacacctgctacccaccggcgaagagccggtttccggcatcttcgacctgcgcgataaccccacgctggagggacgtggcttcgacgatgcctggaccgatatcaccaaccgcggcgaagacggcagcacttccgccgcgttcacccgccccgacggcatcaaggtcacgctgaccggcgacaagaccatcaactcctggcaggtgtgcaccggcaacgaaatcggcgggaaggctcgtcaggccggcgtggccgtcgaaccgatgaccgcctacgccgacgccttccgcaccggcaaggatctggttgtgctcgagccgggcgatgactacaccaccgtggtcaccttccacgccgaacaaatctgaaaaaccgaataaccaagcctgacgatcatcgccacatggacacccgtgttgcatcacgtcgtacttatgtggcataattccgaaggcttatttttttactgcagcaaaggagtccatcatgggcatgcgcggacgtaagcgcaaggatcgtcgtaagaaggccgccaaccacggcaagcgtcctaacgcctgattcttcgcgtttcttatagaacgctcaaggcccgtctgatgatacatcagacgggccttgttgtatatgtcgttacttatcttcgccgcagcagtgatcaagcgtggccttgagccgggccatcagacattcgggcgccacatccgggcgcaagtaggcacgcaacgcggcaatcaacgcctgttcacgctcgtcgcagcaggtacgggggtcaaaacagtcgccctccgtaacgatatgcacgtctgtctggaccgacgcagcggccgagccggtatctactgaacgatgatgcaccgccgtgatatgcacttcggtctggcttaccgtgccatcggccgccgtacgggttatggagatatggcgagtacgctctaccggctgatcgttcatcagatctcctttcccgaaagcttgcttgactgttgtggcgtgtgggcgtgagtcgcatgactatgtctcactacggcttgcgtgtcgccattgctgccaacagtttgttcactactttcattatggccggaatcggcgattcgaccaacgttttcgctcaacttcgcggatggtgaaccagccgacgaaccagtcgcatacccgcgctctttcgcatacgaggcgagctcacgcttgagttgcgtgcgggcgcgattcaggcggctcatcaccgtgccgattttcacgccctgctcatcggccacctgttggtaggacttgccgtcgatggcggcgtcgatgaacacctgccggcgttccggcgagagtttggcgagcgcggccatgatttcctcgggcgcgaaggcgtccaaatattcctcttcagcggacttgagcccgtccgacgtatgttcggcggcatcgtaaatgtcccaatcgtcgtattcgccggtggagtcgttggcacgctgcgggcgccgcttggccttggcatactggttgaagtaggcattgcgctcgatggtggtcatccacgcctcgaagttggagcccggctggaatgagtcgaaggccttgaacccgcgttcgaaggtgtcctggaccagatcctgcgcgtcatcgggattgttggtcagcctcatcgcctgccggtacagtgcattgacggcgggcatggcgagctgctcgaatctggcgcgcttggctgccatggactcgcccgatccggctgactgcccggattgcgtagttgcttcgcttgtcgtcacggttcaccattctaatcaaatcatgtgcccatatcgtggtcgatgacgtgtgagccacaacacgctacaccccacctgtagaatggcgtatcggctagataatagggagtaacaattatggctttgactttggcttcggccgctgacctgctcaaggaacaccatctgctgcgtgaaatcatccaaggggatgtctggaccgacgacccggcccgtatcgcttcggcggatgaaccgttcgccggcatcacctacgacacccgcaaggtcacgccgggcaccctgctgtgctgcaagggccgattcaaggccgagtatctgaacggcatcgacgaagccggcctggccgcatacgtggccgaaaccgagtactcagccgcaaccgccacccccggcctgatcgtcaacgacgcacgcaaggcgatgagcctgctgtccaccgcgttctacggatatccgcagaacgagctcacggtcatcggcgtcaccggcaccaagggcaagacgaccacctcgtacttcacgcaggcgcttatcaacgccgtctccggcggcaaggccgcattgttctcctcggtcgataattgccttgacggccacacctacgtcgaatccgatctgaccacgcccgaatcgatggacgccttccgcatgatgcgcgaggcggccgataacggcatgaagtatctggtgatggaggtctcctcccaggcgtacaaggtggaccgcgtctacggactgactttcgatgtggccgcgttcctcaacatctcccccgaccacatcagcccgatcgaacaccccacgttcgaggattacctgtattgcaagcgccagatcatcgtcaacgcgaagtcgctggtactcggcgcggacagtctgcacgccgatctgttgcgggaggacgcggaggcagccggcatcggcgcaaccaccttcgccctgcatgacgcggataatgccggcaccagtgcggacgtcgtcgcctggcccgccgacccggagcacgcctccttccacatcgccgacggagatcaggcccttggcgactaccatctgtccatcgatggcgacttcaactacctcaatgcggcggcggccatcgccatcgcccatgcggctggcgtatcgctcgatgacgccgacgcactgcacgccatcgaatccgtacgtatcgccggccgtatggaacagttccgcgatccgcagtcgaacacgctcgccatcgtcgattatgcgcacaactacgcatccgtcaccgcgctgcttgacttcgtctacgagcgttggggcgaggaaaacccgcgtatcacgctggtgaccggatcggccggcaacaaggcctacgatcgtcgtaaggaaatcgtcgaggctgccgagaaccgtatcgcgaacttcattttcaccgccgaagatacggacaccgagccgttcatcgacatctgcatggaaatgcaaggctacatcacgaacaaggatgtggcctccacggtgatttccgaccgtccgacggccatcaccaacgccatttacgatgcccgtgcgcacgccgaccgattcaacatcctgctgatcatcggcaagggcaacgagcgttggatcaaggaccatcacaagcatgtgccgttcgacggcgacgatcacgtcgtcgaacgcatgtttggcttgtgacgggattccggccaatcagatcctgatcggattccgattggcccacatcagatcacgcgcaatacgaccaaaccagaaacacgacatacggatacgaacgaaaaaggatagctgaatcgtaatgatcacgttggagaaagttgacggagccacactggaagccgaagccgagaaggccggcatcacgttgcctatcgaacagaccaaggtttggtctggttttcaggcggatatcgacggacgcacaccatggggcgattatctgatcaagcgtgatggtgaattggtcgccgtgatctcctttatcgattttgagacgcacggttatcattatctgcgctcgatgcatgggccggcgtgggtcgccaagcccaccgaggctgaggagcgcgaggtcgtcgacgccatcgtggacaacgtcaagaaggccgacaagaacatcgcgttcctgcgtatcgacacctggttcgccgatggtacggagaaggtgctgtccacagtgccgtacgaccagaccgtggtcatcgacgtcaccggtggcgatgatgagattctggctcggatgaagcgtcgtggacgccgtgacgtgcgcaagtctctacgtgagtgcccggccgaggttgccgatgagacggataaggcgctggccgatttctccgaatattacgatgtgatggtcgagaccggccagcgcgatggattcacgcctgctccgatgagcgactactccgatatgatcggcgcgttaggtgccgatcattgccgtgtgttcgccgcacgtattgaagaccgtgtggtggcatggtcgattgtcaccgtgaacggcacgcatgcggtgcgctactatgccggcatgcgcaacgaggttatgcgtctgcatgtgaccgacaagctgctgtattccgaatgctgcatcctaggctcgcagggtattactgaatacgatctcatgggcattggctccgatttcgcgccgtctctcaagggccttaacgagttcaagtgcaagttcaccgaggaaatcaccccggtggcccccgcccgcgacgtacccatcaagaaggtcttctacaagacgctgcagactgtacagggcgtgcgcaaggcattgcgctaataccgccccgcttccgctggcgggagctgtcgaacgaagcgagactgagggcgatctttcgatatggaccgccctctgtcacctgtggtaccagttcctgccagcgggaaccattcgtttatcgttcgagtttttgactcaccacggctgttacgccatcggctctcatggttacgccgtaaagcgcgttggcaatcgacatggtgcgttgctggtgcgtaatgatgatgagctgcgcatgggcgcgtagctcattgaacgcattaatcaaacgggtcaggttcacgtcgtccaacgcggcctcgacctcgtccatcacatagaacgggctggggcgggcggtgaaaatcgcgaacagcagcgccagcgcggtcagcgaacgttcgccgccggacaggaggctcagctgtttgacgcgcttgccggccgggctggcctcgaccagtacgccggtggtgagcatgtcttccgggttttccaggcgcagtcgtccggtgccgcctgggaacagcgtggcgaacatctgctcgaatgcctcggcggtatcgtcgaacgcggatttgaacacctggaccatcgtggaatcgagatccttgatgagctgcatcaaatcgtcacgtgatttgaccacatcgttgcgctgatcattgagatacttgttccgctcctcaagcgcttcgaattcctcggtggccaaagggttgatcttaccgagtgcggccagatcgcggcgagccttatcgagacgcttcttctgctcctgacggttatacggcacggtcttaaagagggcggaatcgccgttggtgccggtctctcccccggtttctccctcttcggtcccagcctcagcttccgtctcatccaacggcacagggttgccctcatcatccagcacgggcaccggctgttcggggccgtaaccactaaccaattcctccaaagtgagaccgagttcgtcggacactttttgcatgagctgcccggattcggcggccaaccgttcgcggtttacatccaaggcatgttcgcgcccggtcagatcggtgaccttgggctcgatctggttgcgctgcgcgcgcagggccttgagttcctcgtcatggctggaggcggcggcctgcagctcgtctcgtttggcggccacgtcatgcagcgtatgttccaccatggcggccactgctcgcgcgtcatcggccacgccttgcaggtgtgcggcctgctcgcgtctgcgatcgttcaacgcctcgatgcgggcgcggcgttcggcggcttctctggcgttgtcccgcagcagcccggcctgtcggctcagtgactcccctttgcggcttgcttcggtccacgcgattttcgcggcgacctcatgctcgcgagtcaggttcagtccgcgctccagcgtgcgttcacgttcatcaagttcgtcgaaatcggcatgttccgctgtggattgccgggccgatgccaaagcgcgattgagatcgtcgagcttgcgctgatgctcgttgcgattctcttgggtctcggtgattttcctatccagctgctcaagctgacgggtgaacgatgcgatgcgatccgtggcggatttcagagatttctccgcctgttgggctttgagccgggcttcggtgcgtttggcggattcctggtcgacgagtcgggccgcttcatcgcgtttggctttggcctcggccacttgctcagccattccgccgtcttgggcggccaactgtttgacctgtgccaatgctttgtctcgacgggcggccagagacaggtccgattgagagatggaagagccgccgaccgccgccacgccgtgtgtgaaggtctcgccgttcttggtgacggcccgcatggcttcgccggatgccacgatgtgctgtgcttcgtcggcggtgccggccatggctacatcagccagcaggagacgcacggtgtgcacgacagcttcggcctgtgccgggttctttgcatccgggttcgcggtgacgagtgctgccagcgcgttgcccgattgcggggcggccgccgtgttctcggcgctactctcctccgactccgtgcctggctctgtggcgggatcgccggcaatgctcgcggtcagcaccacggctttgccgagcttatcttcccgagcgcgttcgagggcgtgcaacatgttgcctgcctcgggtaccacgatggcgctggcatactggtcgagcgcgtgggccacggcttcttcccagccttcggccacatggatgaagtcggtgagtcggccaagcgaggccacgtccgtgtcgcgttccaatgatccggaggcattgcggctgcctagcatgtcggcaagcgcatcggccttggatttgagcgagatgatcttggactgtatctcgcgctgcttatcggcgagttcgttcagtcgttcgcggcattcggcgagcgttgcacgcgcggcgtccaatgcggcaccatcatcgtcggcaatggagtctgcttcgctgcgcaatgcgtccagctgttgctgggcatcgtcgcgctgggaagtcagcaagtcgcgttgggaggcataatccttggcgcggctggtcgccagttgcacggcggattcctcgcgggcgatgagttcgcgcagtcgggcgatctgcgcatcgcgctcctgtgcggttttgcgcagttcagtcaatgtctggcggactgaggcaagcttcttctcgtcgtcggcgcgttcctcggtggccttgtcgagtgcgatgcgtgcatcggccacggccttggtttgtgccgcggcctgagactccagttcctcggctcgtttgacgagcatgccgggatcctcaccgaagttggtgacgatctggccggtgagtgaccggctgcgctcttcggccaactgggcgagcgcgttcagtcgttcacgggtctgtgagaattcatgccagtattggttggccttggcgatggccggactggattcagagctcaacgcctcgacctgttcgatgcgtactttgacttgggcgagttcacgctgggcgacggccagctggttgcgcacatcgccaagctcttgacgtaccgtgtcgcggcggttcatcgagcgttgggcgtcttcggcatacaggcgtgcttgggcgtcgcgtacggatatctgaatcgcgtcggcgcgccgggagatgcgtgcctggcgtccgagggggccgagctggcggtgaatctcccccagcaaatcgtcaagtcgactcaggttcgtttcggtattggccaacttgcgcaacgcgcgttccttgcgcttgcggtgcttcaggatgccggcggcctcttcgatgaacgcacggtgaccggacgggtcggccttcagaatcgcatccaatcgtccctgacccacaatcacgtgcatctgctggccaagaccggtatcggagaggagttcctgaatgtcgagcagacggcattgcgagccgttgatcgcgtattcggagcctccgttgcggaagatggtgcgggatatggtgacttccgtgtaatcgatatcgagcgtgtgatcggaattatcgatggtcaggctcacctgtgcacggcccaatggcgggcgggaggacgtgcctgcgaaaatcacgtcctccatcgaagtgccgcgaaggtttttggcaccttgctcacccatcacccaggtcagggcgtcgacgatgttcgacttgcccgaaccgttggggccgacgaccgccgtgatgccgggctcgaagcgcagcgtggtggcggaggcgaaggatttgaatccgcggagggtgagttccttgagatacatggcgtgagactgttttccgtatgtcgggcgtccgggtatccgatgtgccttggatgcgggttaccggacgtcggcggaatcgtcggtgcctgtgtcggcactggccgtgccggtgccggcgttaccggcgtcactggcctgttccttgccgaggccgaggacgtcgaacacgtcgaagtcgtccgggctcaccgaatcctcgaggttgtcggcggcctcatcctcggccttgtctgccggccgatccgaatcgtccgggtcgaccgccggctgatggacggccatggcctgcctcatcgtggggctggcatgctcctcaagcatcaggcgtgcgtcgccggcggtgacgaagctgccgcagataagcacgccgtggccgtagcccacgcccagctcgtcctcggcatcgaccatgttgacggcagtctgaatcgcgtcgggcaggttcgcttccttgatcacacggtcacggccgaacacgtccacggcaatcttctcgagctcatcggccggcatcacacgctcgcgccacgagttctcggtgaccaccacggagctcaggatcggctccagaacacccagatattcctcgacctgcttgtcgcgcatcatggcgaccacgccgaccagttgcttgaagtcgtagctttcctctatggccttgcgtagggcttcggcggcattcacgttgtgtccgccatccagaatgatggtcggtgaggtgcggatctgttcgatgcgtccgggaatcttgaccgagctcaacgcctcgcccaccaagtcgccgtccagcgggccattgaccggaatcaccacttcggcggcgacgagcgcggcaagtgcgttatgggcctgatgctcgccgaacttggcaatcggcacgccctcgtaagtgccgttgggcgtggtcagggtggcgacctggccgccgactgcggccatgcggtcggacacggtcatttcgtagccgtcgcgcacgagcatggcgtggttgcgttcggcggcttcggtgagaatcggcatgacggcttcctcatgcggctgcgggccgatgatggcggtgcagttcggcttgatgatgccggccttctcggtggcgatctgttcgacggtgtcgcccagccactgcatgtggtccatgtccaccggaccgatgatggccgcatccgcgttgagcacgttggtggcgtcccacaggcctcccatgccgacctcgacgatggccacgtccacgggcgtgtcggcgaacttccagatggccatggcggtgagcacctcgaagaagctcatcttcggcttgccttgctcctccatcttggcgtccaccagggccacgagatccttggtctggtcccagatgtcgatgaaatcgtcgtcggacagctgctggccgtcgatggcgatacgctcgttgatcttctccagatgcggcgacgtgtacaggccggtgcgcatgccgtaggcgcggcagatggcctcggccatgcgtgcggtggagcctttgccgttggtaccggtgatatgaatcacgcggaacgactgctccgggtggcccaggatgtcgagcatcaggttcatccggtcgagatccagattggtggtgttatgctccggcgggcggctcatgatgtccagttcgacgtcccgcatgctctcgttgttccgattcggatgctcgaatgacatatcctcttctgacctctgctcgtgttgctgttgaaccgttcggagtgcgtatgccacttacgtgttcgtgccattctcgtcatgtctacgcatgcccgcatatattccgcttccgcatgcgcaggaagctcccctcgcacaggtttgccctgcatggttcgggattcttgccttcacgcgtggagccgcactccctcaattccctctatcctagccgccggggtggtttatcgtgcgcgcacagtgaaaccgtctcatatgtcgccgccgcgcgggcggccttttcctgcagcgcgcacagtgaagccatctcatatagttgcaatgcggctcttgccgtcggcatcccattcttagtcggctgcaatccaaaacttgtatgtccggcgacgctgatgctattcagcgtcggtacagtgccagcttctggcggtacaccgacgctatgatgctcttgcgagtcggtagctggccaaaacctggattaatcccgactccatcgcctctcagtgtcgtctcctcgccaaggcatgccattctgccgtcgttgagaaatttcaacgtcgtcaatcgaccatgtcttgccccggaaacgactctcacaaacgtccgctacatcatcttttgaactcgcagaggctcattcactgttatgactgctctcaccgtcggcagccgtccaagccctggatctatgccgccaataaattgcagcaaatcgtcggccacgatacaaccattggactcacgccgacgctagattccacactcagacagaagccagccaatatctgaaccagcaccgacggcgtacaaagcataagcaccgttaaccgtcaattcgccgccctctaccagctacatccgtcttcgccgatgatatcttgttcgaatccccaaagcacgttgttcgaatgacattactgatggtggataagttttgtatgttatccactattccgaattagcggcctaataccttgaaattatcgggaatatctcactccaagacagccaagctccgaggctagaaccacaatggctgaaattcatacttacgctgcttcgttccggctacgctcgacgtcatgaagacacacaaagcagtggcctcgctcatatcagccgcgcagaatgagctgagatgcgtctattcaagaaatgaagcggaacagaccgctctacgccgccgtgcccagagtggcgagttgttgaaagtgtatgacggcattcccagtctttatgcaaataccgcatactgggatggtttgacgccgccggagcgaacgttgcatatggcccgcgctcttgcgcaagagcatcctcagtgggtttttggcggcttggtggcagtaagtgcttatggattcgaacatcaatggcatttgcatgatggctgcataaccatcgtgacttccgatcatggatctcgtcaatgccatcagcgcttacgacatgtctatatgcccgatatgaacaatccgaagacacattacgaggcctccggcctatccctgatatcaccggctagaaccttggtcgaggccgctatagaccttgattttcggtttgcgttgccgatctttgattcggcccttgccaagggaataaccaaggaagagatagccgccgactgcgttcaatggagaatcgattatgcccgagtattccgcctgctgcgctatgcaaacgaaaggagcgagaatggtggagaatccctcgcgcgaggcaccatcatcgaggatcgcttcctcacgccgcgtattcaggtaacggtgaccgacccgcagacgaataccgagcaccgcgttgatttcgtatggaagctcgatgacgggcgcgtgatagtggccgaatacgacggcacacaaaaatacgtggacccagccatgaccgataaccgcagcattcaggaggtggtggccaaggaacgagcacgcgacgagggactgaaacgagccggtgccaccgaaatcgtccatttcacatacgccgacgtcatcgaacgcactccgctgcgggtaaaactgctcaaagccagagtgccccagatggaggcatccgcagagcagcgggtcccgtgatgcgatgaaccttcatcgcatgggttcacatggattcagcccgcaaaatacgccaatatcaatcggcaagctccagcccatgcccctccttccctaccgagaacaataaacgggcccgcattccagcccgatgcactcgccatatgggcatgtccggaagaccgtccaaattccgtacttggttttaccgtcagccgtcaatcgtggcacatcgcataaagccgactagtatgaggtgggaatcgatgattcgacaacaactacatacaggagagtggcaatgggtgaagtgatcaccgccaaggacaaggaatatgaggccgaggagcgcgctacggcgccgggcgcgaaccagtcgatgagcgaccgtgtgaacaaccgctcgctgcgcccgcagtcggctgcattcaaggagtttatgaagtccggctgggccgacgatgatccggagatcaagcctctcgaatcctccaagttcacgccagcccgccttgaggcgctgggcaaagccttcccgggcgagcgtctggtcattccggccggccagccgaaggtgcgcaacaatgattgcgattacatgttccgcccggacaccacgttcgcctactacaccggtctgggttccgattacgaggccggcgccgtgctggtcctgaacccggtcgaccccgactcccccgaagtcgccgccggcaagacgcacactccggaactgttcgtggcacctcgcgccgacaactccaccgaggacttcttcatgtccgcccactacggcgaatactgggttggcccgcgtgctggcctcaaggagatgcaggcgatgaccggcatcgagacccacgacatcgcccagctggccgacgccctgtccaaggacgtgggtgccgaggccggcgccgtgcgtgtgcgcgtggtcagcgagaccgatcccgaaatcacctcgatggtcgagtccatccgcgaggccaacggtttcgccgatccggacaagaactccgcatccgacgacaagctgcacgagttcgccgccgaggcacgcatggtcaaagacggctacgaaatcaacgagatgcgcaaggccgtggacgccaccaagcacggcttcgaccgtctgctctccgcactgccggccgcgctcgacaagccgcgttccgagcgtatcctcgaaggcgcgttcaacgccgtgtcccgtgagctgggcaacgccatcggttacgactccatcgtggcctccggcccccacgccccgattctgcactggatgcgcaataccggtgtggtgaagaccggcgacatgctgctggtggatgccggcgttgaggtcgattccctgtacacggccgacatcacccgcaccttcccgaccaacggcaagttcaccgacttccagaagcgtctgtaccaggccgtgctggactcgcagcaggccggtttcgaagccgccaagccgggtgccacctattccgacatccaccacgcctgcatgcgtgtgatcgccgagcgtctgcacgattggggtctgctgccggtgagcgtcgaggagtcactgtccccgcaaggccagcagcaccgccgttggctcgcctgcggcgtggcccaccacctaggtcttgatgtgcatgattgcgcgcaggcccgctatgagtcctatcagggcgcgccgattcgtcccggcatgatcttcaccatcgagcccggtctgtacttccgcgaggatgatctgctgattccgccggaataccgcggcatcggcatccgtatcgaggacgacgtactcatgaccgagaacggccccgaatggatttccgccggcatcccgaagcagatcgacgacgtcgaagcgtggatgcggagccgtaaagcaatcagtccggtggactgattgtaggcgacgccgaacgctgacaagcgcgaggaaaatgaaatcatgcgcgaagcgcaccatattaagcaggctgcccaagccaagtaacccttaagctccctcatcagagggagctcctttttttctactaaggaggcaatgtgcctactccggaatttgtgttggaattgcgtaagaagatcggccatgatctgctatggctcaatggcgtgaccggttgtgtactgaacgaacatggtcaactgctgttgggccgtcgttcggacacgggcgaatgggcgatggtctacggcatcaacgagccgggcgaacagccggcggacacggtggtgcgcgaaatcaaggaggagacgggcatcgatgccatcgtcaccgatttggtggccgtcacctcgtcaaacaaggtgctgacctacgccaatggcgacaacaccatgtacatggatcattcgttcctgtgcgccctgaagcccggcggcaatgccgagccgttcgtgggcgacgaggaaagcctcagcgtcggctggttcgatctggatgacctgcccactcccctggcggccagcacgagcgagcggctggagctgttccatacttacatcgagaacaaaaagcacggcgacgcccacgccctgttccagttcgatgggcagcagtactagcgaatataaagttagctccctctgacgagggagctccaatgctatgcgattacgcctcttgggctaggagctcgtggaggtgggcgcggtgctgctgctgttcgcgcgggtcgggcacgggcagggaggccagcagcttcttggtgtacgggttctccgggtgctgcataatctggtcggcatcgccgtgctccacgatctggcccttatgcatcaccatgatgcggtcggcgagcatatcgaccaccgccaaatcatgggtgatgaacaggcacgcgaagccgatttccgcctgcagtcgcttgaacagctccaacaccttggcctgcaccgacacgtccaatgcagaagtcggctcatcggcgatcagcagcgacggcttcaacgccaaaccacgcgccaaagacgccctctggcgctggccgccggacagctcatgcgggaaacggttcatgtaggcgcgcggcagctggaccatctccagcaggtcgcccacatagttcttggcctcggccacggaaccgtacttgtggtgcacgagcagcggctcggccacattctccgcgatggtcatcagcgggttgaacgaggagcccggatcctggaacacgaaaccaatgtctgcgcgcttgggcttgaagtcacgctccttgacgccgttcatctcgatgccaagcacgttcagggagccgccggacaccttctgcaggccggcgatggcacggccggtggtggacttgccggaaccggactcgcccaccaggcccagcacttcggagcggtggatggtgaagttcgcgccgtccacggccttgaagtcgggctgcatgagatggcccgggtacgtgatggtcaggttcttggcctcaacggcgatcggctgttcgcgccaatcggccttgcgctcgatcggcttgccctcgcggtcgcgcacgaccagcttctgaccgatgcgcggcacggcacccagcagtcgcttggtgtagtcgtccttcggatggtagaagatctgctccacgtcgccctgctcgaccacgtggccgcggtacatgacgaccacctggtcggcgatgtccgcgatcacgcccatgttgtgggtgatgatgagcacggaggcgtcgaactcgtcacgggcgaggcgcagcaggtcgagaatttcggcctgcacggtcacgtcgagggcggtggtgggctcgtcggccagaatcaggccggggttcagcaccaacgccatggcgatgacgatgcgctgcttctggccaccggagaactggtgcgggtagtagtccacgcgggtttcggcatccgggatgccgaccttcttcaggatgtcgatggccttggcgcgcagttccttcttgtccttcatgccgtgggcgcgcaggccctcttcaatctgccagccgatggtgtacaccgggttcagcaccgaattgggctcctggaacaccatcgcggcctcggaaccacgcacttcgcgcagctgttcgccgctcagggagagcacgtccagcgaatcggagccatcgcgcttggacaggtagacggcaccggaggtggtggccgtctccggcagcagcttgatgatggagcgcgcggtcacggacttgccggaaccggattcgccgaccacgccgaccacggtcttgcgcggaatggtgaagttcacgtcctcgacggccttgatggaaccggcgtcggtcatgaaggagacggacaggtccttgatatcggcgagattcttgttgtcttcgctcatctctcactccttgccttccggcttgccttcgccggtccattcggaggcgacgatggtcgggtcatggtcggtgacggtggccggcgggtcgacgttcgcgtcgagttcggcgatcacctcgttgcgtgcggacggcttctcgtttgggtcgacggacgtgtcttcgatcgatccgaccacttcgccggcggacttgcgggcgcgcagacgcgggtcggccagatcgttgagcgattcgcccacgagcgtgatgccgagcacgataagcacgatggcgatgcccgggaacacggcggtccaccagatgccggcggtcacgtcggaaaccgaacggttcaggtcgtagccccattcggcggcggcggtcggctcgatgccgaagccgaggaagcccaggccggcgagggtcaggatggcttcggacgagttcagcgtcaggatcaccggcagcgtgcgggtggagttcttgaacaggtgcttggtcatgatgcgccaggtggaggcgccgaccacgcgcgcggactcgacatacgcggattccttgatgcggatcacttcggcgcgaattgtgcggaaatactgcgggatgtacaccacggtgatggagatgccggaggccaggatgccgctccacaggccggactggccgtgggagatcatgatggccatcagaatggcgagcagcagcgaggggaaggagtagacggcgtcggcgatcatcaccaggatgcggtccacccagccaccgtagtagccggacaccagaccaagcagcacgccggcgaagatggagagcagcacggccacgacgatggcgatgacggcggtgcgggcaccccacaccacacgggagaacacatcgaatccggcggcggtggtgccccagatgtgttcggcggagggcgcggcctgcgccgggaaggacgtgccgtcggcggccttgatctgggcgtggccgtagggggcgatcagcggggcgaagagggccacgagcaggaagaacgcggtgatcgcgagaccggtgatcagcatgcccttctgccagccgaccgccacgcgcagttccttgatgattggaatcttggtccagaacggcgtcttggtgctgacgttgagcttggtgaggcggtcgtcaccggggacggtgatcttgtcggaggatgcggtggtcatctcagtacctcactctcgggtcgataagcgcggcgatgacgtcgacgaggaagttgacgacggccacgatgatggcgataaggatcacgatgccctgcacggccacgaagtcacgggccttcaggtactgggacagcatgaagcccaggcccttccattcgaaggtggtttcggtcaggaccgcaccggcgagcatcagggcgatctgcatgcccatgacggtgatgatcgggatcagggccggccgccaggcgtgcttgttgagcaggcgcttttcggagacgccgcgcgagcgggcggcctcgacgtagccggaattgtaggtggagatgacgttggtgcgcaccagacggatgaacacgccggcggtcagcaggcctagggcgacggccggcagcacggcgtggcgcagcacgtcgacgagcacgttcatgtcgccgagctggatggcgtcgatgatgtagaagccggtcggcgataccagacgggtgaactgcatttcggagttcaggtcggagcggccggaggctggcaggatgttgagccagacggcgaagatgagcttcagcacgaggccgaggaagaacaccggggtggcgtagcacaggatggcgaagatgcggatgccggcgtcggcggcacggtcgcgtttgcgggcggcgagtcggcccaggccgatgccgacgatcagcgccacgatcagggcgaggaaggccagttcgaatgtggcggcgccgtagtgcgtaaggatgctgatcaccggctggttatcggtcagcgtcgtgccgaggtcgccgtgcagcaggccgccaagatagtcgacgtattgcacgatcagcgggcggtcatagccggccgcgtggatgcgctgctggagttcggcgggtgtcaggcggccgcccagggcggcggaaatcgggtcgccggtggcgcgcatcacgaagaacacgatggtgaccagaatgaaaacggtggggataatgaggaggaacctcgtcagcacgaagcggaagaaactacctgacagtcggttcttcttcgtcttggctttcgccggagtggtgctggaggtcgctgtggcgctgtctgacacgcgatgctccttggtgttggtaatcggtatataaagcaataaaggctcccctctccgaggggagctggcggcgaagccgactgaggggagtcatacgagttgggctcccctcagtctgccgtcgccagacagctcccccctcaaagaggggagctcatgctggatcagcccttggtgacggaggcgtagcggaagcggaaggaagcgtcgagggtgacacccttcacggaggtgccggtgacggcgacctgggcaccctgcagcagcgggatggtggagaggtcttcggtctcgagtttctggacctgcttgaggatgtcctcacgggcggaggcatccttctcgccggcctgcttgacgatcaggtcgttgacttccttgttggagtagccgttgttcacgaagttgccgtcgcggaagaacggggacaggtagttgtccgggtcggagtagtccgggaaccagccgagctggtagaccgggtacacaccgtcggaatcgtcggtgaccacgcggtccttggagtactgggtccattcggtggactgcaggtcgaccttgaacaggccgccttcctcaagctgggacttcaaggccgcgtactcgtcggcggaggcggagccatagtggtcgctgttgtactggagcttgaggtcgaccggggtggtgacgccggcatcggcgaggaccttcttggccttctcggtgctcggcttgccgttgccgtcgccgtaggcggacttcagcgtgtcatcgtgaccggccaggccgtccgggatgaaggagtacatcggggtgtaggtgcccttgtagaccttggtggagagctcttcgcggtcgatgaggttggcgacggcctggcgcacggccttggccttgttagcgtcggcgtcgggctgggattcaccgtagggctgaatcttgaagttgaaggcgatgaagcgctcctcaccgcccgggcccttgacgaccttgaccttggagtccttggagaggtcctcgatgtcggtcgggctcagggagcggtaggccacgtcgacctggccctgctggacggccatcttcaggttggaggcgtcggcgaagtacttgacctgcacggcggagttcttggccggggtcaggcccttgtaggagtcgttcttagcgtaggcggcggactcgttgatcttgaaggcggtcagcgtgtacgggccggcgaaggccttcttggagacgatggtgtcggcgtcggtgagcttgtcggcgtcgaaggtatcctcatcgacgatcgggccggcggggctggacatgacctgcttcaaagtcacgtcgaaaggcacggaatccttgaacaccacggtggtgtcgtccttagcggtcacggattcgacgttggcgagcagggagctcgggccgttcgggtcgttgatcttcttgatgcggtcgtaggagaacttgacgtcggaagcggtcaggtcgttgccgttggcaaacttcaggccgtccttgagcttgacggtgaattcggtgccgtcatcgttccaggtaccgtcatcggcggcgatgtccgggctcagctcggaggtgttgtagtcctgggcatacaggaacgggaacacctggatctgcacggcgtaggagccgttgtcgtaggagccggcggggtccaggctggtgatcttatcggtggtgccgatggtgatggccttgccggaatcggcgcctgcggtggtgtcatccttcacaccgccgcaggcggtcagggatgcgatggcggccacggagacggcggcggccagaatcttcttggaattcaacaggaatcctctctcataacttgtttccacgccatcactgcgggcgtggattaccgcctgactatggtgaggatgtgttacccctgcgtttccacagccatcgacttatgtttcgcttgtggcgaccatggccggttttatgcggtatcgagcagtattacggattcttgtattacgacgtgaataacgttcaaatggtgagatgaacatgctatcatgtcaccatttgaacatgcttgtagacgaatgctttccattcgtcaaccggtcggcctactgctacttgagcttgcggcccgcgcaccacacctgttcgaccgtccaatcggtcggatcggcaaggttgaaatcggcggcgaagccgggggcgatgaggccgataggcaccccggtgaccgggttcggccggtcgaagccgaacgccttggccggcgtcaatgtggcggcctcgaccgcgtccaccgggctcaagcccagttcgcacaccgcacggcgcacggcgacctccagcagcagagtggagccggcgatggcgccgttggaaaccaaacgcgcatgcccgtcgaccacgttcacgtccagtgcacccaacttgtaggcaccgtccgggcagtcggtcgcggccattgcatcggttacgaaggccgtacgatgaggcgcgaaccggaaggagaggctcaccatcggatcctgcacgtgaaatccgtcgttgatgagctcgatggtgacgcgcggatcctccaccgcggccggaatcggaccgggctcgcggtggtgcaggccgttcatcgcgttgaacatgtgggtcatgatgcccgcgcccgcgtcgaaaccggctttggcggtctcgtagtcggcgtcgcagtggcccacggccggcaccacgccggcagcggcgaactggcggatggcggagatgccgtggggtagttcgggggcgatggtgatctggcggatgcagccaagcttgccgttcgccgcgcctgaagcctcaagcatgtcgtcgacgatgtcgggtaccggatccttgagacattccgggtcatgtgcgcccttgcgggccagagccaggaacggaccttccagatgacagcctaggatgtcggggcggccggactccatcttggcgcggacggtgcggatgttccggcagatcacgtccacgggattggtgatcagcgagagcacctggcgcgtggtgccgtgcacggcgtggccggcccgcgccacatcgatgccatccgacccgtcgtcgaagctcttctcccatgcgccgtgcgcgtggatgtccacgtagccgggggtcagaatacggccttcggcgtcgatgaccgcgttgcgatcggccgggtcgagccccaccgtgcggcagtagtgctcgaaggcctcctcccccgtgccggccgccacgatgacgccggcggcatcggagacgacccaatatccgcgccgttcgccgcacgcatccaccttgcgcgcgttgcgaatcgccaccggagccggcttgccctccagtgccgcggtcacgcgcgagactatctcgttcctatcagacatgttgttctccttaccgctcatgcgctcccgccaacgggagctggctcgcgaaacgagactgagggtggtccaatcgggaagcaatacacatatgccgccgccgataaccaccctcagtctcattacattcgacagctcccctcacacaaagaggggagccagcacacgataactcagatgccctgccaggccggcttgtgggtgtaggcgtagcgatagtagtccttgtggcgcagacgagaggcggcctcctcgtccacgataatcgtggcgtgcgggtgcatctgcagcgcggaagccgggcagaacgcggacacgccgccttccaccgtctcctcgatggcttcggccttgccggcaccgaacgccagcagcacgaggtgacgggccttcatgatcgtgccaataccctgcgtgatgcagtgggtgggcacttggttgatgtcgttgtcgaagaagcgcgcgttgtcgatgcgggtctgttcggccaaggtcttgacgcgagtgccggaggccagcgaggaaccgggctcgttgaagccgacgtggccgtcggtgccgatgccgaggatctgcacgtcgatgccgccagcggcttcgatggcatgatcataggccgggccggccagcgcgactttgtcgccgtcttcgagcggagtgccgttgagtacgtcgccgggcacatggaccttggccgggtccaggccaagcggctcgaccacggtgcgatggatggtcgcatgataggactcgggatgggtcagcggcagcccgatgtattcgtcaagcgcgaaaccacgcacgcccgaaacgtcaatggcctcgtccttgacgatcttggcgagcgcctgataggcggccagcgggctggagccagtggccaggcccagcacggcgtccggctttgctttgatcaggtccgccacgcaacggccgtagatctcgccggcctcggcttcgttcttgacaatgatgatttccggcatcggtttcctccagttccgtgcggcccgcccgatgcgagtcgctgtaccgccgcccgtcttgcggataatggcaacatccttgtcacgtccgggtgccgcgcggcgttccaaccaccgttcggcgtagcgccgattggtgattcgctatttgttaatgatagtaacaattttggacctcatgaacactcacggtgtttcctgacgcttcacacaggtacactggaatttattagtgaagtttcataacagtttcaacgacgaaattgcgcttcaccgtctaagctgtgtatggaacaacaatcgccgtccactcgctcaccatcaggtaggaggaaacatgtcatatctcggtctcaacacaacgaccgacgaccatgcggccaaggcttcccccgccgatgtgcgccgcaagaaccgccaacttatcttcaggttgttgttccccaccaaccagtattcgcgcgccgagctcggccgacgcaccggattgagccgcgtggccgtttccgatgtggtcggtcggatgctggaggaaggattgctgcgcgagaccggtcaggcacccagcggcggcaaaggcaaacgaggcacactgctgagcatcgatatcgatcgactgcgcatcatcagcatcgacctgacgcaggagcacctgctgcacggcgcagtcaccaatctgctcggccagccgctgcgtcacgccgaagtcaccctgaacaccggctcattcgtttccgtggatgtgatcatcgagctcattgagaagatgctgggcatgtccgatggcgaggtcatcggcatcggagtcgcctcccccggcgtggtagacaacggcgtggtccgctcctccacgatgcgcggctggaacaatctcgacctgtccacgccaatcgccgaacatttcggacttgaagtaaacgtcagcaacgacgccaccgcagccatgctcaccgaacgtttctttggccaaggcgggccgaatatgcttttcgtgcgcatcgaaagaggcatcggttcggcgattctgctctcggacacgccggtaatcggcgaactgcacgcggctggcgagctcggccatatttccatcgatcttgacgggccgctgtgcccttgcggcaagcacggttgcttggagacgatgatttccggaaccgcattgaagaagcaactcagcgcggcagacatggagcagcatcagggtatccttgctcgggcgggccgctatcttggccaagccctggccatgcctgtgggccttttggatatggcagacgtatgcgtctatggccagccgaacatcatcaacgcgacgttcatcggcgcggcccagcaatatctggatgccgccacatcctcgtccttccacaaacacacggtaatccggcgctgcgaatgcggacctgacatcaccgtacagggcgaggccatcgccgtggtcttccaacacttggccaaataaaagccggtcaccccggcaacgaaacgcgcaagaccaagcgcggcacagcacgacataaagcgatataggactgcatgggagatggggcctcggagacaaatctgaggcctcatctcccatgccccggcactatgccaggctacgccgccatggcggcaccgatggctccgactggttggccgacaggtgccagacgcagccgggccggcaggtccagcgtttcgaggaatcggcattgcgattcgcgccggcgcagctcagccgtgatcacctcgaccaatggttcgccggttttggccatgccaccgcccaagatgatgagtcgcggatcaacggactgagccaggatttgtatggtgtcgccgatggcgcgcactaccatgtccagcacatcgacggccttggcctcccgctttttcgcgcgacgaatcaggtcgggcatcggcgggtcggcgttgggccacagacgccccacggatgcgcccgagcagactgtttccaagcatccgtattgcccgcaagggcacttgaggcgatgaggttcgactgggatatggccgatttcgccggccgcgccgctatagccatgcatcagcacgccgttttcgacgatgcccgcagccagtccggtgccgaagttcaggaacgcaatggtaccggccatgccgtccgcaccgcccaatacggtggccgcgccgacggcggcggcattgacgtcgttttccacatgggccggcacgcccgaacgctgcgagaccaacggccccatatccagcgagaccacgtcgagattcacgatattgcccacatgcccgctggccgaatccaccgtgcccggggtaccgacaccgatggccctcacctcgtcaaaacgctcacccgctgcctgatgtgctacagcgacgatgtcttcgatcacggcatcgttgccatgcctggcgggaatacgggcggaacccaataccgtgcccattgcgtcaaccagcacagcttcgatttttgttccgcccacgtcaacaccgattttgagattgttcatagtgttttcagacatcagtcctcccctgttcttcatcgaacgtttcgcttgatatcagtgtgcatccgactattgacaaccatcttaacaaattcccccaagacgacactcacatgcacgacacaccgaatgacatattgattgcgtcaatcaattaacagcgttaatatcttaatcaagttcagattcaaagacgagcggaacaactcgcaacggtgcagacaaggaggacttaagaccgatggcaacaaacaccacccatgccacttcccaagccagtgtctccgaatccaaccgctcccgcatcgtcaagcacctgtatcacaacggcatcagctcccgcgcgcaaatcgccaaggcactggaactcacccccgcggccatcaccaaaatcaccgcacgccttatcgaggccggcatgattgaagagaccggcgatttggaaggttccaagaaccgccgttccatcggtctcaaactcgacaccacgcggttccgcatcatcggcatcaaattcgcccgctcgctggtgcagatcggcgtgttcgacctatgtggcaacaccctgagctttgaaaacctgcccacggtgtacgacaacaccatcaacgacaccatcgtcaccatccaccagcgcgtcgaacaactgcttgacaacgacccgtccattgtggccatcggcatggcggtgcccggcccctacctgcgtaacgtaggccgcaccgccgtggtgtccagcatgcagggctggcgcaaaatcaacttcatcgacgaattcgccaccgctttccgcgtgcctgtgttcatcgaacaggacgcccgcgccggagccctcgcacattatctcttcgacccgtcggtgcacgccgacggcaacctcgcctattatctggtcggcgaaggcgtgggcctcggcgtcatcgacaacggtcgtctcatcaacggcttcctcggtgccgccaccgaaatcggacacatctccatcgacgtcaacggccgcccctgcgattgcggcaacgtcggctgccttgaacgctactgctccacccccgccattcacgacatgctcatcgccgatggcaccgtggttcccggcgcggccgatatgacccacaccgaagccgcccgcgccctgttcgccaaagccggcgacggcgacgaagcgtcaatcgccattgtccgcgaagtcgcccgatacgtcggctacggatgcgtcaccatcttcaatggatacaatcctgagcacatcatcatcggcgacatcgtgtccgaagccggcccgatactgctcgatgaggtgcgcgccacggtggccgaacgggccatccccgaaatcaatgcctccacttccatcagcctatccaccctgtccgccgacgcggcggtctccggtgccgcagcagtggcggtgacccaattcctcgaacacccctcggtgttcttcgacgtctcctaaaccaagcgccgacatcacaagatgttccatacgaaacacccggtaaaagaaacaaaggaaaggaaaccaaccatgactaccccgatcgttctgagcctcggtgaactgctgtgggatatgctgccgagcggcaagcgagccggcggcgcccccgtcaacttcgcctaccacgcgatgaagaacggcaccgaaggctgggctatcagcgcggtcggcgaggatgagctcggcgacgaactgattgccaaggccaacgaggccggcatcaacaccgtcatccagcgcaacgcctggccgacctccaccgtcgaggtcgcgctgaagaacggcatcccggagtacaccatcgtcaagggcgtggcttgggaccacatcctgtacacccgccagctcatcgacgtggtctccaaggctgacgccgtctgcttcggcaccctggccctgcgctcccccgaatcgcacgccaccatcacggagctgctcaagcacaccaagccgggcgcgatgaagttcttcgacatcaacctgcgtggcgaccactactccaaggacctcatcgaggaactcctcaaggcggccaccgtcttcaagatcaacgacgaggaactcctgctgctgcgcgacatgttcgacatccgcggcacctccggcgaagacgcctcccgctggttcatcgaggaattcggccttgactacgtgattctgaccgccggctccgcctactccaccatcatctcccgcaagggcgaggtctccacgctggacactccgcacgtcgaggtgaacgacaccgtgggtgcgggtgactccttctccggcaccttcaccgcccgcatcctgctgggcgacacgctggcagaagcccaccgcaaggccgtcaacaccgccgcctacgtctgcacccaggccggtgcctggccgcagtacccggccgagatgcccgactatctggctgaaatcggcaagtaatccacccatccccttatccgccattcgtgcgacttcacgaatcgactgatcgcaaccggtgagattctccgaacaggaaatctcaccggtttttcatatggtgcgctcacactcatgctcttcacatcctttcgcgtgtcatgaactaaagcggtttagaataatgctgttcccttgatacgtatatccctcaaacaaagaagttgaatttatgacgaccaccgcgataccgaagtcggtctcggatttcatgcagcacatcacggacctgtgtggcaccgaacacgccgcctgggccgagaacttcaatgcctgctttgccgacaccctgaccaccacggtcaaacggcatgacgacggcaccacattcctgcttaccggcgatatcccggccatgtggctgcgtgattcgaccgcgcaattgcgcccgtatctggcccttgccgccgaagacagcgatattgcgaacctgatcgccggtctgatacggcaacagttccgctacatcatcatcgacccgtatgcgaatgccttcaacgaggaaccgaacggcgcctcctgggacaaggacgaccggtccgatttctccagcccttggctttgggagcgcaagtacgaggtggattcgctgtgctaccccatccagttggcttggatgctgtatgcgaacaccggcaacgccgatcacttcgatgccgaattcattgccggcgtcaagaagattcttgacgtcttcgagaccgagcagcatcatgaacgctccccgtatttcttcatccgcgacacggacatccccaccgaatcgctgagcaatgacggcaaggggtcgccggtggcgtacaccggcatgacctggtccggcttccgccccagcgacgacgcctgcacctaccactatctggtgccctcgaacatgttcgccgccgtggtgatgggctatctggaacgcatcttcggcggtgagattctggatgacgccgatatcgccgcccgtgccggcgagctgcgccgcaccatcaccgaaggcatcgaaaaccacgccaagacgacgaaccgcaatggcgagacgatttacgcgttcgagaccgacggcctgggtcacgtcaatatcatggacgacagcaatgtgccctccttgatggcggccccttacttggggtactgcgcaccggacgatccgacgtatctggcgacccgacgcacgctgctcagcgacgaaaacccgtactactacgagggcgagtatctcaagggcatcggctcaccgcacaccccgccgcgctatgtgtggccgatcgcgctgtctatcgaggcgatgaccagcgacagcaaggacttcaaggcgcatatcctcgaccgtcttgtaaccaccgacgccggtacacatctcatgcacgaaggcgtcgacgtggatgatccgaccaagtacacgcgcgaatggttcagctggtcgaatatgatgttctgcgaactggtcatggactatttcgacattcgtgtgaagcactaagacgtgcccgctgaatgctcattgcgcacccaccgcatgttctcgttaaggaaaggaacaatcattatgaccaataacccacgttatgcactcggcaccgaagccaaccgcattttcatggcttccgaaacctatgagctgctgaagttcggcaagggcttcccagcgccgaacggcggttccggctggctgaacgccgacggcaccctcgacccctcccacggcgtcgaaacgtggatcaccagccgtatggcccatgtgtattcgattggtgccatgctcggatacccgggtgcgggcgagctggccgacgcggcgctcaagggattgaccggcattctgcatgacgacgagcacggcggctggtatccgcaggtgttcgcggacggcacccatgcgccgggcaaggtctgctatgcgcatgccttcgtgattctcgccgcgtcctccgccctgctggccgggcgtccgggtgccaaggaactgctcgacgaggcgctcgccacatatgacgagcatttctgggatgacgaaatcggtttggccgtcgatacctggaataccgaattcaccgagctcgacccgtaccgtggtctcaacgccaacatgcacaccaccgaggcgttcctggccgtgacggatgccacaggagacaacgcctatcgagtacgcgccggacacatcatcgatcatgtgatcggctgggcgaagcacaacgagtggcgcatccccgaacatttcaagtccgattggtcgctggacctcgaatgcaacgtcgacaagaaggatgatcagttcaagccgtacggcgccacgccgggtcacggcatcgaatgggcccgcttgatcacgcagtgggcgttaagctccttcgccaaccttgacggcgcacagccgtacgtcgacgccgccgagcatctgttcgcgcgtgccgtggccgacgcatggaacgccgacggcaccgtgggactcgcctacacgaccgactggaacggcaagcccgtggtcaccgatcgcatgcattggacgctggccgaatcgttgaacacttccgccacgctgtatgcggccaccggcgaggagatgtacgccaactggtacgccacattcgcccagtatgtcgatgagcatgtcatcgaccacgagggcggttcctggttccatcagcttgacaagaacaaccacgtgatcggcacggtctggccgggcaagtccgacctgtaccacgccttccagtccacgctgattccgttcttggacccggccgtgtccattgcgacggccgtgaagaacgctgaataatcgacagcatctaagcctctatatccttttttcttcctctttctcaacggcgttggccccgtggaatacgggggccaac

SEQ ID NO: 2271 - DNA, 29172 bp, Unknown
  R119_18m  MAG No. k141_9164
gcgcagtcgaggttcggcggattccttggcaccggtgatgcggtacacgtcgaacacgccgtcgatcttgcgcacggcggccagcagcgtgttgagatgctgcggatcggccatttcgaagctgaactggctggtggccacacggtcggaaccggtggcaatcgttccggagatgatattcacgccatgatcggaaagcacgcgcgtcacatccgacagcaggttgcggcggtccaatgcctcgacttgaatcttgaccatgaacagacccttggtgctggtccattcgacctcgaccacacgctcgggctgcttgctcttcaagtcgatcatattctggcaatcggtgcgatgcacggacacaccctggttgcgggtaatgaatccgatgatattgtcaccgggcaccggcatgcaacaacgggcgagtttgatccacacatcgcccacgcccttgactgataccccggtggagctgctggaggttttgcgttccacgggcttcagcggcaggacttcctgctcgacttcctcatcgacctcgtcggcacccgcatccttgaccagatgcgagatgacgttctgcgtggagacctgtccgtcgccaatggcggcgaacacggcgtccgcgttcgggaagttaaggtcgtcggccacacccaccaacgcttcgggcgtaagcaatgtgttgaccggcagattgcgcttgcgcatcgcgcgagtcagttcgtcgcggccctcctcgatggcttcggtacgacgctccttggagaaccactgacgaatcttgttgcgggccttcgggctcttgacgaagctcagccaatcgcgtgacgggccggccgtatcggatttggacgtcagaatttcgacggtatcgccattatcgagcgtggtgtcgagcggcaccagacgtccgttgacacgtgcgcccatcgtgcgatgacccacttcggtgtgcacggcatacgcgaagtcgacgggcgtggcatgagcgggcagggatacgatcttgcctttcggcgtgaacacgtagacttcggacgagccaaggtcttccttgagcgagcccaagaattcgttggaatcaggggtttcgctggtccaatcggcaagctgctgaatccatttgagattgtcggcttcggaaagctcctggttcttctcgtcacgcctgcggtcggacttgtccggcgagctcagggcgcggccggcctggccgttttccttgtatttccagtgcgcggcgatgccgaactcggcgcggcggtgcatgtcccaggtgcgaatctggatttcgaccggcttgccaccggggcccaccaccgtggtatgcagcgactggtacatgttgagcttcggcatggcgatgtaatccttgaaccggccgggaaccgggttccaccgcgcatgcacggcaccgagcgccgcatagcaatcctgaatcgtgtcgacgatgatgcgcacgccgaccagatcgtagatgttcgcgaaatcatgcccgcgcacgatcatcttctgataaatcgagaagtagtccttcgggcggccggtgacgtatgccttgatgttctgctcatcgagatcctcgttgatctccgccagaatctgcgccagatacacgtcgcgctgaccggcccggcgggccaccagcaccacgatctcgttatagatcttcggatagagcaccttgaagctcagttcctcgagctccgtcttgatggcgttcataccgagtcggttggccaaaggcgcgtacacgtcgagggtttcacgcgccttcttctgggcggacgtggtcttcacatagcgccaggtgcgggcgttgtgtacgcggtcggcgagcttgaccaccagggtgcgcacgtcgcggctcatggccaccacgagtttgcgaatggtttcggcttgggcggaatcacccacttcaagttgactcagcttggtaacgccatcgaccagaccggccacggtgtcgccgaattcggcgcggcattgatccaacgtatagtcggtgtcttccaccgtgtcatgcaacaggccggccgccaccacgatcgggcccatgcccaaatccgcgagaatctgggaaacggccagcgggtggatgatgtacggctcaccagacttgcggcgctgggcggagtgctgggtaacggcacgccggtaggcacggtcgagaatggacaaatcctcatcgggatgatgggacttgcataccttcttgattggatccagcggattgagcggatcggcactgatctcacaacccaacttacgggcggcgtactgctcgccatcaatctctgccatgccagtcacctccctcgtcatgaagttcattgtagccgcgaaccggagccttgtgcatgcacctgttcgccatcattggttccgcaaccgtcgttgccgtcatcaccttggtcattcaaccggcccaatccggtcaggacgccactcccgtcgaaccgaacccacgttcggcgcgatcggatccgggcagtgtctcggccgggatgaaccgggcctcaacataccgctgaatcaccaattgagcgatgcgatcgcccggatggaagacggcggtgcgttccggatcgaggttgatcagcggcaccttgatctcgccacggtagccggcatcaacggtgccaggcgcgttgagcacggtgacgccctgcttggcggccagcccggaacgcggatgcaccaacgccacgtagcccgcaggtagggcgatggccacgccggtgggcaccagtacccgttcaaaaggcttcagcgtcacatcgacggtggtgatgaggtcggcaccggcatcgcccgcgtgggcatagtgcagctgggccggatgttcggggtcgaggctcttgaccaggacctcggtggattcgggctcgttgtaggtctcgtcgaacgccatcaggcggcgcactcctcacacaccggctggccatcctcgtccgtgtaggcgagctggctgcgatgcttgaccaggaagcactgcgagcagatgaactcgtcaccctgcatggggatgacggtcaccgaggaatcctcgttgctcaaatcggcgcccggcagttcgtagtcttcggcgatggcgttctcatcgtcgtcgatgtcgctcgaggcgttctgcgaggacttccccagcgcctgcagcgattcctcgtcctcatccttattgcggggggaatcataatcctgagccatcatggtcctttcgtcgtctttggttcgtaagtcgatatatatagcacggtcagcgccgtactcgcccataggatacacgatttgaaatactcgtaaagttcgacacgtggggcatacttaaaagaagtaatgtctttgcgacggaaagtggtgcgaatatgccagatgatcggcttgaaaaagcccgtttcgtacgcgtgagcaagacgggggacctcgtattctccattggcggcagggaaatggccgtgagcgtggacgacacgctcgaacgggcgattcttgaggccaagcaggtcagaagcgagacgcgacaggccccccagccgcatcagcagtccactttgccgatttcccagatacagtcgctgattcgcgccggtgccgatccggcccgtgtcgcggagaaatatcatctgagcgaaacgctggtacgtcgtttctccatggccgtggagaccgagaaacagtacgccatcgaacaattccttgccgtggcggcacccaaagacagcagggtgcgcaccatcagcgaactggtggaacgcacgctggcctctgctggaatcggcatggaatcagtgacctggaaatccacccggcgcggacttgagccttggcgcatcgtggcgatattcacttccgcgggccgtgagatccatgccgaatggacgtggaatatgcacgacaattccgtgatgagcctgaacaatgccgctcgaaaactgctcggcgaacagaatccggaatcagccacggattccaaactcaagccgacgattcctgaactgcccggcgactccgtacgttccgcgcgtatcgagcgcgccgtgtctgcttgggcggcgcctacgccttcgattccggccgcacggcctgccgcgatccggccctccgtcacttccacaggttccatgcccccggtggacctatccacgtccatctcaccggccacgaaccaggctcatgacgctacggcccccagcccggtctcttcgcagaccgccggacctgtttcgtcatctgccgcaggattgcagcaatcgcctgccacggcaccagagcagggttctgacaatatttcggacgagaccgtacggcgtggccccaatgcacagctggtagccaccgagcaggagcgggcggccgaatccgccgccaccaaacacgaggcaccagccaaaccggccaagcgtaaatcaggacgttcggccgtaccaagctgggacgagattctgttcggagactgaatttccgaatcaggccatatcgatcaggcagggaatatccatttcaaatgccgtttgggagccatgcacgctcggcaggtgggtggctttgtctccttgcgtacgcgaatcgacgagggtcacggctcccgctgcctgcacgaccacatcgccgagcatcggccggactcgctcgcagaccggtccaaacaatccgtccgcgatggcctcatccctggtccgcaccaaggctcggtcttgcaggtaatcgcgccaccggcaagctatatcttcaggtcgttcatccggctcggcatacagcatcagcgagcgcggctctcccccgaccagtgacacgcctcgggtgagctgcggttcaacggcgatgtcaatccgctggcccatgtcggtttgcaccatgccgtggtcggccacgatgacgatcagcgtgcctttgggtgcgctgcgtttcaggagcgcgagctgggcgtcgatatgttcgaatgcggccacccagtgttcggaatcccacccgtaattgtggccgactttgtcggcgtcacggatgtacaggtaggtcaggccgggggtacgggaggcacgtgaggcggccagcacacgatcgcgtggggtgacgttgccttgatagtcggtgcctcgcaatgcggcttcggtcaatggcgatttggagaacttgggcaaccccgagcttgtgacgcgcacctcttgagccgcaagtttctcgaacaccgtctcctcgcgctgctggtcgagcggatcgaccatgggtggcacaggaatgtgcggattggctggtttgggtgccagcgcgtctttgaactggatgagttggatgagcttatggctggcgggttcgagctgcgtatagcccgccattgcggtcagtcccgggcaggttccggtaccgaatgcggccatggccgccacagtggtgcttggagcgcaggtggcgatgggacgctgattggcgcgttcgttcatcagcgaacgcagatagggcgcgtggccgaggcgcatggcgaggttccagaagcccaggccgtccacgagcaccacgatggccgattcggcgtcgggcagtcccaacgcgcgctggcaggccttgggatcggcgtggaccttggtgggagtcggatgcccaatcgcggcggacaaggcgggcagcacggcggacaggtgcagtgctcccccacgccgatcggccggggcgtcatccccatagcccacagtgggcaccagccgcagcaactcgtccatatccagcgtctcaacactcatagttgcccattcaagtagcacccctccccttggctcagtgcgcagagaacggttctcaataacaactgtgcgccccaacgcacataatcaaacaaacgcacatcgactgaaacgctagaatcacgccattttatcggcaaacatgtgcgattggcgcaccgaaaccagcgcacagttgttattgagaaccgttctctgcgcactgtttcgcgccctcccgctaatatgggggcgttcgaaagggagtttcatggcatcacaccgcaaaccgtccgcgcaaacctacgatccgcgcacggtcaaggagcatatcgtcgagacgccgctgaacgaggagatgagcaaatccttcctcgagtatgcgtattcggtgatttacgcacgcgcactgcccgatgcgcgcgatggcttgaagccggtgcagcgccgtatcgtttaccagatgggcgagatgaacctgactcccgaccgcccgtatatgaagtccgcccgcgtggtgggcgaggtgatgggcaagctccatccgcacggcgattccgcgatctacgaggccatggtgcgtttggcacagccgttcgcgatgcgtctgccgctggtagatggccacggcaacttcggctcgctggatgacggccctgcggcctcccgttacaccgaggccaggcttggcccggcggccctcggcatgaacgcggatatcgacgaggacaccgtcgacttcacgccgaactatgacaacaagctcaaggaaccgaccgtgctgccggccgccatcccgaatctgctggtcaacggcggctcgggcatcgccgtgggcatggccacgaacctggccacccacaatctgggcgaggtggtgaacgccgccaagttcctcatggcgcattcggacgccaccctggaacagctgatgcgttacgtgcccggccccgactggcccaccggcggcactatcatcggccgcgacggcatccgtgaggcctatgccaacggccgtggcacgctcaccacgcgcgccgccacgcatatcgaacatgtcacggcccgcaggcaggccatcgtggtcaccgagctgccgtacatggtgggcccggagaaggtgatcgagcgtatttccgacggcgtgaagaaccgcaagctggaggggatttccggcgcgttcgatctgaccgatcgtcataacggcacgcgtatcgtcatcgagatcaagaccggtttcgacccgcatgcggtgctggtgcagctgttcaagcacacgccgttgcaggacaattttgccatgaacaacgtggcgctggtggagggccgcccgcacacgatgggcctgaaggagatgcttcaggtgtgggtggaccaccgccgtgcggtgattcgccgccgcagtgaatatcgcaagaagaaggcgttggagcgcctgcacctggtcgagggcctgctgctggccatgctggacatcgacgaggtgatccaggtaatccgcacctcagatgatgcggatgccgcgaaaagccgtttgatggttgtgttcgacctggacgaggtccaggcccagtacatcctcgacctgcgtctgcgccgtctgaccaagatgaaccgcatcgaacttgaggccgaacgcgatgacctgaagaagcgcatcgaggagctgacccgcattctggcctccgccgaagcgctcgaccaggtggtcaccgacgagatggacgaggcggtcgccaagtggggctcgccgcgtcgcaccgtgctgctggatgccgacccggatggcacgctgacgccggtcgtggcgcagggcgccggggcttcgggtgtgtccaagtccgcactcgaagcagtgaaggccgccaccacgatttcctccgccgaagccgatgtggccgcagccgcagccgccgccaagaagaccggcgagcggtccgcgctgaccggagccttgaagatcgaagacgagccgtgcgtggtgatgatgagcgccaccggtttgattgcccgtaccacgccaagcgcgatggacgtgttcaatgtacggtccacatccgatgaacgtctgcgagacgatcaaatcaccacaatcttcgagacctccacgcgcgccacgtacgggctggtcacgtcggccggccgcctggtgctcgcgcatgtggttgatttgccggcgctacctgcttctgccacgttgtcgctgaagggtggggtccaagccgacgaactgatcggcatgaccgaatccaccgatccgattcgtggcgagcgcgtgattacggcgatcgccatggagcagccgacgtccggcaaggccagtgccgaggacgagagcgaggatggtgccgccgaggccaagccgttgccgtcgctggctatcggtacccgtaacggtgtcatcaagcgttggaaccgtgaggcacccaccaccatggattcctggcccgtcattgatctgaaagatggcgacgaagtggtattcgccgccgtggccgaggatgacgaccgtctggtgttcatctcctccgattcctcgctactgacctttgaggcgaagaacgtgcgcccgcagggtcgcaccgcgggcggtatggccggcatcaagctggccgagggcgcccgtgtggcggcattcaacgtggttcccgccggcaaggtggcatggacctatgaggagggcgagaacggtttgacttccggctccggcgcggtggtgctcaccgtggccggcgactccgatgcactacccggcaccgaaaacggcgccgccaaggtcaccccgctggaaatgtaccccaccaagggccgcgctaccggtggcgtacgctcccagcgcttcctcaagggccagaacacgctgattcttgcctgggttggtctctacccgttgcatgcctccacatccgcaggctccccggtcgagcttcccaagcccgatatgcgccgagacggctccggagtggacctcgcctcccccatcgccttcattgcgtaacctcaattaagctccctctgatgggccgagccgtaaagcaaacacccccagtggggtgtttgtaggcgaggagcgaacgatagtgagccaaacacatagagaagagaccctaaacccgacctacactaagcatcaaggaggtggcgatgagactactggttgccgtatccaatgaaccgttggcccgcgccattcgtggtgcgctgcttgcctgtcgtcatgaggtgtccttggcaagcaccggcagtatcgcgctcgccgcggtcaccaaggagctatttgacgcagtgattctcgatgaatccctgctcggcatctccaccgagcaactcatcgaatcccttcacaatgcccgtgcctccgtcaagattctgctgctgacttcgacgccactcagcaaaaccatcggcgaaggcagccgctggcgagcgctgcctgacgagtacgccccgatcgaagagacgccctacagctccttcagcgcggattcacacgcaaacaactcagatgccgaagccgaacagtgcacggacaatgctgccgctagcgcacgagctaatgtacgacacccggatgccgtactgagcaaaccattctccgatggcgaactgctctcatacgtcggctcgcttgccaccgactcccccaccatgatcattcgtggcaatctcacgttggataccacgaatcgcaaagcctactacgcatccacacacaccgcaatttcactgtcccgtctggaatacagtttgcttgaagcactggtcaaggctgatggccagtttgtcaacaccagcgaattggtcaagctcgtcggtggcccattcttcgagcaacaagggctcctcaggaacgccctctacacactggataagaagctcacccacgccggcctcatcatgacccaacgcggctccaactaccgcattcgatagctgggctcaatcagtacagccgcatgcctcggggaacgggggtgaagccggactggtggaggatgcgggcgaaggggtgacgcgcgttgaggggttcgccattgatgtcgctgaacgtcacggaaccggtgccattgcgtttgagagcgtaggccagttctgtggcggccttgcgcatttgttcgtcggaatcattggcggcgggttcatggccgaccgattgatcgaacgccgtcaagtgcttggctttggcagccgcgtatagtagcgcaccttgcgcattgagcacgaccgtggctccgatacggcgtgccggtttacccgcaccggcaggcgcgtccggccacgcgatggcggagccactgagatttgcggggtcgagcacactcaatgccaccacggactggccgcgatgctctgacggatgacgcaacgcatccacggtgtcgcgctcggcaaattgggccgcgccgaaaccacggacgaacatgcctcgtaccagtcgaccatgctcctccatgcgctgcaatatcggatacaacgctgagtagccacccgggatattttccttgtcgatcaccggctgcgcgatgacgccatacctgtccagcaacgtctcgaccagtgcgagcgcctgctcggtctgatcagtgtcttcggcttcagcttgcccgattacggcagaccacaaacctcctagcgtcatatccgtagtggctcggtgaatcggagcgacacgcccacgacgacgtgatgtagtggatttacgcgggcttgctgcgcctgcggttaatgcacgtaccggcgcgaagctggaattggtgaccttaccttgccagaccaagctccacaaggcatccttgaactgctgttcgctccactcttgcggaatgatttcaccggtgtttggattgatgtccggctccgcggtctcattccacacacgtttggcggcatccaccagttgacgggcatggaacgctccccctgagtccagtgcggtcagaatcgcttccggcatggtggcgtctgaagcgttcgatgtcgtaccatgttccacaccgctgagcaatattgaatccgccggatagaaagcaacctcaccggggtccatcgcactggttcccccggtttttgagccgacccagaccacatcgccgctggtcagcaactcatccagcaatgcaggttggtagtctcgtactcgtgcggggaataccgccgactcccagagtgcagtgggcagtgctatgccctccagctgctcgataacgcgcatgagcccgtcggcaccttcatatcgttcgccgccgaccggcccgataccttgtcggtcgataagaaacatctggaacgcctctggttctactggcttgactgctttacgcgccttggccaatgagcgagaccgaatgcggcggaatacgtccttatggagccactgttggccttgcttgtcatcatctacaaagtggccttgcagcaactcgcctttggcagccagtacatccaaagtatgcacggcatccgtagcatcgaggtgcagatcggccatgagctgatcggcggtgaaaggaccatgggttttggcgtaacgggtcacgcgaccagtcacatcatcgtcggcaagttcattccagaaagtgcgctccaccagttcctgttcgacttcgcgaatcacgtccgggttgagcacttgtgccatgtcggtggtgccgagcaagcgttcgagcacgtgcggatcgagagacaacagttgcgcgctgcgctcggcctgaggttggtcatactggtacatcaccacgccgacgaagccaaagagaatgttctcggcaaaaggcgatggcggctcggtctccacgtccttcacggtaatggtgccggcttgcaatccggtcatcacctcgttcagggcgggcatgtcgtatacgtcttgcaaacattcgcgcgcggtttccagcagcagcgggaagttcttgaccatacgtgcggcttgcaggagctgtgcggcgcgcagtcgctgctgccataggggcacgcgacggcccgggtcggatcgcggcatgaacagtgatcgggcggcgcattcgcggaatcgtgcggcgaatagcacggactcgcccacttgacgttctacatctgctttgaggtcttctgggtcgaaaaggaacaggtcttgagcaggaatatgtccgtcaccgtccggtagctgaatgacgataccgtcatcggcggcatatacctgcccatcgaaaccgtagcgttggcgcagtctgcggctgatggccatggaccacggttcgtgaacgcggcggccgaaggggcttaacagtacgatgcgccagccgccgtcttcatcgcgggtccgttccacgatgagggtttggtcgctgggaactgtgccggtgatggcttgttgctcggagagtaggcgggccaggttggtgatagcgttggggtctaggccgtctcggtggagacgggtgaggattgttgggatgaaggttgggacagctggaccttctgcggcagaactccccccagtccgcttcacgtctaatccggcggcgatttctcgggtgaagcgggctatggtacggctgaaaccgtagtcacggccagcgccttcaccgtgccagaacggcagacgggcggtgcggcccggagccggagtcacgaccacacgatcacgggtgatttcctgaatctgccatgtggaggtgccgagcgtaatgacatcgcccacgcgcgattcgtagaccatctcctcatccaactcgccgacgcgacgctggcctttgccggcgtccgcctcaggcaggaccacggtgtacagccctcgatcgggaatcgtaccgccagaggtaacggccactttctgcgaaccgggacgggcggaaatcaggccattatcccgattccataccagtcgcggccggaaggccgagaattcctcgctgttgtattcgccggacatcatgccgattacggcatcgaacatgtcacgtggcagttcggcaaacggcgcagcacggagcaccgtggcataccagtcatcagcgttcaaatcgtgcatcgaggcagcggccacggtctgctgggcgagaatatcgagcggattgcgcggcacggccaatggttctatatcgccggcaatcatggcttccagacttgcggccccagtgacgatttgctgacgggtgagcgggtagaacaatgcgtgagagacgccaccgacctgatgatcggcacggcctacacgctgcaatccggaggagaccgacaacggtgtatcgacttgaatcatcaagtcgaccgagcccatatcaatgcctagctccaaactggaggtggccaccacgcagcgcaattcaccacgcttgagccgttcctcaatcattttgcgacggtctttggagaccgacccatgatgagccatggcgatgacatcatcgccctcatgcgagccgacaagcatggtggtggaaccgaccacagcatcgtaatgtgtggagaacccttcgcggccttccggagagcccggatcccgcacagtgtcgggattggtgccatgccgggtctgcgcatagagatcattgaggcgcgcggtgagcttttcggccacaccacgcgaattgacgaacaccaatgtggtgcggtgcgcgagaatctcatccaaaatactgcgttccaccacgggccagatggaaccggaggtacggtcgcccgccgctccaaccaacgcggaggaatcgaacgcatcactcgcatcagaatcgtccccagaagtggaagaaacatctctatcatccaccggcacaatgcccctgcgttcggcaagtcgctgcatggccggcgtgacaccgctgatatgcggagcggaccgttcagcctccacgccaccgacacgctgcttggcattcacggactgcaaatcacgcatgttttccaacggctcaatcatgcgcagatccattgcaggccgcccaccgggattcacgatggtaaccggttgtccgccgcccaggaatcgcgccgcctcttcaggcggattcaccgtagcggatagaccaatgcgctgcatatgaaggtcactgaggccagcatcgatggcggtatcactgccctcatcagcatccgcatcgattgcatctcgcttgcgcgattccgcgacaaggttctccagccgttccagacttaccgccagatgtgcgccgcgcttggtgcccgccactgcatgaatctcatcgacgatcaccgtatcgacagtgccgagaatccgccctgccttcgaagtgagcaacagatacaacgattctggcgtggtaacgaggatatccggtggatgggaggctatgcgccgccgctcctgtgcggtggtgtcgcctgaacgagtggcgaccgcgatcttcggcacgggcagcccttgcgcctcgcattgtgcggcaatgccctccaaaggctgttctaggttcttggccacatcggccgcgagcgcctttaacggcgagatatacagcacacgcacaccggcacgccgcgtgcgtggcacggtcatcagccggtcaatggccgagagaaacgcagccaatgttttgccggagccggtaggtgcgatgaccaagacattacgaccggaatggattgccggccatgcctgagcctgtgcctcggtcggctgaccgaaggcatgctcgaaccacaccttggtgggttcggaaaacaggctcagggtttcgtacatatgtacgattataggtcagctgaagtaggcgatgacttcttcggcggtgccgtaggcgctttgggcaccaagcttggtggccgcataggcggagacataggagccgatttgcgcggattgcagcagcgtatggccagcggccaagccagccagcacagttcccatgaacgagtcgccgcaaccggtggtgtccaccgcattgacttgcgcggcggatacgcgatgccaacgtccgttctcgatcaccaccgaccccgacgcaccaagcgtcactatcgcccggtcgaatccgtaatcggtgaatcgttcggcgacctcataccagtcgagtgattccacatcgccgtccggcagacccagtaactgagccacttcatgctggttgaccagcagaatatccgtggcttccaccagttcgtgaggcagctcgtccataaatggcgagtcgttgagcagcacggtcacgccagcgtcatgcgcggtctgtgcggcggcgataacggtggagatcgggctctccaaacacagtcccaataccgcgcattcggcgatggtcgtgcgatgtgattgcacatagccggcacttgccttggcattggaacccggcgaatagacgatggtattctcgccctcagcgctcacggtgattaccgtggtgccgctggggccttcaacgtgcaggatatcggcggtgtcgacgccggcctcatccagcttgcctaataggaagtccgcgttggagtcctcgcccaccgcgcccagcaactggacattgacaccgaggcgagcagcggcagacgcctgattcgcgcctttgccgcccggcaacactttcatggcaccaccattgacggtttcgcctggcttgggcagtcgtttggtggtcacggtgtaatcggcgttcatcgagccgaccacgattaccgagcccggcgcatccttcagcgcttccaatcgttcccgtacgggctcgggcatctgtttatgttcttcttcacttatcaccatgggctccaagcatagtaggcggcgggcccaaatgcgcgcatgatcagccgcgcaacttacgaagacgctcgtgcatggccaccatcagcaccaagagcaccagcaaataccacgggtagagactgattgtcacatattgcgcgatgatgccgaacagtggcggcatgagcagtgagcccacataggcacaggccatctgcacgccgacgacggcctgcgatttgtcttcgccgaagtaggccggcgtcgagtggatgacgcatggataaatcggcgcgcacccgaagccgatgaccaccagcccaacgaccacgccaaggtggtgaggcaatggcacgaacatggtgaggatgccggcgagcaccagcacttggccgaggcgaatcataaccgggtccttgaatcgcatggtcagaaagccggaaagcgcacgccccacggtgatgcctacatagaataggctggcccagctggcggcggtgatcttgtcgatgccgctgtgcatcaccatgtagctggaggcccacagacccgccgtggattcgatggcgcagtagcagaagaacatcacgaggatttccttggcaccgcgaatggcgagcacgccggccacgccgagcggtttgcgttcagcaacagacgccccttcagcattaccacatccctcggcattgccgtcagatgatgcggcaccatcggtcgattcgccgcccccagtcgtgccacgtttcttccacagcggcaggctcagcaccaggatgacggtcagcatcacctgcaggatcgcgatgtaccgatagccccacggccagccttggccttgagacagcgcatagcccatgatgtaggggccgaccgatgcgccgacgccccacatgcagtgcagccagctcatatgccggctttcgtagtgaatggctacgtagttattgagcgccgcatccacgccacccgcgccaaggccgtacggtatggcgatggccaacagcacccagtaattcggggcaacggagaaacctaccaaggccgccgcagtcaacgccaccgaaacggcggtgaccttgcctgccccgaatttcaatgtcattcggtccgaaagcagcgccgagacaatcgtgaacatggaaatcaccgcggagatgccgccagcccacgccaccggcacgttcagatcctggctcatggtgggccatgcggacccgagtagcgaatccggcaaccccagactgataaacgccacatagatgacgacaagcaacagactggccatgttacatctcccattcacagtacggcaccggttgtgataacgatgtcatcagtctatcgaatagcgcttcagcaacacgcataaaacatatgacaacgtgctcacctcaaacgctaattacggaaattctcggtaagcacgatgtcattatcagcgacgtcttcgatcaggtatcgatcttggagcggtcgaaatcgtcggcgttgtcgacgatgaactgcttgcgcggcggcacgtcgtcgcccatcagcaggctgaagatctcggatgcctgggcggcgtcctccatgcggatgcggcgcagcatacgcgtgcgcgggtccatggtggtgtccgccagctggtcggcatccatctcgcccagacccttgtatcgctggatgtcgtcgttgtaaccgatgtgcttcttgtcgaggtcggccagtttgccggccagctcgtcatcggaatacgtgtagatgtattcgcccttgtgcgagccggtcaacgcgatgcggtgcagcggcggtactgcggcatacacgtagccgtgttcgataagcggccgcatgtaccggtagaacagcgtcagcaacaggatacggatgtgcgcgccgtccacatcggcatcggtcatcatgatgatcttgtggtagcgcgactgttcgatgtcaaagctctggccggagccggcgcccaccacctggatgatggccgcgcattccttgttggagagcatctgcgtaatcgacgccttctgcacgttcaggatcttgcctcgaatcggcagcagcgcttggaaaccggcgttgcgggcggccttggcggtaccgagtgcggaatcaccctcgacgatgaacagttcggccacgtcgtcattgcccggctggcagtcggagagtttggccggcatcgaggcggattcgagcgcgttcttgcggcgcgtgacctccttggccttgcgcgactggatgcgtgcgtgcatttcgccgacgatcttctccagcacgcggccggattgttccttgtatccgcgtttggagccggtgatcatctcgccgaattgcttgtcggtgagccgggtgacgatcggcttgacctgcgcggtgccaagcacgtccttggtctggccttggaactgaggttcggccacgcgtgcggtgaccacggccacgagtccggcttggatgtcgtcgcgctccaccttcatggcggagtccttcatgttcaccttgagcttgcgggcgttgtcttccaccgccttgcgaatctgcttggtgatggcgttcatgaaaccgtccacgtgagtaccgccgccgggcgtctccacgatgttcacgaagctcatgattgtggtgtcgtagccgttgacccatcgcagggcgatgtccacgccgcaggtgcgttcgatttcctgggcgtgcagttcaccgccttcgcccacggcctgggtctcctccttataggtgccctcgccttggatgcgccagatgtcggagatcggctcgcctttggataggaagtcgacgaagtccttgacgccgccggtgtgcaggaattccacgacgcgcgggtgcgcgggctgctcgccgaacgcgccatcgacgacctggtcgccggccgtcagcgagaagtcctcctcggacaggctctcggtactgtcggcttgagcctcggtggagtcgtcgaagagttcggcatcgttggacgagacgtccaaagccggggcctggtcttgcgcaggttcgactgcgtcggcatcaatggcttcgacggtgtcagtcgccgtttccggtacgttttcgtcaacaatggtgattttgaggccgggcaccaggaagctggtctggcgcacgcggtcgatgagctgttcgtatgagaattcggcggttttgttgaaaatctccggatcataccagtagcgaatacgggtaccagtggttttgggagataccttgccgatgatttccagctcggtgggtcggttcttgcgagtgcgcttgaacggggaatcgggagacggattggccgggtcggcatccgtgtatacgccagggtgaccttggtggaaggtcatgtggtgcgtcttgccgtcacgatccacttcgacgtccagtcgggagctcagggcattgaccacggaggagcccacgccgtgcaggccaccgacggcgttataagacgagttgccgaacttggcaccggcatgcagtttggtcagtacgacctccacgccggacaggccggttttcggttccttatccaccggaatgcctcggccattgtccgcgacttccacggaaccgtcggtgtgcagggtgaccacgatatcgttgcagaagccggccaaggcctcatccacggagttatcgatgatctcccacaggcagtgcataagaccctgcgagtcggtggtgccgatgtacatgcccggacgcttgcgcaccgcatccaagccctcaagaacagctaggtccttggcgccgtattcttctttgggcatacagtcctattttctaataatttggctcccctcttcaggggagccttcaacggatggctccgtcgtttgacagcccactgggctgtcaaactcctcgcgcggtcggcctactaagcgggccgaccgtcattgatccaggaagtcgcgcagggtctgcgaacgggacgggtggcgcagcttggacatggtcttggactcgatctgacggatgcgttcacgggtcacgccatacacacggccgatgtcgtccagcgtcttcggctggccgtcttcaaggccatagcgcatcttgatgacgccggcctcacgcggagacagggtttccagcacctgcttgaactgttcctgcagcagggagaaggccacggcgtcggacggagcgatggcgtcggtatcctcaatgaggtcgccgaactcggaatcgccatcctcgccaagcggggtgtgcagggaaatcggttcgcggccgtacttctgcacttcctgcaccttctcaaccggcatgtccagctcgcgggccagctcgtccggcgtaggttcacgccccagatcctgcagcatctggcgctgtacacgggacagcttgttaatcacttcaaccatgtgcacaggcacgcgaatggtgcgggcctgatcagccatggcacgggtgatggcctgacgaatccaccacgtggcgtaggtggagaacttgaagcccttcttccaatcgaacttctcgacggcacgaatcagaccaaggttgccttcctggatcaaatcaaggaagagcatgccacgacccgtgtaacgcttggcgagcgagaccacaagtcgcaggttggcttccagcagatggtccttagccttcttgccgtcggcggcggcccacttgagttcacgcttgcgcttgaactccatgccttcactttcggtgtcgagcaggtgctgggcgtacaggccggcctcgatgcgctcggacaggtcaacttcctgttcggcgttcagcaggctcacacggccgatctgcttcaggtagtccttgaccgggtcggcggttgcgccggccgcgattacacgacgcttcggattgcccgaagggatgatgttctcttcctcatcatccgtgtcggagaccacgtaggcacccttttccttgggctgctcgggtgccttggacttggcttcttcctcgtcctcgtcgtcttccacatcgtcgtcgtcggcatcgtcctcatcgaggtcttcgtcgtcggcatcgccttcgtcaacgtcgtcaagatcctcgccgaggtcgtcaacgtccaaatcgtcgtcgttgacctcggcatcgtcatcaagctcgtcatcgacctgagtgtcctcgtctttgacgagctcatcgtccttggccttcttcgcggttttcttcgcggcggacttgcgcgtggtctttttcgagggctctgcggacttggacttcttggcagaagtcttgcgcgcggtggtcgtagagctggccttcttcttggtctcggtctcctcgctggactcggctgtctgcttggttgccgtcgtttccttcgtggccaaaactgctccttctgatctctcgccgtgaagtgcatataccacacgggcccacttctggcaagggcaaatcgtcaactatgtgagtaaaccaccctccacggacgattattcccacatcgttgcccgacgtgttgccaatcaccacacgctttccttccgcgcatcgcgcataaaacctcggaaatccgccgtttctgttcattcagcccgagcaccatgccggtgccacgcctcgatcggcggctgagaatatcatcgccgccagcgaacaatcctcatcgagcagcaggcatcgcaaggcgaacaccattgctcgcggatcgcccagccaccataaggtgtaggcgattacggccaatggttgtatgcagtacggcaccggtgaggcttccgcgatatcgagcaacataccgatgccggcatggcaacgctccttatccggcatcatgccttcatcctcgaatgcgcaggtcagcagctcgcccattcgtgttctcgtacgtgccagatgcggtcgcgccgcgaattccatgagccatgacttggggcaacggctttcatcaataaccaacgagagaatcagcgcatcacgaatcgataaggtctcgcgcatgcccaccgcaaacgcggccatcgtctctcggcctaggtcggtgttcccggcatcgagacaagacagccattcatccaatggttcggccacccagtcggcattagcctgttgcgcgcctcgaagtcggcgatcattgcgaaattcctgtgatctcgtctccaactcatcaaagccaaagggctccgtctgctcggcggcgtgccgtttggcgtgtcggctcttacgcggcttgtgcggcgtgttgttgttcatcatgtcctccttgactaatggtgtgcaatctattggtgttgtggtgcgcgccgagccggatagctcatgcgccgagggggtgtgtgcccactatggctgaaaacgccgtatgacgcaggaaaaaacgaccattgtggttctagcttcaaaacccttgattcccaacgttcttgtgttcttcagaccctgtggataagttattaggcatgtgcacaactgctaacaaccgcgaaatcatcgagccacgcatcattcagttggtgcgggaactgactgccgcccccgccaccgacgaggttgccgacgccctgaaaccggtgatggaacaggttgtgggccaagccgcctcctccagccaaggaggcaaacgactgcgtgcgttgctcgcattggacgccttcgatattcttgccggcgacgtgactcctgatcggcgtgacgccatgatcgacctagcctgtgccattgaagtgtttcagacggccgcactggtgcatgacgacatcatcgacgaatccgatctgcgccggggcaagccttccgcacaccgtgccttggaacaggccgtacacagcggtgccataggccgtggcttgggcctgatgcttggcgatattctggccaccgcctgcattgaaatcacacaccggtccgccagccgtcttcccaacaccgatgccttgaacgaggcgtttcttaccatgcagcgcgaggtggagatcggccagatactggacttggccgtcgagatgaccccgttgtctgatcccgaagctctggcgaacgcctcattgaacgtattccgctggaagacagccagttacaccaccatcgccccactgctgcttgcactgctggccgcaggagagagcccggatcaggccaggcattgcgcgttggccgtaggccggccgctcggactggcgttccaactggccgatgacctgttggatgtcgtcggatcaagccgcaataccgggaaacccgttggcggagacattcgagaaggcaaacgcacagtgctgttggctgatgctctgtctgcggcagatacggaggataaggccgatctgattgccatcttcgaagcggattgtcgcaacgacgaccaggtagcccgcaccattgaactgttcacgtcgaccggtgctcttgatcgatcccgcgagcgcatcgctgccctatggggtgagtcccgtaaggcgattgccggtcttgagctgaattccgaagcgcagcgccgtctgaccgaggcttgtgcgcgattcgtccccgaatccttgcgatagtccacaatgcgagccgccgggtcatgagaccatgaacaccggtgaaaacccgtgacaactatgcgccgatgctccggccgcgtaaccggggccatgtacactgaacatgtttagtcgtgattaaaggaaccgtacgatacaacatgagtgagaacgagcccgcgcagatgattgagggacgctaccgcatcgtgcgcaatatcgccgagggtggtatggccaccgtgtatgaggccatcgatgagcgtctggggcgcaccgtggcgattaaggtcatgcacacacaactcgccaaaggcccgcatcgggagcagttcgtcgaacggttccgccgcgaggccaattcggccgcgtccatcgccaacccgcacatcgttcaggtgtatgacaccggcgagttcaatggacttgattttctggtcatggaatatgtgcatggcgtcaatctgcggcatgagatgaacgcccaaggcacattctccgtacgtgagacgctgcgcgtggtcgcggagacgctggatggtctggcttccgcacatcgcgccggcgtggttcaccgtgacatcaagcccgagaacattttgatcaatgatcgcggccatgtgcagatcactgatttcggtctggccaaggccgccagccaagccacattgagctccaccggcatgctattgggcaccgccgcttatctggctcccgaaatgatcgagaacaatcaggccaccgcgcaaggcgacctgtattccgtgggcatcatggcatgggagatgctgaccggcaaggtgccgttcgattcggataatccggtgacgcttgtcttcaagcatgttcatgaggacgtgccgtccgtggccacggtctgtcagggcattgatccgtccgtggcggcgttcatcgcccatctgaccgcgcgtcaggtggatgctcgccccgccgatggcgcggcagcagctgaggaattgagccagttggccgccaaattgccgctggaggcgtggcaataccgtttgcatgccgaacccatcggaggtgatcataccgatgccaccgctgcagcgctggtaggcaatatcgccgagcaggcccctctgaccggcgtacctgccggtgcagcaacgttcgagccgtccgtaccggcgtttttggccgatgatgtcgcaagcaataccgtcgataccggtggcgccgcagacgtcaatcctccggctcctccggtcgcccccaccacggcacttgattcgtcgacgccagccgatgcttcagctccccataagacgcaaatcatggcacagtccggcagcgagacacaagtgctgcctcaggccggcgatgccttcacccgagcgcttgccctttccgatgagccggacgtcgcttccaacggcaccgggccaaagaagcagcgcagcaaaaaaccgctcatcatcgtactggtgatcgtgctggtactggctgcaatcggcggaaccgccggctggtggtggtttgccggaccgggcagctattggagtgtgcccaagccggatgacgtgacctgcgatgcgaatgcaagcaccgaatgctcgttggccggcgcggattgggccacgtatgagagcacgttgaaggctctcggcatcccctacaagacgcacaaggaatacagcgacgacgtggcggaaggcaagatcatctcttcttccgtgaacaagaccaaggccgttgtgaacagccgcataagcaagcgagccaatcaggagcttacggtggtggtgtccaagggcgtgcggatgaccaccatcccgaaggatattctcgacgcgaattcggccaatggcaaggacccgttgaacgcgctcaagaaggccggcttcgataatgtcaagcatgacgagtcgaaggatgagtattcgatggacacgccgcagggtgtggcattgacgatctcccctgatcccggtaccacggccaagcacaacgatgaggtgacggttactttgagcaagggaccgatgccggtgaccatgcctaacatcgtcggtaagacccaggatgagatgcaagccgcgctcggcgagttgaagctcacggccaatgtcaccgaacagtacgatgacaaggtcgaggccggtcaagtcatttccgcgtctcaggaagccggagcccagctgaagtggggcgatagcgtggacgtggtgatttccaagggtccggagatggcgacgataccgtccggccttgtcggcaaacaggaaagcgccgtaaccaagacacttgaaggtctcgggttcgaggtgaaaaccgacaaggtgctcggtggcctgttcggcacggtacgtaccgtgaaaagtggcgatacggacctatccaacggcggcaagattcgcttgcgcgatgccaacggcaaccccaccgtcatcaccctcaccatcgtgtgagatttgaatgaggctccctctgtcttcagacgagggagcctcatttgttaattacttttcggcttcttcagcggcctgccgggccttgagctcggccttgaccttctgggcgtattcgttcacgaattcctgaccgctcattttctggattgcggtggaaacacgatcggtcagcgaacgcaaatcatcatgtgtaatttcatcagccggcttcttcgcaacctcaatcggcttgccatacaacaccttggtcttgcccttcttgggaatcgacgtgccaatcggctgcagcttgtccgagccgatgatggcggtcggaacaatcgggcaaccggtctcgagcgcaagtcgtgcggcaccggtgtgtcccttgtacagtcgaccgtccgggctgcgcgtgccttcaatgtggataccgaacaggtgcccatcctcgataatctcgcgtgcatgctcgagtgcgccaagcgacttgctgccaccggaacgatcaaccgggaacacgcccacggacgtgaaccaccacttcttgaacttgcccttcaatcccttgccctcgaagtattcggctttgcccatgaagtgcaccatgcgcgggcaggtaatcggaatcaaagcatcgtcaatcaccgccagatggttggctgcgataatcgcgccaccctctcgaggcacgttattcagtccgctgacagcagggctcaaacgatgatgagcaatagggccgagacctttgacgaagaaccagtagagcacttggcattcctcccgcagacgaactagccattggccggtcgcctgattagagtgacagttatgactgagaaccagaatagcaatgccgacggagagcggccaacccccacgccgggcaacggacaggattccgatacttcgtccaagtcgtcgactcccggtgccgccggaccggccacgaatggtgccgatacaccgcaatcgcatgacatgaacgatttggatgcggcgtgggccgcgttcgaagccgagcatcaggccgacttgcatgacgtggcttcctccaggcaggccaaaaagttcgagaagcaggccaagaaacgcgagaaggaagcactgctttccgtagatgacttggatatcggctcgttcaccgatgatgctcgcccgagccgtggcggcaaaaaaggcaagcagtcaggcccccgtgatttcaccggctccagctggctggataccgataatgtgatggacgcctatgatgatggcggcttcactcccccgaaccctgatcttggtccggtcaaagcatctacggtactgctgacggcgttgctcatcatcggtctcgcaggcgaaacggtgatgatattcgttcccggcttgaacgcgattcctctcttaggcgcgctgctcaatattctcttcgggctgggcgtcattttgggtctgggcggattggtggccaaaatcctcaaccgcaaagaccgcccaggggaccggggcggatactacgacgacggcgcgcgggtctaacgcttggactgggcggtttcgatccacttgttgaacagggcttcagccttgccggagtcgacagcatcctcggccagcttgtaggcctcggcgaagcgctcggccagtgtgccgttgccgaccagattgccgtcagccacgatggcggaggcagcgttgagcagcgcggtggtgcgggacgtaatgtccttgccggccaggaagtccttaaatgcgttggcgttgacgtccggcacgccgcccttgagctggtcgacggtaatcttggcgagacccagatccacggtcgggtcgaactcggtttcggtgaccttgccgtcgcgaatctcccagacggaaaccgggccggtgggggcgagctcatccatgccctcatgcgaagtgtagaccaagccggactgaccacggctggcgtagacggcagccatgatcgggctcaccttgcggttggcgcagccgatggccacgtgtgccgggttggcggggttggtcaacggtcccaggatgttgaagacgcacggaatgccgagcgcggcacgaatcgggcccacgaagcgcatggccgggtggaaggtgcgggcgaacgcgaaggtgatgcccacctcgtcgcccacttcgccgacggcctccggcttcaaatccagcggcaggccgaggtcttcgagcacatcggcggcaccgcacttcgaggatgcagcgcggttgccgtgcttgacgatcttcacgccggctgcagcggcggccacggagcccatggtggacaggttcacggtggcgaagccgtcaccaccggtgcccacgatgtcggtggtcccaccggaaacgttcagcggcacggcgtgggagaccatggccttggcggcaccacgcacctcgtcggcggtcagtcccagctgctgctgcatagcgagcgcggcacccacggcggccggattggcgttaccttgcatcaggtcgtccacgaaccactccgattcctcagcagtaaggtggtctcccccgaccagcttggtgagaatcgacttccatgtgatctcggccatgatgccctccttggcgtttcctacgccgtgtgatgtatgttcgccgctcattgtaatggttcgtcatttcaaggccctgaatcttccatattgcaaaatatggcgctattgctgttttcgtggatgtcggttcgtcgtcgagccgttggtttcgtaagcgtgaggggcgttcccgcgtattctgttttccgaccaaagaaatgaatcacgaagaacgcctgggcaaaagcccattcaccggattgccgaacgtcaaaggcacggttgcagaggatgcgcggatcacggattcgccgccgcgttccgaacccgtgctcgagatccgggtgcgtccacgtgcgggtatgctccgatgctcccgatgcggaaggaggcgccgcgggcatgaccagggcggcggcgtgcggcgtcgtggtcgcttccgtgccgtgggccgagccgggcagccggtccacacgcgatttcgaatcggaacgcgcgtggccgatgagcgtcgcgaaccagaagaccgtaagcggttttccgcacgtcgcgtggcgcgccgccggaagacgccgcccatagggtcgccgaacggttgaaagcgtcgatgccgtctccgttcggcggcctcacgtcgatcggcgtggacgagaccggctaccgcaaaggccacacgtgcatcaccgtcgtcgtcgaccacgaacggcatcgggcgatatgggcgcacgacgggtacggcagggacgtgttcggcctgttcttccaaacgttgacgcccgaacagcgcgcctccatcagggtcgtcgccggggacggggcccggtggatcgactcatgcgtgcatgagtggtgcccgaatgccgaacgcgcgcccgacgggttccacatcgtcagttggacgagcgacgcgcccgacaaagtcaggagacacccgtggaaccaggcgcgccgcgacggggacgagaaatccgtcaagcgcatgcgcggcgtcagatacaccgtcctgaagaaccccggcaagttgaccgacagacggtccgaggcgtccgggaacctgcgggacacggaccccaggggccggccctaccgttcatgacggctcagggaacccctccggacgatgcccaaacgaccggccgaccaggccgggaccgaactggaccgccgggtgttccgggcgtcccacagccgcatccccgagatcgtcgaacgcgcccgaaagatccgccgtcatgggcccgacatcctcgggacaatcgaattgggctgttcaaacgccaggctcgaggcgtccgacaacaggatcaaggtcaccatccgcatggcctacggcttccaccacgcgaacaatcc

SEQ ID NO: 2272 - DNA, 19601 bp, Unknown
  R119_18m  MAG No. k141_9299
accgcgcgtcagattgcgggcgctgtgggcgcacccgtgttggtgattctgatggaaacgtttgccgctttgcataagcagggcggcgcctccgccgtcgccgcttcgatttttggcattcaatgggcgctgcgcatctccgcaatgatctgcctggtaatggtgttgatggtgttcttcggcgtcaagggcgacggtgccggtcgtacgcgagacattatttccttgcgcgcgctgcgcgaacggcgtgcgcggcgtatggctgcgaactgacggcagattcaaccattcttaacataataagaagccccggtttccaacaccggggcttctgttgtgctatcgcaggatttcagctggagtctattacgccctgcccattagcgtcaggacaatcagcagcacgttcaacgccacaatcagcgccacgacgatcataaagatcacgtgcttgacggttccatcagcccacttgcccatgagttccttgttatgcgtgtatcgcatcagcggaatcacggcgaacgggatgccgatggaaagcaccacctggccgatgaccagcgcctgagtcgggtccttggcgaaccacagcacaatcagtgccggcaccagcgtgaccacgcggcaggcccacatcggggcgttgacgtgcagcagaccgtgcatgatttccgagccggcgtacgtgccgaccgatgtggagctcagcgacgaagccagcaggccgatggaaaagatcgtgccgatcaccgggccgagcacctgcgtgatcgcccgctgtgcgccgtcgatggagtccgtgccagacatgccatgcagcgagttggcggcgagcaccagcatcgccagattcacggtgccggccagcaacagcgcccaggccacatcgattttcgagcctctcagctgcgttttgatcgacggcttttcgccgcctgcgtaatggtcgttcaccagcgtggagtgcaggtagatggcgtgcggcatcacggtggcgcccagaatcgaggcggccatcaacaccgagtcggcgccttggaagcgtggaatcatgcctttgaccacttcgccggggttcggcggggctacgaacaggcctgcgatgaagccgaatgtgataatcagcagcatcacgatgatgatgcgctcgaatgtggtctgtgtcttgccgccttggaaccacagcatcaccgtggagattgtgccaatcgccaaaccgccgatgaacagtggaaatccgaacagcaggttcagggcgatggcgccgccgatcacctcggccagatcggtggcgatggcgatgacctcggcctgcatgaagaacatgaagcggccggcatcgctcatacgctcgcccagcagttccggcagggatttgttggtcacgatgccgagtttggcggactgatactggatgagcacgctcatggcgttggcgagcaccagcacccacaccaacaggtagccgtatcgtgcgccggaggtgatgttggccgccacattaccaggatcgacgtaggccacggccgccacgaacgcggggccaaggatgctggccagcgcatggtcatgcggcttcttattgttattcgtccctgctccggccccggttccgactccggcaagctggcgttccttcccgatttccggtgtttcctgttcgatgtctgccacagcgttcgtcatagcggttgccgcagtggcatctgcttcggtgtgtgttactgccatatcgtttgtacctgttcccttcataccgcgcacagttatagcgcaggcatgtttcccgagtcaacagacggacaatctgcggacgattgatggatgaccggcggactggcagctggcatttcccgccatctcgctcatgaaatgtgaaaaaccgccgaaaactcgctcatgaaatgtgccagacggtagaaaactcgctcatgaaagtgtaaaatcattgatatagcagtaattcggaaaggggctcctcatgtatctcaaacgcaaagccgatgcctatctcaatgcatggaaatccgacccgaatcgctccccgctaatcatcaagggccctcgtcaagtaggcaagacagagactatcgattactttgccgcacacaactaccgttcggtagtggaaatcaacttcgttgaggaaccgaaatatcgtgcaatcactgcggacggttatggcgcgaataccatcgtccgcaatatttccctgatcgacccagccaaaaagttcattccgggcgatacgctcatctttttcgacgaaatccaggcccatcctgatatcgccactgcactgaagttctttaaaatcgacggcaaatatgatgtgatttgcagcggttcaatgttgggcatcagctataagcaaatcgaaagcaatagcgtgggatataagaccgactacgaaatgcgatcgttggacttcgaagaatttctgtgggctcgcggatacgatgaggccgtcatcgaaagcatgttcacccacctgtgtgatgctacgccattctctgaagtggaaatgaacgtcttctccacggcatttatggattactgcgtgcttggcggcatgcctgcggttgtcgcctcccatatacgcactggcacgttcgagggaacactgcaattgcagcgccagcttattttggactaccaggaggatatccgcaaatacacgcaaggactcgatcaggcacgaattctcaacgtgttcaaccatattcccgtgcaactcgccaaggaaaacaagaagttccaaatcagcaaggttgccagcggagcgcgtttcaaagactatcgaggatgcgtggaatggcttgaaacctcgggaatggtgaatatctgccgatgtatgtcctatcctgaactgccgttgaaaggcaattatgacgaaaacaagttcaagatatatttcggcgataccggtctgttcgtagcgatgcttgacgacgaggccagtgatgatctgcgggccaatcgtgatcttggtatctataagggtgctatgtacgagagcatcgtctctgaagcgctacggaaatccggctatgacctatactactacaaaaaagaggattccacactggaacaggatttcttcgtccgcacgcgcgaatggctggtgccggtggaggtgaaatcgaaaaaaggcaccgccaaatccatgcggacgctaatcgcttcggattcttatccggaaattcagttcggcgtgaaactatccgccggcaatatcggtagcagcgaacacgtgttcaccacaccatacttcaccacatttttgctccgacggctcctgcgcgcttatgacgaggggcaggcacctatgctcaacaatcctgagcggtagcccctattcgtctgcgggcacggcctggcccgggcaggtatggaggacggcgagcatggcgtccttttcttgggaggtgacggtgagctggtacttgtctttgacgccaatctggcgggccacgtagtcgcaacggtagtcggcgttggtgggtagccagtaggcggcggaagccgaacccttctcctgattggccggaccgtcgacggccagcaggttataggggtcattgccgaattcatggcgtttggcagtggaccagtcgtgcgcaccggattgccaagcgttttcaagggccaccacatggtcgatctgcactttggcgctggtggcgcggccacgtacgaaatggatggtctgggcggtgtacggatcggccagtgtgccggactcgaccacacaggaaccggcgtatttgtaggtgatgtccgtgagatcgcgggcgagcacgtcgtcgcgtacgtcgcagccattgccgtcgacgtcggtggtgcggaaaccgaaggaatcgcggtcgtagccggaggagctttggttgtcgtctacggcgagcgcgttcaaagtgtcggcggctgaaccggtggcagtgtagccaccggtgattttggccacgtcggagctgacctgcggcagtaacaggccgatggtcacgccgattgctacggcgagaacgatgagaatcagcacgcgctccagcggtccagaggcgttgaaacgacggcggaagtgggcgttacgacgtgccatcaatcacgcataggtgaaggtgagggggtcgtggccggcgcgggtggggccgtcgagggcgtcgatggcagcgtgttcatcggcggtcagggcgaagccgaacaggtcgagattctccctctgacggtcggcatgcacggacttggggatgatgatcgtgccgttttcgatgtgccagcgcagaatcacctgggccgggctgacctcatgggcggcggcgatcttctcgatggtgccgtcgccggcgttgaggtcggcgccacgcgccatcggcgagtaggcctccacggcgatgccgtgcttcttgcagaacgccaccacttcgcgctgctgccacgtggggtgcagctcaatctgattgacggccggccatgcgccggtctccccgtgcagacgcttcagatcggcgggcatgaagttgcatacgccgagcgtgcgtgccatgccttcgtcgcgcagcttgacgaacgccttccaggtgtcggtgctgcgccagtcgaacggcgtgggccaatggatcatgtacatgtccacgtaatcgagctggaggagtttcagggagttgtcgaatgccttgagcgcggagtcgtagccctgctcggagtcgcgcagcttggtggtgacccacagggtctcgcgcttggcgccggtgttgtatccggaagcggcgagcgcacgacccacgccggcctcgttgttgtatccggcggcgccatcgatgtggcggtatccggcttccagcgcagattcgacgacaggggccacgccctcgtcatcgatacgtagcatgccaaggccgacctgcggaatggaatggccgtctttcaaggcgatgtccggcacgttggcgggattgatgtgtccgttggtcatggcttgtgatgctccttcatgtactgcaactacacgccactgtacacggttatgcaggcgatgtgcgggtgctgcaaccaaacggcatgattgcgcccggccttccgtgtgggagagccgggcgcaatcatgacaacatcacgctctactcctgcgaccggccctcgccctattgttcccgggcgcgaatttgccccggtacaggcgtcaatcgattgacgtttgcaccggggcagaaatcgttgtcccggtacgcaatttcgggccattttcgagaaccaggacaagacaatccccaaagtccacataccccgacaaacagaatcggcggaatacagccaatcccgaaatcaacatactgtcccggttctcacgtagaacgattgacgtgcaaaccggggcaacgggaattgtcccggtacgcgaaaaacacccgttttcgcaaaccaggacagtgatttctgtcctggtacccacatcaaacgattgatgcacgaaccgggacagaatcgcatcgctgcgccgagacagacgcatctgacagccgacaaccgataaacgacagccgacagatggcatctggcagccggttgccggctgccggcaaccgcatcataatgccgcatcagtctctatcaggagcgcttacgacgcaaagcaagcgagaccccgccggccacgccgagaacgacaaccgcaagacccacggcagtcaccgcgctaccggtattgctcagcacaccagtgatcttgtcgccattcgcaccgttggtcttatcgccctcgcccgtatcgggattgatagtagccccgccattacccgcaccgtccgagccgttgccggaaccatcttcggcccgagcggtaaccgcaaccgtataggtttcggtgacattcggattcgacttgagcgttacggtaaccttcgccgcatcagcgggagcggagaaatcgtaatcgagcgtgaactggtcggcggcaagcgtcacgttgcccatgcctgcggaatagttgcccacgaccttgagatcatggtcggcatcgatggcatcgcccacctgataggtggttttgcttggcgtgacggtcaggctggagacctccttttgggcgaggccggcaatggtctgcgtggcggagaaactgtaggcatcggatgcccaaaacttcagcgcgcgcttgccgtcggcggcgttgccactgtcttcggtgatggacgcaccggtgccggcaatggtccagttcttatcattctcagcgttctcgaagctgccgtccgttacgtaatccttggcgggagtggcggtgacggtgatggtgacggtcacgtcgtggccagcgttggtggtgccggtgatggtgtatgtgcctgcgccacgaatccagtcaagcgcagcggattgccaggtcacggtttcggtctcgtccaccccatcctgatagtgtacggccacctcactcggcaattgcgctttgatcgcgtcgatggaatccgagtcagtcgcggtaatctccactggatctatcttggtgaacacatgatcggtgacggcaccggtgtgaatgtacttgaacgtctgcagagaggcgagcgccttgccgccggtgcccacgggcacccatgcgggctcccagtagaacacacccaggccgtcgttttcgccatcgccatcattgtcgccgatattgttcacggcctcggcgaccgcgcgaatctcatcggcctggccttgcgggctgatgtcgtatttcttgaggttatcggcggttactttactgggcactgtgttggaatcgtcgtcgccatcatccaaggtgtatgcccacgacgtttccgccatggaacaccggcaacaacgtgctcgcgtggcatggcgtgtactggcgacagtcaccacggcgaccccgccatggaacgtggcacaaccatgcgggggacgctctatgtgcattcagtcatgctgccgatgctctttaacttgcatatccacgggggcggcacgaggcaattcggccgcctttacccgtacatccatggggcggcgaaaatcccatggggcggtaacttgcccatggggcggtcggtaaaattttaccttccgcagaatagagccattttcaactaccgccccatgagggattcaccgccccatgaggaaatcaccgccccatgggacatctatataacaacgacttcgtgcagcagcaccagcattacagcaatgtcgttcagcgtgtggaggcgcgggcgatgacctgggattcggtggtgagcagttcggacttggtgatgctgccgtcgatgcgtccgaggatgcgatccactgccgtgggagccgtccagtcaaggcgggaatccatggtggtcagcggaatctgcaggtagggggcttcctcgttgttatcgaagccgatgacctgcacctgcacgggcacctcataaccagcggtgcgcagagcggtcaatgcgccgatggccaactgatcgttcaaggcaatcacaccgtcgaatggcacgccggaatcaatgagccgctgggtcacacgggcaccggctccgatggtccaatcctgatcggtgttgccaatcagctgcggatccaaggagagcccacgcctacgggtctcttcgatgatgccgcgcagacgcagctgcgcgttgccttctacggcattcagcaatgcatcttcgtcgtaaacgtcacgggcaccgatcactgcaagtctggtggaaccgcggtcatacaggtagcctgcggccatggcggctgcggatacatcatctggggtcacgtgatccacaatgccccacgtggtacgcgcgccaacgatgaccagcggaaaatcaaccttcagatcatcgggcgaaatgttttccacctcgctcatggaaaggatcatgccatcggacaccgtggagttgaacttcttcagcagatcgcgcgcgcctttcgcggagccttccgcatacgtggtgacgtatacggaatagtcgcgctgacgggcggcctcgatggtgcggttggcgagctcggccagatatggcggaatcagcgaaggcacggcgagggtgatgaagccggtgtgatcgcggttgaggttgcgggcggccacgttgactcggtagtcgaggtccttaatgaccgactcgaccttggcacgggtctcatctgtcatacgcccggagccattgatcacgttcgacgcggttttgagcgatacaccggcggcctgagcgacatcgcgtagcgtcactcgacgcttggctgttttctcgtcgctcatgccgcactcctctatccggacaacattgccattctagcgcggtttagcaggacgttttagcgataagaatggcgttgcggttcagcgtatatccaacggcgtcagtctcgcaacggtgggcgatgatgggatcaccttccacaccgttgatggcgacgggctggtttgagcggttgaggtagaaatcgaagcgggtggagccgtctgcggatcggcggatggtgtgcaggatgcggggatctgtggtgggataggttggagtttgaccactctcagtcggctgcgccgacaactcccgccagcgggagccaagtgctttgagcaactgggcaatgtcgtgacggttgaggtcgcagcccacgtagatggcggtaccgttgccataggggcggctggtgatggcgggggtgcgctccagctcccagtcggcggcggactcacctgcgtaagaggcaagcactgtggtgtccgcggctacggaagtcacgtcgttctgccacaggcgggtcgtcagaccattggacaggctgatttcgctgggctcgccttcggcttcttcaccgaggatgttgaattcttcggagcggatgccgagcatgtcgcgtaggagcccgttgccggcgccggggtagccgccgaggccgatgtggaagtgctcgtcgatcaggccggcggcatagccgacgatgacggttccgccggccttcgcgaagtcggcgatacggagaacgtcttcgtcggacaggctgagcacggtgggcagcacgatggttttgtagccggtccagtcgtaggcgagcggcaccacgtccgcgcgcagcccggcatccaggaagccgcggtaccagtcgcgcacgtcgtgccagtggttgagtttcatgctgggcagggtttcggagcgtgtggcccattcggattccgcgctgaacaggatcgccgtgccggcacgctcgagctcagtgccctgcagcccggcgtcggagagggtcttcagcgccttaccgagctcgcatacgccgcggaagaccttggaatcggcgcccgcgtggggcagcatggcggagtggaacgcctcggcgcccgacttggattgccgccattggaaaaagcagatggcgtcggcgcccatggccacgtgggccagggagtcgcgcatgagttcgccggcccgtttgcgtgtgttcagcggcttccactgcacggctgaggtggagtgctccatcacgtaccacggcttgcccagcgcgagggagtccatgagcgcgtccgagcaggcgagttcgtccaggtgggattcgccctcatggaagtagtgatcgttggacacgaagtccacctcatccgcccatttggcgtagttcatgacgcactggtcggtggagaccatgaagttcgtggtgaacggcttgtcggggcagatctgctcgatggcgtcgcgttcggctttgtagaagtcgagcagcatgtcgttgccgaaccgctcgtaatccaactgctgcgacgggttgaccatggcgtcgccgcccatgtgacgtggcagcagcacctcgtcgaaactgttcacgtgctgcgaccagaaggccgtgccccacgcctcgttcaacgcgtcgatggtaccgtacttggcctcgcaccacgtgcggaacgcggccaaggcgttgtcggagtagtcgtagcggttgttccagccgtattcgttgcccatgtgccaggcggtcacatacgggttgtccttgtagtgttcggcaagtttgcggcacaggcgcagcgcgtattccttgaacaccgggcttgtgggctgccacgactggcgtgagcccgcgttgacggtatgaccataccggtctaccggcagcacctctggatgggattcgtacagccacagcggcgcggcggctgtggcggaggccaagtccacggcgatgcctgctctgccgagcctgtcgatcacatggtcgagccactcgaacgtgaacgcgccctcgaccggctcgatcttgtcccagctgaaaattgccagcgatacgacgttcacgccggcctcacccatgagacggatatcctcgtccagcgtctcctcgggccactggtccgggttgtagtcgccgccgaacgcgatgccgcggccggattccgtcagcagggacggccacctaaatgctctatgagtagtcatattaatcaaatcctttattgtatcggctcatggccggtgctgtgtttgccggttttgggctttggctcccctcagtctcactgcgttcgacagcgtcatcggcgctttgatcaaggcgtgaatgctgcgttgcgttactgcattgccatgttgccatgttaccgcgttattgcatcgctacgttgccacgttgccacatcacattgcattgccgcattgctgcgttgccgcatcacatatcgcaacacaaacgcagcaacgcaatgacgaccggagatggcatcgccgccacccgcgaggaaccgcagtgcaacgcggtaacgtaacgcaatgcgatgtgattcccgcgtagttacaggcagttacagattgagtaccgcatcagcaatgcgcatggcggattcgcggtgggagaccagcaccacagccgcgccgcgctccttgtctgcatgctgctcacccacggccatagcgtgaatggaacgtagaataatagcctcgttcaaagcatccaaacggctggtcggctcgtcgaaaagcaccagatcagcattgcgcaggaacacacgagccaaaccgatacgctggcgttcaccttcggatagacggtcgcccaactcgcctacctgagtatcaaggccatcgggcagggaatcaatgagatcaagcacggaggccttggcgagagcctgacgcaaacgagcatcgagaccgtcagctgctgccacctgaacggcatcgccctctgccgattgcgccgccaaccgctgctgtcgggaatcaacggtcttggcacccacttccccattgcctgcaacatttgcagcttcaacctcggactcaggcaaagcaatcagcagattgtctcggatagagccatcaaacaggtgggtttcctggctcatcatggcctgaatacatcggcgagcatgcacatcgacctcgggcaacggcgtgccggacaacgtcacctgaccgcgctgcggatcccagtagcgcagcagcagcttgagcatggtggacttgcctcggccggacggcccctggatacccagcacgccatgctgcggcacgtcaagcgagaagtcggacaagacttcgcgctcccccgcatatgcaaaggtgacgtcatcaagacgcatgcccatatactcctgcggcacaacagtgccgttctcggtcacagcgggcacctcgtccatcagtccgaacagtcggctagcggacgcgaaggtctgagtcaggttagcgggcaaggcggcgagcgccaaagtcggtccgaacgagccggcgaacagcacgaaggcggcaatcagagccggaatgctctgcgggttcgcgccggcacaggcaatagccacggcgaccgaagccgctgtgagcacagccaccaagagcccgctgattccggtgaaacggccgttgaccttgctgagtttggcgtgatccttccacaacgcatgggtacggtcctcgatggcctgcgcacgttcctcgccgcggccaaatcggatgatttcgtccaggccgcgcatgtcatcgagtatcacatcgtcgagttctccggcagcgccacggatggcagggccaaggttacgtacgccggtggcaaagaatcgcggcacaaggatgccgataaccaggtgggcggcaatcaacgccagcgccatccatgggcttagggtggcagccacaatcgtgtagatgatggtggaggttaccgcgatggccaccggactgatggtgtgggcaaagaagatctcaagcagttccacatcggtggtcagcatggcgataaggttgcccttacctttgcccgcgagcttggccggcgccagtctgcgcaacgcggcgaacgccttggaacggaagagtgcgagcagatggaatgccacattgtggttcagatattgttcaatgtatcgggtgatgccacgcagaagagcacagataatcatcatgatgacggcgggcgcaacacccatgccccacaccggattaccggtaagtgcaaatgccgcgataatgccgaacacgggcaggaaagtggccgaaagatggccgatggtgccggcggtggaggccgctgccatcagtcctgccagaggtcgggcttccttaagcagtcgcctgatcacttggaatgtgctcattttggaagacgaatcgctatttgcaacaccagccggagtctcagccgaggcctgctcactcccgccaacggaagccgtcggcaaagctgactgcaggcggtcaaccgtcatacccgcctctgcgcttacgcgcgctgcgccaccctcagtccgactgtcgtcggacagctcctgcttgcgggaaccaacctgcagcacacgccgagcatggccttctccgaagttctcaatatctgcctgcgtggtaaacagcttggcgtagacgccgtccgccgtcatcagctcggtatgggtgcccctctcaaccgacttgccgtgttcgagcaccaccacttgatcagcgtattcggcgttggccatgcgatgggtgatcataataaccgtcttgccgcgggattgcgccaattcgcgaattgtatccaggatcagctcttcggattccatgtcaacgctgctggtcgcctcatcgaacacaaataccggcgaatcatgcaggagtgcgcgggcgatggcgatgcgctggcgttggccgccggacaggttggcggcatcggactcaatcggcatgcccagtccgttcggctgtgcgtgcacgaagtcggcaatgcgcgcctgctcgagcgcggaccacagacgggagtccacggaatccggcgaatcaggaatctcgtcatcgggcaaggccatcagaagattctcgcgcaatgcgcccgcaaacagatggctgctggcaccaatcacagtgacggctccggccagtgtttcgcctgacaaatcggatacctcgacgccgttcagtgtgagcgaacctcggtaaccggccagtgtaccggcgagcagcgaggcggccgtggacttgccggaaccggagatgccaacaatggcggtgaactgaccgggccgtgcggcgaaggtgatgttggtgagcgcaggagcgacggcggaattggggctggtttcaccttgcttatcggtctttgcggatgcggacttggagtcgccgtgcccggcatcatcataggaatagccgacgtggtcgaagcggaccgtcagaccgtcgtcagcggaatcggaatcgttggccggcagggtcgccgtgccatgctcgggctccggggtgtccagcagagcgaagatgcgcttggtggaggtcatgccgttcatcgccacgtggaagaacgagccaagctgacgcatgggaataaagaattcggcggacagcagcacaatcagcagcagtccggcgagggtgagcgggaagcccgcaccgaacggcatcaggtattgcaggccgtagaccaggtaggcgaatgcgccgggcaggtgggcggcgagcatgatcggcgaccagccggcggtgctggctcctgcggcggctgcggtggtatgcgcatactgctgcggtggtatgcgcgtattgccataacgccacaccaatgccggccgccgcaccgccgtaggccacgatatccatggcggtcagcgagcgcagctggatctgcagcacgcgcatggtcatgaccctgcgctccacattccgcgcaatcccattcaccttaagcgaacgccctcgcacatgccagacttttaaagtgagagaggccacagaattttcgattgcggagtgcgcatgctagacgcgccaaccagaagaaatatgcttcgatatcaggggctgaagcatcaactacacccaatacgtgcatttatccgtttcgaggaagctaatttttgcgtttgccggaggtctacttccgtttcaaggggctgatttcgcatttgccggaagtctatctccgcttcgaggggctcctcatccatgtaatcggaagtataaacagctacacgtcaacgtcattccgccgttttagggccgcgtctacttgggcatcagcccctcgaagtggaagtagacttccggataaggcaaaatcagcccctcgaagccgagaaagcacgtttctacggtgtcagaagccgacggaacgcaaaagggtcgtctgcacgcagacgacccatatgatcaattcgccaatagacgcagcaaacgcggcctagtgctgcttttgcgcggcgaccagtgcttcggcggcggccgtacttatcggacaggaagccggagaagccggcgccgatcacgccgccgatcatgatggagctgatgaccagaccctgcagggccgggctcagcgcgtacttgtcctgcaggaagtcgatggctcccgaaatggacacggtgtcataaccgtagagcaaaccggttagacacggcgttgtatacaatccacaaaaccagacagacaacttctccattgcccacaacgcgcgcaaccttacgccagcgtaacctaacttgtcagaatggctcgattttgtcaacagccatcacgcaacgcacgtaaggacacggcccgcttatgcttgaccactacaccacgcctggcgaatccatcgaaatccgcgacaaccagaccatctactccctacttaccgatcgccttgcccgcaccggcgcggacacggtaatcgccgccaagaaaatcggccccggccgctggcagaacgtcaccaccggcgaattccacgagcgcgtggtctcagccgccaagggcctgatcgcgctcggcatcgccaggggcgacgcggtgaccatcttttcctccacccgtctagaatggggcattctcgatttcgcactggccgcggtgggcgcggtaagcgtgccgatctatgacaccgactccgccccgcaggcccagcgcatcatgaacgattcggtggtcaagctggcctttgccgacaatcgcgagcgcttcgaccggctcgactcggtcaaggaccactgccctgccttgaagcagattctcatgatcgagggcaacgcactgggcgcgctcgaaggtctgggcgtggctgtttcggacgaggaactgaacgagcgcgtggccaccgtgcgcacggacgatctggccaccatcgtctacacctcgggctccaccggcaacccgaagggtgccgaactgacccataagaacttcgtgtccatcaccatcaccgcctcgcaggcgcttcatgaagtggtgcttgacgaccatccgcgcctgctgctcttcctgccgctggcccactgcttcgcacgatttatccagtacgcctccatcgcctccgatgacggcgtggtcggttatctgccggataccaagtccctgctgccggacctgcgttcgtttgaaccgacctacctgctgggcgtgccgcgcgtgttcgagaaggtgtacaacgccgcctcgcacaaggccggtgccggctggaagggccgcctgtttgtcaaagccgccgaggctgcgcgcgtctggagccgcaaggagcaagccggcgagcagcacacgtttgccgaaatcgccgagcgcgccaagtatgaaacgctcgtctaccgcacggtgcgcggcgctctgggcccgaagatcaagtatgtggcctgcggcggcgcaccactttcgcttgatctggcgcatttctacaacggcatcggtctgccgatgattcagggttatggcatgaccgaaaccgccgccccgttcgccgccacgcgcgtgaccgataatgtgatcggcaccgtaggccagcccgcgcccggctcctcgattcgcatttccgacgaaggcgaactgcaggtcaagggcccgaacgtgttccgcggctaccacaatctgccggagaagacggccgaggcgttcaccgccgacggctggctcaggaccggcgacttggccgagatcgatgacgccggccgcatcatcatcaccggtcgaatcaaggacattattattaccgccggcggcaagaacgtctcccccattccgctggaggaggagatcgtcaagtgcccgatcgtggagcactgcgtggtggtgggcgaccagcgcccgttcatcggcgcgctggtgacacttgacccggagtcgctggccatttggctgcccgcgcacggcctgtccacggagacgccggtcgaccggctcgccacgaacgccgcggtgcgcgaggagatccagcagtacgtggacaaggcgaatgcgacggtctcgcgtgccgaatccgtgcgcaagttcgccgtgctgggcacgcagttcacgcaggagaacaagtgcctgacgccgtcgctgaaggtagtgcgcccggccgtcaaccgcgtgttcgccgatgtgatcgacaacgagatctacaacggcaagcggtgaaacgcgcggttcgtaatccgacacaaaaaagggccttttgaaccgcacctccgatcatcgaatctggattactccagtccaacaatcggggtgcggttcaacctcgccgggcacttcatcattcatcactggcatggttccattatcacgcacattatggcgcagagcgaatacggcaccccggcaacgcgagtgggtcgccggggtgccggagcgcgggggtgccagaatgccgaagggccgggataccggagtgcccggtcgccggggtgccgaaatgccgaagcggtgtatgggtgccgcccggcccaggtgggtcacgcccgggtcagtttcttgctcctgagacgcagcacgacatcggcggagtcggcgacacgcttggaatgcgtcaccacgattacgcatttgccgagctgatgggcggcatgctgcagcagatgaatcacctcgtcggtcatctccgggtcgaggctgcccgtcggctcgtccgcgaggatcgcgcggcccggggcgaccagcgcgcggccgaccgccacccgttgacgctggccgcccgacaggtgcatgatgttgcgcttggattcctcacggctcaaacccagttcctcgaggatcttcatatcggccttggtgctgaccagccgcaggttctcttcgggggtgaggtagtcgatcaggttatggtcctggaacaccagggacacgtgctcccgacggtgcttcgcatagcccgatgcggcgatgtcctccccctcgaagcggaccactccccgggagggggcgtccaggccggccagcagcgacagcagcgtgctcttgccggcgccggacgggccggtgatcgcatacatcttcccggattcgaaatccgcgctgacatccgagagaacaaggatcttcgccgcgccgtaggcgtaatcgacatggtccagttgcagacagttagacatgattggtgactcctaacgcatagaggaaagaatggatttcggggatttggacagtacggcggcgcatgacacggcaagggccacggcgatgaccgcgcatccgagcagcaggatgagcaccgtctgctcaggcggcaaggcctccacgtgcaacgattccaacggcgcgacgcccgaatcgcgcaacagtcgggaagacacgtatcccgacagcatggcgccggtgcccagcgaacacagggcggcgaccgccgccatgagtccggtttcaatggcgagttgtgcgactatccgcatcttgtcgatgccgagggccagaagcgtgcctatctcatggatgcgtgagcgaatccagaagaccagcgccatcgccagcaccagtacgtccgcgaggcagacggacagcagcaccatgcgcaccagatcacgcaccgtctgcacggattgcaggacgccggagagccgggccgaatcgtcggtgacgtcgtacttgccaccggccatggtcttggcctgactgaccgccgcggacaggtcctgcggattatccgacaggcatcggatcatgccgatccggtcgtttccggtcagagcggaggtcactcgcctgcccgaatagatgaggttctcggaagtgtccgagggcagggggctttgggcctgcacgttgccggagaagatcccggccacacgcaccgtggcgttgcgctcctcctgccggagacggaatgtcgagccgatcgataggccgttctgcagcgcgaagtcgcggtggaccagcacatcgtcgccgtcgcccgagatatggcggccctgctccaggcggtacaggccgctctggaattcctcggacaatgaggaatcggtggtgcccagcacgctgacctgcatggccagatcggagtccaatcgggggccctgccgaggcatgaccgggcgcgcgccatccacctgcgccaaggtcttcgtcgcataggcggtcttcgtcacaccggggatacgcgagaaccggctcgcctcctcggcgctgatgggattctcgccggcactgacggtaaaccctatgcccatgcccgcgccgatgccgtcggacatggtacgcagggccgtcgagactccgacctgcgccaccaggctcgtgaagaccatcagcatcagcagaccgatgatgccgctgcgtaccggcttgcgtacgatcgccaacgtggcacgcttccacacattcatgctcatcatcgattctccgacaggtctcgcggcgatttgcgcagcatcggcatgcacgccaccgcgacgcacaccagcatcaccgccaacaatccgagcgccacgtacagcatggcggtcccgtcgaccgacaccgtgagcgaatccagggtgcgcaccgacatgctggattcaagatcgccgccgacctgccccatgctgctcagctccttcgccgcggaggcgttcacggaatggagcgccgtggtgccgagccattgggccattccctgcgcgcacagccagccgaggacgagggacggcagaccgatcagcatcatctcggcgaggtattgggcgaccagtgagggcttgccgacgccaagggacaccagtatgcccatctcctgacggcggtcgttcatccacagcagcagcatgagactgagcacgagcacggccgagacggtaacgccgatcagggcgccgcgcatcatggagcgcacgccgcgggcggcatgcagcatgctcgacgaatactggtcgttgcgcgtgatctgatagttgttccaatccaccgggagtttctttgcggcgtccatggtcttctcc

SEQ ID NO: 2273 - DNA, 22267 bp, Unknown
  R119_18m  MAG No. k141_10972
gctcaccgcggccaaggaagtcattcgcctggtgatggtggatcgcgagcacctcaagaccggtttggtgcagattgccaagggctggtgggactcgcgcaagctgatgcacgaccccacctggaagcccatgccgtcgcttgagtgacggccctgccccggcccgtccggcgcgtccgcgtgatggtcgcgttagactgggcgcaaccctacgaactgatgaaaacgtatggaaaggaaggtcaacgatgattgaaactgcacaggctttcggtgttgacattggcggttccggcatcaaggccgcacctgtcgatctgaccaagggcgatttcgccgagccgcgattgaagattctcactcccgaggtctccacgcctcaggccgtggccaaaatcgtcaagcagcagctcgaccacttcgaagtgcctgaatccgcacccgttggcatcgccttccccgcgccgatcaagcccggccagaagctcgacttcatggccaacctcgaccagtcttggattggcgtggacgttactgaagtgttctccgaagcctgcggccgcccggtcgtcgtggtgaacgacgccgacgccgccggcctggccgaagtccagttcggtgccgccaagggccaggatggtctggtcatcgccaccacactgggcaccggcatcggcaccgccttgatctacaacggcgtgctcatcccgaacaccgaactcggacacatcatcctgagcgccaagcatctggacgccgagaagtatgcctcctccgcgattcgcgagaacgaggaactgggctacaagaagtgggccaagcgtctgaccaagtactacggccttatggaaaagtacttcaacccggacctgttcaccgtcggcggcggcgtgagccgtcagagcgaaaagttcctgccgtacgtggatatcaagaccccgattgtgcccgccaagctgcgtaaccaggctggcatcgtcggtgccgcctactacgccagcaccaagcagcagtgagctgagttatttctgctggcgcaggagccgtattgaccatatgtaaggccgtccaagtatttcgggcggccttttttaatgagtaattcgttcattaggtcgattatgtgttcattaggtcactcccattccaaacctgaattgcaatgggctcggaatggcggcgtttcaagcatcaacaattgtgaggctcgactagcagtgacctaatgagcgcgaaaatgacctaatgaatgtagctaggccgttattcgatgtggattgaagtcatagtatgtctgacgactccgctgccgtgccgcacgattgtcgtagtgctggatgctggtggatatgaggcctcgatatacctggctcggcaggggtggttttatcgtggagggtatgagcgtgcatttctcttctcgtgtggatatttctgcgccgaatcccattgcggcggccgaggcggcagccaaggcaaacggcatcgcactcagcaaactcaacgattccaatccgacccgccacgggttggcacccgaattggtgccgagcgtgtatacggccgacccgcgtggaccgcgtgcggcacgagaatcattggccgcattcctcaatacggcaaacgtggtagacgcaagcagccctcagttggcttcgcccgccgccggcgagggcaggaacgagcgccatgccgctttcaccaatgtgaataccgccatcgagggcgccgacccggacgccctgtacctgctgagctccacgtccgaggcgtattcgtggctgattaagttactttgcgatgccggcgacgcggtgctggcacccaaacccggctatccgctgattgagtcgattgcacggcttgaatgcgtcgatacggtcgaataccagttgcaattcgacggctcctggttcatcgacatcgccgaactcgagcggctactcagcgagcccggtggcgaacgcgtcagagcattggtactcatcaacccgaacaatccgaccggttcgtacgtaaaaccaaccgagcgtgcacgtatcgtgacattgtgccgtgggcacggcatcgcccttatcgccgatgaagtgttcttcgattactctctcgaacctttccccggcgacgcacggctcgcgggggagcgcggcgtgctcaccttcgccctagacggattctccaaaatgctggccgcgccgcacgccaaagtcgggtggattcaggtgtccggacctgccgaggacgttgccgaggcccagcgtcgactggacgtcatcgccgacgattatctgccgatgggcgacatcatcgccgaacggattcccgcattattgaacgccgcgcccgcacagaccagacgggtgggggagcgcgtgcgcaataacctggccaagttgcacgagttgcttgacgccgatcccaacgggctggtcagcgtgctacgggccgaaggcggctggaacgtgctgttacgagtgccttccgtcatcgatgagaacgaactggtgttgcggctgattgacgagcaccaactcaccggacagcccggctacttcttcgacatgacctccaatggatacctggccgtttccctgctgcccgaaccggacgaattcgagcgtggcatccgcgccgtgctcaataccgtcgccgctttgctgcgataggccggtgtttgccggcaccacacctgtactccacgtacaatggcggcatgggattcttgtttagaccgaaagaactgccacacccggcatcgctgacgttcactttggaacaggccgggcatacgtatgatgatgggcacgtgggacttgctcccacggacatcaccatcagcgagcggcgggtggccgtgatcggactgaacggcgcaggcaaatccacattgctgggtctgctggacggttcgttgaaggccaacgccggcacggtgaccattgcgggcggtgaggaacgtcttgacccggctgtgaagaaggacgcgaagcgcatcgataatctggtcggcaaagttcgccgcgaggagattccgaacagtttctaccaagcggcgaatatttccgaggctgtttccgaagcgttgaaaaagcacaaggtgcccgagtcagaacgtcatgcgcgcatcggtaatctgttcgcgcattttgatttggcgcaggtctccaaggccaaggccggcgaattggactccgagaaacggcacctgctggctattgcggccgcgctgagctttgagccgagtgcgattgtggcggatgagccgagcaagggattggatgagattggcaccgcgcatgtggccaaggcgttgttcagctacaacaagcaggtgattttcgccacgcatgacacggatatgatccgccggcccgaatacgccatcgaccgcatactggtgctggacgagcacgcggtcgtgtttgacggagcgccggctgaggctgtggcgttttatgaggatctgattcgacgccgatacgagactagagcatcgtgaaccatgcctgaacctgatgccagagcgtcggattgttgtcgatcatcgaatcgctgcgcgactgcacgaagcagctcagtatggctatgcccagcgcccacaatacggccagcaccacgacccagcgcatcagccaacgccacggagtgacgcgggcgatgccatcgtctgaagcggcgtcgttggcccccgccaatgaccggctcggttcgcgcccattgaccagccacagtagccccggtatggacgccagcgagatcagccagccgaaatcggcggaataccgccatcccaaaccgccgacacggctgtcgaatacgaccagcaccgccgccacggccaagcaagacatcagccatggccgcatgccgtgtgtttccaatctgcgcagcaggggcagcgccaaagccatcaaggtcagtggcgtggccgtgaaaatcgcgccgaccatcacctcgtaataaccccattgcggcatcggggcgggagagcccgccagccacgggaaacgatccatgaagcgcagcggcaggaacaggtaataccagatgttggcgggcatatccgcggacggggtggtataccgggtcatatcggatacggagaactgatacgcattgccgaaattgaacggggaatcgaaccgaaccatgttccacgccatcagaggcgtcacgacgagaatggcgggaatgattaccgccagcggcgcgcgcaacgcctgcaacggcttgatgcggcgtgtgcgcagatcggtgcccagcgcgcgaatctgcggccagaacagggggaacgcaagcaatgcggccaaggtgaacgtcggtcggcatccgaaattcgccgcaatgcacaaggcgcccaaggccagtcgtggcagggagagaggcttggcatcgcccgcctgccatcggtccgatggtctcagcggacggcgggacgtgtccgcgccgagccatagccatagtcccagcgacgtcaacgtcagcgatgcggcgaacggtatctgatagaagttcgtgcgatacagcaaataccccacttgcgcgctcaccaacgatgagaccactactaacgacgcggccgccaccgaagtcttcggcatcacacgatggatgacgcgcagcaccagcaaggagaagaagatgatgaacagcagcacgagaatatactcggcggcggatgtcggcagattatgaccggccagcagacgataggggacgaacagcagcactgcgggcaacacgccaaaataggaataccagtgaccgtcataatacgcgtaatcccagtagagcggactggctccattggcgagtagctgggcacgtgtggctacgtcataggggtgctcggtggcggccagttgttcgggaaccggcaagtcgagccagggccggccggcgaccagcgcatcggccacatgcccatactggtcgaaatcataggtgtaatcgccggaaacgtggaagacgagcgaagacgcgtaccacagttcgtggatgatggatacgccgataagcagggtaggaatcgccagaagccccacgaaagcaagtcgttgccgagtgctggacgggtcaagcgtgatacgccacaggcgcgatcccggcctccagacggcaatcatcagcaacaccaaggccatggcgagcacgcgcatccaattgatgacgaacggtacgcgcacgttggcgcgggcgtcggtgaccggtacgatcgcgccgcgctcttcctgaatccaaatacgcacgatgccggcacccggcgccttgacataatggctgcgaatagcgtcgggattcatcgactgggccttgccggtgatgccatcgacatccgcgcgcacatgaatggtcgccagcggtttgaagacttccttatcgtcgttcgctttggattcggcctcggcctgctcgcgggccttatcgatgaccttgctgctctcggtatcgatgcgtaggtaatccgacgtgccgtccgcggtcagttcaagataggccttggtcggatcggtgacggtcaacatgccatcattccggcgcgtgagacccgaacccagcgtgttatgcacggcgttcgtatccgtgctcgctccgagcgtacgccagaacggcaggttgaacacgatgcactccatggcggcgatggcggcgacggcggccagcaaggcgatcagcaggcgcaccaaacgcagccggtgccgggtatccgggcggctgggcaggtgccgttcatgattcgacggcatcggacggtctgcgcgagtgtggtctatggaatgcacgcatttattctataggctttattcgggcttgatgtcgggcaaacaagagacaatgtgaatcatgccaaaacgtacatcggaccatgggaagcacaaccgcacgccactgctgggcgggctgaaggattcgatgaacgcgctcgcggccgatctgggactgtccaagccgaagaagcacgatacgaatccgttcggcgatgccttgcgggagaccagtgagcgtaaaggcggcattatcgacgaactgactcgccatgcagtggcgctgagtcctgtaatcaagcgacgcaccttccccgaattggagaacgtgccggaagggctggtgcttggatgggcgcagctgccctccaccagaggccgtggcttttcgcttggcattttccccgaccgcgatcattttgcgcaggtggcgttcgccgatacgcatggccgcgtattcgtgggcaccgaccccaacatggacgtgcaggatatgcaggcgcgattcatgttcggcaaggaaaaggaagtgactctgccggacggtgagcggctgggcgaaagcgacgagccgcgttcacgttccggtttctcccgtgcaggccatggcctgggaagtgcgctgcatcatgggcgtggtttggggcgtggccttggtcatggtgctgacggcgtgaaggccattaccggtggcgtggtggggcgtgacgacaccggacgcatgacgtggctcgcctcatggctcaaggccggcaaccggtacacgcttgagcagatgcgtgccaatctgccgcctgtgatgcgtcatgatttggaataccgcgatgccattaccatcgcgttcttcgccacgtatatgttgccgcagatcaatggtctgctcatcggattcggttccggcaatatcttccgccgtctcaaccgtgaggcgccaatcggtgcgattcgccgttcggtgcgtgacactttggcggcacgagcccacggcatgcgggcctccggtctggaggatcacttcgccgatctgatgcgcgaagccggcgccctcgacaccacgccgggactggaagcggtgcatggcgccgaaccgttgcacctgtacacctcgacgtattcgagcggctatttctttacgtgggataagtccttggcattcgggcaggcgctgaaatccttgaagatcgaaggcaacctcaaccgattcgctgcggtgagcgcttggctggagcgcaacgcttccttggggcgcaaccctacggaagatacggtgacccgtgccgaggccgcgcaaatcgacatgaaactcattgagaaccctgcgattatggcgcttgacccgtatgatggcgagcaggagcgtcgggccgtgctgagcctagtcgatatcgccgcacgcacggctgggcagattcgcagtgaattccctgatcctcgagatgtgctgatccagcagaacgtgccggattcgggtgtgacgaatgctgcgggcgctgaaagtactgagagtgttgagggcgctgtagagcggaccaataagagcgacaccaacactcaagccgctcggccttcgtattcgccggcaaggagcgacgaatgggtgtatcgtcagaccctctcctcactgttgcgccggttacggttgccgtatcggtttgatgtggagttccggtcgcgcttggattcgggtgaagtggccattggcttcaccactgccggcacctcgatgatgcccgatagccggtatgacaccactcgccgtacgtggcatgcgctgagcagcgccgaacgcgcgtcgatgagcgccgcctacaacctgcgtgtcggcctgatgatggcagcgctgagtttcggcaccagcgaatccgtgcgccaggtgtcgttgcacatcgattccattggtcttgaagaggcgattgccgaacaggattccgccatcgaggcgatgatgagcgaggccctaagcgccttcgaacatctgcgcagtggcgatttggggcgtgtgggttccaaagccgaccccaaagatggtgatttccatggcgacccgacccgccccatcacccatgaggagacgttcgggcaggcggcgtccggtgacgaacgcggcacggccgggggaacaggcaacggtaccggaccgtctgcggatgctacggatcaggccgcggccgaatccgctgacgccgatggcgccgcgtccatcgattcgcagttcgaagacctgatgaagggcgtcgatatcgacgaaatggcgttcggcatgccggacgataccggcgcaggcgacgacctgggcggtatcggcggcgaggacgtcggcactgacgatgctgatggggccgccggcatggacgatgatccgatgagcgtgctgcgccgcaatcccaccgtgcgcaatatggtcaccgtcaccttcacccgtgatgccttcctcaagcgactggacaccgatgggcttgacaatcccgaggaaacctaccgcatgttcggtgccgtgatggacgtggacggcgaaggcggcctgaaacccatcagcgccgacttcgacttggcggacagccggttctctcccaccggatcccaggaggagcccgaactggccgaccgtcaattcagcccggcgaccgctcacgtgctgggcgcacagaatagtgccggactggctatccagcgagtggacttactgcagcatggcgtcaacgaattccacgatatcgccaggaacacgtcgctcggctccgtggaaaaggcccagcgagccatgcagatcatcgaatcgatatgcgatcccgaactgaccggtttggcctctcaggtcaccagtgcgttgatcgatggcaaggacaccccggacttcacgttcacacttgccgacgatcttgacaaggagcgtctgcgcgcccgagacatgctgttctcgggccaagccgatcaggccatcgaagcggccgaagcggctgtggcccatttggatcaggtgtatgcggcaggccatggcgtacctcgatacttcaactcctatgccgagcgcgtggtctacaaccggctgttcgccacattggacgagcgtacggtgctcatcccggacaatctgttctacgcacacatggagctggctgacgtgttgagccagatcaggggtgccgaggcggccatcccgcacctcaaccgtatggtggcgtacgcgcccgcctacccgctctcacatctgaagctcgccatccaactggcccgcaatgaggattgggattcggcacgcgccgcctgcctgaatgctctgcgcgtggccttggaccgcgacgatgccgcgttcgcctactaccggttcgcgtacgccgaatggatgcttgaccggttcgacacagccgccgcagcctacattatgagcgatcacatcgctcccggggccattggttcgttggaaagcgaactgcaggaactggtttcccgtgcggactcgcagtgcatgccggtgcctgaatcggtggagacggccgcccatgtgcttgccacgcatgatctgccggtctggccgcataacgaagtggctgacatcgtgcgtgacgccgcccgcgtgtgcgtggatgaaggcatgttcgtgccggcccgcacgctctcggtggccgtggcccgcatgaatgacggtgaaggcgacaacatcgacatcatccaagcccagttcctgcgctcgctatccgcgtagccgcctgaggggagttgacggtatagccggccgaggggagccgagcccgctaggatagacaaccatgagcacgaacgaacaactggcatgggatttcgacgatggggatgtggccgaggtccggcctgataccggtattgcacgttttgcccctggctccgaacaatggatagccgcactgcagcccactgacgacgacgcgatacgcctcgaccgtttcgacgtgaacacgatgaccgctgaggccgccgcccgcctgtgggctcgcgtggccgcatgggtggaatccgatcagatcgcctactacatcgacgactcacccgtcagctccgacgccgcctacgacgcgcgcatgcgttgcctcgaacgactcgaagcggcgttcccctcattggacaatccacagtcgcccacccatcgcgtcggcggctccttctccaacgacttcgcctccgtgcgccaccccagccgcatgatgagccttgatgacgtcttctccatcgaagagctcaaggattggtacgattcggtgattcgcgacctcgattggcccgaatccaagcccctgcccatgagctgcgaggtcaaaatcgacggcctcgccctgaacctcatctatcgcaacggcgtgcttgaacagggcctgacgcgcggcgacggcgttaccggcgaagacatcaccctgaatgtgcgaaccatcggctccattcccgccaacctcggcggccccaaggaagacgttccggacttcgtggaaatccgaggcgaagtgttcatgcgctgggatgacttccacaccctgaacaacgagcaggaggacgccggacgagcgcccttcgccaacccgcgcaacgccgccgccggctcgctgcgtcaaaaagaccctcgcatcaccgccacccgtcgcctgagtttctatgcgcatggtctggggcagctcacctgggggccggaccatccgcgcggcacccatgacgtggtcgccgaccagtcgcaggcctacgatctatacaccaggtggggcgtgccggtctccccgcacaatcgtgcggtgacctcattccaggagatcctggacatgatcgagtactacggcgagcatcgcggcgacatcgagcacgcgctcgacggcattgtcgtcaaggtcgatgacctgggcctgcagcgcgccctcggtgccacctcgcgcgcgccgcgctgggccatcgcctacaaatacccgcccgaagaggtcaacaccgaactgctcaacatcaccgtgcaggtggggcgtaccggccgtgtgacgccggtcgccgtgctcaaacctgtctacgtggccggctccaccgtggctcgtaccacgctgcacaacggatttgaagtcaaacgcaagggcatcctgatcggcgacaccgtggtggtgcgcaaggccggcgatgtgattcccgaactggtcggcccggtgcttgaacggcgcaaagggcgtgagggccagctgcgcgaattcgtcatgcccgagttctgcccttcatgcggcgcgaaactggcacccgccaaggagggtgacaaggacatccgctgcccgaatgtggaaagctgcccggcccagttgaccgagcgcgtgatttcgctggcctcacgcaaggcgttcgacatcgagcatctgggtgaacagtcggccatcgctctgaccaacccggaggagaaccggcctgattcggtggcgacctacgcgccgaacatcaccgaggttctggtcgcccccggcgaagagcccgaaccgtacgagccggtggaggggctggaattgccggccgtgcagaagccggtgttgtccaacgaatccgggttgttcgacctgacctccgccgatctgcgcgacgtgcgtgtgtggcgtgaggccgcaatcgtcgaagtgcatgagacggtcgatgcgaacggtaagaagaaaaaggtgcgtaagcgtgtcggcggctctggcctgtggcatcaggtgcctgccttctggaccgcgcccacgccggccaagaagctcacggccaagcagttggccgaacgcgcgcaagaagaggccgcaatcgaatccaccggaacacagggaggtgccgccagcgagacgaccggcgcacctaccggggctgaggctccacttggtactatgccgggctttgccgcagcctcctatcccgagtatgacgtgccggccgacgcggtcatcgtgcgcgtggaccacaagaccacgcgcaccggcgtcacggatgtgccggtgatcattcggcccggcgaaaacacgcgcaagatgttcgacgaaatggacaaggcccgtcacgccgacctgtggcgtgtgctggtcgcgttgtcgattcgccggctcggtccgcctaccgcacgcctgatcgcctcggcgatgggctcgctggcagccatcgaaaacgccacgattgaagatctgacggccatcgacggggtgggcccggaaatcgccgaatcggtggtgaactggttcgccgccgcccgcgagcccggcgactggcgcggcgcgactttgcgtgcttggcaggccgccggcgtgggcgtcgacgaggccgagaccagttcgctgccgcagacgctggccggcaaaaccgtggtggtcaccggttcgttggagggctattcgcgcgactccgccaaagaggcgattatcgagcgcggcggcaaggcggccggttcggtgagcaagaagaccgattacgtggtgatcggcgcaaacgccggctccaaggccaccaaggctgaggaactcggcatccccatgctgggcgaagcccaattcgcccagctcctagaaaccggtagcatctaaaatagccccctcagacgcttcattaaccccctctgatgagggggctgtcagcctttaggctgactgggggagagaaaaagcgaatcccgccccagtgtgacttactccactccctctggcatgccgccgcatcacacgctagggtagaacaggccctaaaggaggatacggatttatgagcgacgcacgtcagatcgaagccgacatctacgaacgcctgagcaaggtcatcgaccccgagctcggtcgttcggtcaccgacctcggcatgattgccgctatcgaagccgcgcccgcatcgtcggacgccggcacttacgacgtcaccgtgcacgttgagctgacggttcccggatgcccactgagcgagaccatcaccaaccagatcaacggcgcggtcagctcctatccgggcgtacagctgctgcctcatatcgaagtcggttcaatgagtcgtgacaagctggccgatctggttgccgacctcaaggccgaacgcaagcggaaccccttcagcaagccgggcgtcaagacccgcatcttcgccatcgcctcgggcaagggcggcgtcggcaagtcctcggttaccgcgaacctggccgccacgtttgcggccctcggcttcgacacggccgccatcgacgcggacatctatggcttctcactgccgcgcctgttcggcgtgcacacgcagcctaccaatctgaacggtatgcttatgccggtcaccgcgtggggcgtgaaactgatctccatcggcatgttcgccggtgccgaccgggcgattctgtggcgcgggccgcgactgcagcgctccttggaacagttcctgtctgacgtatggtggggtgagccggacgtcctcttgctcgacttggctcccggcaccggcgacatggcgatttccgtggcccaggcgctgcccaacgccgaactcgtggtggtcaccaccccgcagccctccgcctccgacatcgccgtgcgctccggactcgtggccctgcaggtgccgatgaaggtgcgtggcgtggtggagaacatgagctactacgagcacaagggcgagaagctggagattttcggtgccggcggcggtcagcgcgtgtctgaacagttaagcgcggcgcttggctatgacgtgccgctgatggcccagctgccgctggaacccgaagtgcgcgagatcggcgaagcaggccgtcccgcggtgctggatgtcgatggtgccttgcgcacggatggcattggccagaccttccgagggttggctgaacggctgttggcagtgtgagcctgcgcagcctcacacttttgtaggcggcgctggcgtttaagtccggctcgctgctggtgggcgaatcgcttgaccacagcacccgcgacctggtggtcgaggcagtggagcgcactgccggcgtggataggctgcattaacctgcaggccattcacatggacgaggacgccgtgccgcgctgccttggtatgaatgggggatctacgtcgagcccgatgtctggcgggcacctcgcggtaaatagcggcatagcgcattatcggtgcgatgctaagaggtaatggcccatgagcggttccaatcggcgagattgcgttgccgggacaccacgacatgggccatctcgataaaacgatgccgcgtgtcggctgttctcaggtcatccgcagtgacgagaatggcgatccagccgagcagttgcaatgcgtttcgctttgccgcgtcaattcgcatttgtgccggatcggcgtgataggctccctgatattcgaacgcgacgcggcagtccggatatgccatatccaatatgacgtatgagttgccgatattcacgcgatagttggcggtggggcatcccaagcccgaatccttcagcatcccaaacagcgtgttttccggcggagaatccgtgttctctgtcatgtagggcagtgcctcgtggcatttgttacgacctatgaaccgcggactgatttccaagtaagtatcgaaatccttgcgagtggccattctgcgccgtttatcgcggctcatcaaagaggctccaatggccgcaagttcctccaatgtggagtattgggccatctgagcccacatcatgaccggcgaggcaatccagaaatgttcatagtcctttttgcggatatccagttttcccttaaacacatggaagaccacgcctttgattcgtctgcgtttgttggcactggaaacacaggcgtgcacggcatcaacagatagcgtgcaatgtcgggggatgggcgcgccgtagtagttggccgcattgatgtatcccaccagcaatggaccttttgaacggcgcgcagcatcattgcaacgttcacgttctgctcggcgtcggccgacaatatcctcatgcataaaagagctcatgatgcgaccgtaaagctgatttggacttgaatgcaagccaggcagggcaatgtggttccagcttatggagttatccacattgtctatttgcgcagagaacggttctcagtagtatctgtgcgctcaaatgaacaagaacataacaatctcacatcatcgcaaatggcgacatggcagtgattagggcatattccatgtgcgcttcgggcgtagagaagtgcgcacagatattattgagaaccgttctctgcgcgcctactctccggtggagcctctggccacgacctcggtgggcaggaacaccgtgcgctggaacggtcggccctcgatctggtcaagcactagggtggccaagctgacgccgaatgcgtccattggctggcgcacggtggtcagctgcgggtgcagggctgtggcgtcggcgctgtcgtcgaagccggcaatggcaatatcgtcgggcacacgcacgccgcggtcgagcagataattcatggctccagcggcgatgcaatcactgccgcatatcagcgcgtcgatatgatgctcggcgaggagctcgggcacgctggcgtcggcgccggcaagtcggctacccgacggctcagccagcgagtccagcagccgcacgacggcgttgcggccatcgggccgggtccagccgtcggaccgaatgaccagtgccgggtcgaaatcgccggccatcgcatcctggaatccgagcagtcgttcgtcggaacatggcaagtacggcggtccgatgatataggcgattcgccgatacccgcgccccaacatatgctcggtgagcttgcgtgaagcgagtcgattgtcgatatcgacggtggggaaggggatggcgctgccatagccgacgccggaaatggcgaccggcacgctgatattggcgaatctctgaaatagcgggtcatctttatggaacgtgttgagaatccatccgtcggcgaatccgctggaggcgagtctggcgatgcgtgcgccggccgcaggggagtcggagatcagcgtgatgagttgataatcggcattgccgagcgtctggttggcgttgagcaggatggtgttgatattggggtcggcgattagcgaatccggctgcccgtgcaccacgaacgccacggtttgcgtgcgttggcgtaccaatgatcgggcggcgttgttcggcgtgtagttcacctgcttgacggcggcggcgatgcgctcggctgccttggccgagacatgcggattgccgttgagataacgggagacggtggcgtaggagacgccggatgccgcggcgacgtccatgatagtggccggcttacggggtatggccatgcccgtctccttcctgtcctagggccgttcacagtgattgtaccgcgcgattttcctgatgattccgcatggcccatgtccggtgcctgtggattgccgtgccggcgtatgaaagtcggtaaacattctctgccgtaagggtgtacgaagtaaatagtaaaagagatttaccgatattaagtgaagtacgacacgcacatgatatttgtaaacctttacgtgagtgttatactccttctcgtaaacgtttacaagaaatcaccagtcaatggagacggccagatcaagcgagccgcaacggttcacaactggacgggaaggaacatcatgaagcagcagcacaacgtacgccccgccatccgcagggtgctccaggccacggccatcgtcacggcagcggcccttaccctcgccggatgctcgatgggcgcaccatcctcggacaccggttcgagcgatggcaagctcaccgtctgggtcatgcagggcgatcaaagcgaggccaccatcaaggccatcaacgaccagttcaccaaagagaccggcgtcgaggtcaacatccagaaccagcagtggaaggacatcagcaccaaaatcaccacggctctgtccaccagcaccccccccgacgtgctcgacctcggcaatacgcaggtcgccggcttcgcggccagcggcggcctcatggacctgaccgaccacgctgacgagttgcgccagggcgtcacctggctctccggtctggaagagcctgccaccgtggacggcaagctgtacggcattccggccctcggtgccgcccgcgcagtggtctacaacaagaagacctgggccgcggccggcatcaacgagccgccgaccacctacgccgagcttgaagccgacctgcagattctcaaggacgcgcaccaaggcgaggacttcaccccgttctatgtgccgggtgccgattggaagaccgccatccagtgggtgtgggacgccggtggcgactacgccgtgcagaaggacggcaaatgggtcagctccctgtccaccaaggaatcggtgtccggccttgagcagtggcgtgaattccagcacaagtggtcatccgaagcctcccgcccgctcgacaccgatagccccgacaccagccagctcatggccgaaggcaagatcggcgccgtaatcggcaacagcgcctccatccgcgtgattcaggaatacaacaaagacatcaccgccgacgaactcggctccttcccgatgcccggcctgagcggccagaaccagccgtcgatgatggccggctccgtgtggggcgtggcccagaagagctccaagcaggatctggccctgaagtggatcaagatcgcctccagccctgacatccagaacgactacgtgttcgccaaggacggctacctgcccaacaacgtcgaaggactggacaaggccatggcctccgacgacttcccgaccgccctgaccggcttcttcgaggccgccaagcgcaccaaggccacgcccgcctccccgcagtggaccaccatcgaaagcgacggctcgctgaccctgttcaaggacatcgccaccgacaccagcaaggccgaggcctccgccaagaagttcgacgaacacgccaacgagctgtatgccaagtgatgggttggaccatgacaagctcaacgcaactcgcgcacggcgaggccccggcctcacggccggctaagaaacgcggcaatcgcgccccggcgtttctgctgacgcccgccggcatcgtcatcatcgcactggtggtcatcccgctgggattcatgatcttcacgtccttcacggatttcagccagcgcacgctgttcaccggcgaattcgacttcgtcggcctcaagcaataccaatccgtactcaccgacccggccttctatgcggccctgctacgcaccttcggcttcaccgcagccctcgtggccggcagcgtgctggccggcatgggagtcgcccagctgatgaccaaactcggcggtgtgatgcgctacctggtcatcttcgtgctcatcttcgcgtgggccatgccgaacgtcgcatcctcggtggtctggaagtggctgttccagcccggttacggcgtcatcaactggctgctcacccagctgcacgtcttcggcgacatgaccaacacctcctggatcgacaacacctggctcgcatttctggagatctggctgctcgtggtctggcaggccgtgccatacatcgccatcacgctgtacgcggccaccacccaggtcgaccagtcctgcatcgaggccgcccagctggatggctgcagcaagctgcgctgctactggcagatcgtcgtgccgctgatctccccgagcatcatggtcatcaccatgctctcgattatctgggacttcaacgtgttcaaccagatctggctcatctcgcagggcggcccacaggacacgaccgccaccatcggcatcttcacctataagaaggcgttcgtcagcttcgaaatcggcaccggttcggccgcctccgtgctcgtgaccatcgtgctgctcgcgctgacctccgtgtacatccgttacctgctcaagtcaggagaggacctatgagtacgtcaatgagtgcaagtcctgcacaggccgtatcgcaggccgcagcgcagtccgcatcgccccgccgccgaaccaaccccggcaagatcgcgcgccgcgccggcaccactatcctcgccctgctgttctgcgtcgtatggttcttcccggtctactggatgattatcaccgccgtaaagcctcgcgatgagatcatgaccacgacccccgtgttctggcccacgcacctctcgttcgacaacttcatcgttgccgtgacccagacctcgttcctgaccaacctcaagaacagcgtggtcgtgaccgccatctcgatcgtcctgtcgatcatcgtcgcgttcttcgcgtgcgcggccctgaccctgtaccgcttccgcggccgcaagccgatcatggtgttcgtactggccatccagatgacctccggcggcatcatcccgcagttcatcatctacaaccagctcgggctgctcaacaaatacagcggtctgatcttggcgtacatcgccatggtgctgccgttcgcgatctggaacatgcgtgggttcttcctgaacatcccgaaggacatcttcgaatccgcggccgtggaaggcgcgaacgactggcagatcctgtggaagatcaccttcccgctggccgcgcccggcatcgtctcgacctcggtgttcgcgttcatcaacgcctggaacgactacatgatcgcctatacgttcatgaaggaccagtcgaagtacacgctgccggtatggctgtcgtccttctcgacacccaccatgggcaccgatttcggcgggcagatggccgcttcggtgatcttctcgctgccggtggtggtgttcttcatgctcatccagcgtaacatcatgaagggcgtgacgaccggtgccgtgaaatagcgtatgccgccgtacctcaccaacgattcgtccgctgatggcggcgcgaccacgtgtcgcctgccattagcggacgaacgataataaaaacagtatgaaaggaacagctgtgcccacattcgaatatacagtcgatgccgcaacgctgtgtctcaccctgattcccgctccggtgacattggaatacacgcatggcacggctatgatcgggtccctggtgacgatcgagaaacgaattcccgaatatgccgccaccgaaggtgccgatgagacttgggaaacgctgccgattgagcagctgtccagcgagctcgagcgttactgcggcgtcaccgtccgtacgcgccgtgtccgtgcagccacaggtgaagacgacgccagcgccaatgccgccgaagatgcgcgagatgcgcgtgcgggtgcgccggcagcgatgaacggcaccgtcatatccctgggcctggattcacgattggcgcatgacgaatacacgctggatgtgttcgcctcagataccatcgccgtgcgtggcggcggcgaaagcgggctgcggtacggtctgcagacgctgcggcagatcatcgggcagacctcgcgtgccattccctgcctgcatatccaagacaagcccgcgttcgcggtgcgcgcctacagtctcgacgtgacacgcggacgagtgccgacgatggagttcctcacctggttcgtcgaccagctggccttatataaatacaatcagttccagctgtatgtcgagcatgccttcgcgttcgtcgagctcagcgaggcgtggcgtggcaccgatccgctcacggccgccgacatcacgtatctggacgagtactgcgcgcgtcgcggcatcgagttggtgccgtcgttggccacgttcgggcacatgtacatgaatctgcgcacccgtgagcatcgcgggctgggtgagttccccgaagacgccgaccgcccgttcagcttcatcgaacgcatggagcatcacacgctgaacgccgccgatcccaaggcccatgatttcgcctcgcgcctgattgaggaatacgcgccgctgttccgttcgaagtccttcaatatcggcggcgatgagacgttcgacttgggacgtggcaggtccgcgcaggacgcgccggaagccggccgcgatgaactgtatgccggtttcgtcagggatttgtgcgaaacgctcgcccgccatggtcggcagccgatgttgtgggcggacatcgcgctcgaaagcccgcgcacgatggatctgctgcccggcgacatcacgatgctcaactggatgtacgagccgcagatcgacgagagcaacatccagaccatcgccgcgcagggccgtcgccagttcgtgtgccccgcggtgcgggcttggagccggttcttccccgattatgcgggtgcctggctgaacacgtatcacatggcattggcgggtgtcaagtatggcgcggaaggcatggtggtcaccgattggggcgattacggccacgtcaacgatccgcgtctgagcgtgccgggcctgtgttatggcgctcagaacgcgtggaatccgattgagatcgatgcgcatgagatgaaccgtcggatctccgttctggtgtatggcgacgagtccggtcgcatcatggattgcctcgtccgcatcgactccgatggggtgtcattcccctgggaccttgccgtgcaggtgctggagctggaatacggttccggcaccggcatgctgaatacggatgtggcatcgtatgtggaacggtcgtgcgggggagagctcgtgtttgaccgtacgctgggatgcgccgatgcgcgccgccggctgctcctgcggaaccatgcccgactcgaacgacgccgggattgcgaccgggcgttgatcgattgcggcagtgcggttgttgcggtgctcgatggctcggcacgaggaggattgaacccggaactgctgtgggtgatgctggatgggcagcggctgttcaatagactgggcgaggaactgctggtactggctggcggcgaggacgcctgtgacaccaaggatgtgaccggccgtgcgctggatgcctcgcgccgcgcccgtcttgccgccgatctggagttgtggttcgaacggtaccgtgtgcagtggctgtccatcggccgctacgccgaattggcgcgtatcgcccatgtggtgtggtcgtttgcggacatattgcgtaggggagcgctatagggagctcacagaaattcggtcctgctgagaacaatgtgaggcttacgcgccgtcaaacgcacatggtgatttcaaaaaatggcgaattgctgccattcttgcacctgtgcgtttgatggggaatgtgcgtatgcctcacatttttgcataaagcatgaaaatgtggcccgttgtctatttgaaagtgcgacaccctttagattggagattgtccagataaccagtgaaggggtgtcgcgccttgggtcaagtgtattcgcacctgtcggaagaggaacggcggatcatccggatagagatcggcaacgggacgagcatacggcggatcgccggcctgatcggcagacacgcctccacggtcagccgcggaatcaaacgcaacacatggttcccgtccaacgagaacgaatcctaccggccgtaccggccggagcgtctcaagacggggccgtggaccggccggtgccacatcgccggccccgcgcaccgga

SEQ ID NO: 2274 - DNA, 6063 bp, Unknown
  R119_18m  MAG No. k141_11363
tacgcttggaggggatgggtcggtggtcatcgatggtgatgatatctatcgtattgcgccagttgcggttgcggccatcgacactaccgggtgcggagatgcctttatgggcacggttctggccggacttgcctcgggtcatgcgttggcggacagtgcgcagttggcctcgtacgtttccgcgtacgccgcgactggggtcggtgcgcaagcctcttatggtactgctgctcagattcgtgagcggtttggtacgaattgattactgagaagtgtggagtattgccggccgtgaattggtgcagacctaacacgttcatttaggcgctatgcagtgtcgaatgttctcggcgcggattttacgaagtattgtcagcaaatgcatcaaggcaatggcggcggtctgggcgggactacggccacgcataacagtatcgagtactcgaatgagtcctatgacgcgaaaactcggaccgtgacgatgcatgccgttatcgaccggagtaatccgtaccgattcggggattcgaccggcagttttactgcgccggacatcaccgttgtctttgacaagtccgggaaaatccagcgcattgactccacggtctggggattcccgcctgcccgataattatcggagggcctgaaacatgcacgttctcatcagcgctgcggatcgacgatgctgcaaccatacggcgtcatacccgcatgacgtgagttacactatgtagtaaagttatttactgaaatactgcgtattgttacgtactgaggcgtggaaggctcaactatggtcacgatgaaggaaatcgcacagaaatcaggcttctcgcaggccacggtatcccggctgctcaatggggacccgacattgtctgtcaaagaggagacgcgacgtcgcatcatcgaggtcagcgagcagcttggctacgctaccggatcacgccgtatcgcattgccacgccgtgtggccgtactcgacaacgccacccgcgaggaagaactggcggacgcctatttcgatgaactacggtccgtgctcggcgacaatgccagagcccagcacatggaactcacgtcgttttcccatatcgacgatctgattgccgacgccggtgatttcgacggcttcatctccatcggaccgtccgtactctcttcggatagactgttgaagctccatctggtattgccctatggcgtattcatcgacaccaatcctgcgcccagcctgttcgattcggtacaaccggatttaagccaaaccattttggacgcattggatatgttggtgtcctcgggcaaacgacgcatcggctatatcggcggtactggcttcacgatgggtttgcacgaatatccggaagacggccgattaaccgcattccgcaattggaccgagcgtttggggctggatgcggaaggcctgatttacgcgcaaggcgcgttcactgtggacaccgggcgcactctaggggaggaagcggttaacgatcatcgagatgacatgccggatgcgttcatcgtggctgcggactcgattgcagtcggcgtactgcaggcgtttaccgctgcgggagtgctggtgcctcgcgataccagtgtgatcagtatcaataaccaggccatcgcccagtacacttcgccgacattgaccagttacgatatcgaccagaatgagctggccgatactgcgattacgatgcttgccgaggccatctccagtcggcgcacgctgcaccaccataccttcatctccaccaccctagtggtgcgtgacagtttcgtaccagcacgataaagaagctccctctgtgcgataaagaagctccctcgtcagagggagcttctttatcgctgttagaacagttccagattcacgtcgagcgtgtaggcgcgatcggcgggcagctggtactgctcatagacgggcgcgccccatgaatcgtctccgcccacgcccatttgcgcggccaacaggcgcaggaacgtgtgacggaccggcggcaactcgttctggtgggtcgcctcttccagcatgagcgagctgtacggcaacaggctcgccgcgaaatgttcgctgccggcctggctgatacgcatgccgtgtccttgggcgtcaagcacttcggcccaacgccagtcttcatggttgccggtctcctgcggcaccagatacggtgcattgtcttcggccgcggtgcgctcgaaaatgccgagcttgccaccgtgcagacggtcgtgataggtttcctcggggccaaggccgtagaagcgcaggttctcgtactgcttgggaagtgtccattccaatccgaatgccggcagcgtcggcgcatcggtggcaccggcatatcgggcggtcagatgtacacgtccgctggcggcatccacctcatagcgcacggcaacttgggtttcgcccggttcggccaacgtatgacgaatgccgccaacgggcaccaacctcgttgacggcattcgtctttccaggacaccgcaatcgcggatgcatgccgtttacgcgttgaatacgtattggtcaaggcggcgcatggcctccttgacgcggctcaagggcaatgcgagattgacgcggatgctgtagggagcctggaacatgctgccgtcctgccatgcgacgcccacatcccagccgcgtttctccaactcgggcaggctcaggccgtggcgttcgcaccactgctcgcagtcgagcagcagcatgtaggtgccttccggtttggccaaactcactccttggaaatgcttggtgatgtagtcgtaggcgtaatcgacgttgccggtgagcaccgccttcagttcgtcgagccactcatggccttcgggccggtaggcgccgatcagcgcgtgcatggaaagcacgttcatgtcgttgtagtggcatttcgagcttttggccacgatgcggtcccggagtgtgggattgtagatgatgtggtagcttcccaccagtccggcgagattgaaggtcttgctgggcgcgtagaacgccacggtcctgttgcgtgcgtcctcgctgaccgattgggtggggatgtgctggtggttccccagagtcaaatcggaccaaatctcgtcggaaatgaccacgcaatcgttggccttgtacacttccatggccttctcgatttcccaacgttcccacacgcgcccgcaaggattgtgagggctgcagaacacggccacgtggatgtgatgctccttgagcttcctgtccatatcctcgtaatccatgcgccatacgccgcgctcgtccagcgtgagcggactgtggacgatgcggtagccgttgttttcgatgctccgggtgaacccgatgtaggtcgggctgtgcagcagcacgccgtcgccgggggcggcgaacgcggtcagcgcactgatcacaccgcccaggaccccgttctcgtagccgatcgcctcccgggtcaatccggtgaccccgttgcgcgtggactgccagtcgatgatggagctgtaatagtcgtcggtgggggagaagtacccgtaggcgggatgcttcgcccgttcgatgatggcctgcgggatcgtgggcacggtcgggaagttcatgtccgccacccacatggggatgacgtcgaaatcctcgcgtggcgggtccggcgcgaatcccgggtcggtgcccagcccgtcgaccgcgatcgaatccatgccatgcctgttcatgatggacgtgaaatcatacgtcattgtccgacaatcctttctcggtccgtggtggccggtcccaatctaaatcgggctcctgacggtgccgtggccgtgggcggcgatttgaccgcgtggcgtgttaggatatgcaccgttatgaggcagtgatccgttatcagcggggagtcttcggaagaacggcggcaatcgcccagtagaaccgacgggatcggcccgagacagccgaacacaagcggtcgcgcaggctcgcggctccgagtgcaacagttcggagcggcgcaaccggtgcgataagcgaggtggtaccgcggtgcggagcgcataccagcgctcgtcatcgtcctcgtaggcaggaacggcagacatggctgttccgggcggaacacagtcggttccggctgcgaggcgattgactaatcggcccacggttcggtacgtgacattcgtgaaaccagccggcacacgtcggcgcccggcaatcgccatcaatgacgctcctgtaggaccagtgcacagtactaacaggagatttacggtgagcgaaaacgtatatcccaaggcgagcgagggcggcgagaccgcgcacgtcgcgccgaaccccagcttccccgacatggaggagaccgttctcgactactgggacaaggacgacaccttccagcagtccgttgaacgcaacccttccggcgaccacagccagaacgaattcgtgttcttcgatggcccgccgttcgccaatggcctgccgcactacggtcacctgctgaccggctacgccaaggacgtgatcccgcgctaccagaccatgaagggccgcaaggtcaaccgcgtgttcggctgggacacccacggcctgcccgccgagcttgaggcgcagaaggagctcggcatcgactcggtcgaccagatcgagaagatgggcatcgacaagttcaacgacgcctgccgcgcttctgtgctgaagtacaccaacgaatggcagaactacgtgcatcgtcaggcccgttgggtggacttcgagcacggctacaagaccctgaacatcccgtacatggaatccgtgatgtgggccttcaagcagctctacgacaagggcctggcctaccagggctaccgcgtgctgccgtactgcccgaaggaccgcacgccgttgagtgcgcacgagctgcgcatggacgccgacgtgtaccaggaccgccaggacaccaccgtatccgtggccgtcaagatgcgcgatgaggacgacgcctacgccgtcttctggaccaccaccccgtggaccgtgcccaccaacttcgccatcgtggtcggcgccgacatcgactacgtcgaggtccgcccgaccgaaggcaagttcgcgggcaagaagttctacctcggcaaggatttgctgccgcattacgagaaggaactcggcgagaattacgaggtcgtgcgcgaactcaagggcaacgagctggcaggccgacgctactacccggtcttcccgtacttcgcgggtgacgaggccgaatccgaaggccacgtgcccggcccgaacggctacacgatcttcaccgccgactacgtcgacaccgtcgaaggtaccggcctggttcaccaggctccctacggtgaggacgatatgaatacgctgaacgcgcacgacatcaagagcaccgacgtgctcgacgatggctgccgcttcaccgcgcagtgccctgactacgagggcgatttcgtgttcgacgccaacctgccgatcctgcgcaacctgcgcgccggcgacggcccgctcgccgagattccggaagagcgccgcgcgatcctcttccaggagaagagctacgtgcactcctacccgcactgctggcgctgcgccaccccgctgatctacaagccggtctcctcctggttcgtgtccgtgaccaagatcaagccgcgtctactggaattgaaccagcagatcaactggatcccgggcaatgtcaaggacggtcagttcggcaagtggctcgccaacgcgcgcgactggtccatctcccgcaaccgcttctggggttccccgatcccggtgtgggtgagcgacgatccgaagtacccgcgtgtggacgtctacggttcgctcgaagagctcaaggccgacttcggcgactatccgcgcgacaaggacggcaacatcaacatgcaccgtccgtggatcgacaacctggtccgcgtcaacccggacgacccgaccggcaagtcgcacatgcaccgtatttccgatgtgctcgactgctggttcgagtccggttccatgtcgttcgcgcagttccactacccgttcgagaacaaggagaagttcgaacagcacttcccggccga

SEQ ID NO: 2275 - DNA, 67366 bp, Unknown
  R119_18m  MAG No. k141_11741
aaaaaacctcgccgaagcgaggtttcgttgtggagcggacaacgggactcgaacccgcggtctcaaccttggcaaggttgcgctttaccaactaagctatgtccgcaaaggaatccgccgtgagaagcggaatccagtgggcgatgtaggaatcgaacctacgaccccttcggtgtgaacgaagtgcgctagccgctgcgccaatcgcccgaatactcggttcttcagttatatccagtcgaattgcttcgactttcgtgggcgatacaagattcgaacttgtgaccccttccgtgtcagggaagtgcgctaccactgcgccaaccgcccgggtcatatttcatcccattgaattgcttcgctggtctgagaggtgggtacgagagtcgaactcgtctatacggctttgcaggccgctgcctaaccgcttggctaacccaccgtaaggtctgtcaactcacggacctagagcggacaacgggactcgaacccgcggtctcaaccttggcaaggttgcgctttaccaactaagctatgtccgcgtgtgtttccttggcgaggtctccctgccgaagcacgagtgtttactatacacacatgcgtgtagttcgtccagctgcggcgtgtcgcctgtaattgcatactctcgcttatggctaaagcgtgcgcttcgggcaatgaattccagttactctagaggtatgagtgaagcagcgaaggacaccggcgcagtattgatcgccgcattcgagggatggaatgatgcctgtcaggcggcgacgaacgcggtgcgccatctggtcaagcgatatgagtcccgcgagattcgtcatattagatgtgatgatttctatgactatcaggttgcccgtcctatgctgtgccatgttgcgggacgcaccaatcttatctggccgcagaccacgttctacgacatcacgttggacgcaggcaagcatatctatgcgcagatcgcccccgaaccgaactatcggtggaaggaatactgtagccagagtctggccattgccgatgagctggatgtcaatcggatcattacgttaggttcgatgttctccgattgcccgcatacccgtccgttgcccatcgccgtcagcgacggagactgtcaatgcgaaggagaccggtcgtataacggcccggtaggcattcctaccgttttggatgtggccgccgcgcagcaaggttttgctcattcctcgatgtgggtgtccatcccccaatatttgggcagcgacgaatgttctgccggcactatgcgattgctggatgcgttggacaagcatatcggcttcaccttcgatacggcagatctgaagcagaaagccgaacagtggaaggcgcaagcctcgatactggttcgttgtaatgaccagcttcacgattacgtggagcatttggagcacgactacgacttgcagcagaaagccgaggcggaggcttccttgggagcgccccaggccgaacaactagtcaaagaagcagaagcgtttctgcgccagatgggcaattagcccatatatggtgtgctcccgctggatgaacagccctgtgggctgttcatagcagtgcaccatgtgcacgtcgcacaaaatgtcgggagctggctcgcgtagcgagactgagggtggttctgctggcatattccagtgaccacccccagtcagcttcgctgacggctcccgccagcgggagcaccattatattggagtcgtctatcgacccgtcttatgccgcagccgccacggagggatcgatggccggcagcacgcccacaatcagcagcaaggcgacgaccacagccaaaccgatgcggtagatggcgaaggccttataggagaagttcgatacgaacttcaggaatccgatgatcacgatgtagccgagtacgaagctgatgaccatggctacgagggtcggcccccagccggggaacatcgcatcggttttgtagttcttcacggccttgatggcttcgagcaaacctgagccgaacaccgcggggatggccatcaggaagctcagacgtacagcggcctcacgcgtgtagcccagtgcgcgaccgacggtgatggtgccgccggagcgggacacaccaggaatcagcgccatggactggcccaaaccgaagaggaacgcatcacgatacgtcatatcattcatggttttgttctggcgagccttggcatccaccatccacagcagaatgccgaataccaacagcacggttaccgtaatccacaggttgcgcaacgaggtctcgatgacgttctgcagagtgaagccgaggatgataatcggaatcgagccgacgataatgttccagccgagtgtggcgtaattgtcgccgcggcccatgcgggccttccaatccttgccgttcttgccgaacaggcagctgaaccagtgagtaaggatattgatgatgtcgtgacggaaatacagaatcaccgcaagttcggtgccgatttggatgatggcggtaaacgccgcaccgggatcagagcccagcatcaaatcgccgaaaatacggatatgcgcgctggaggataccgggagatactcggtcagcgcctgaacgatgccgagaatgatcgcttggaaaaaattcataacccctcgtgatttctaagtatttgatgtgttatgacgatgaacaccctacccaagggggtgtagaacaacactaagaatcggtaacatccacggcttctacaatgaaagtggatatagtacgtaagcgacgaagggagcattatggccacgtatcgcaaaagcagggcattcgcaccggaaggattcttcgaatgcgagggtcgaggactcgaatggttgggagcggctcatgcgcagggcggcccgcgcgtggtgcaggtatacggctggggcaaggattatctggatatcgaacgtgtgggcagcgcgtcccccacgcctcaggcggcacgagcttttggtgcggctctggcccatatgcatgatgtgggtgccgaatatttcgggtctgcgcctgacggatataacggcacatgctatttcggaccattgcaggacccagtgaaaatggataccggcgagtggaccgacccgatcagctatttcgctgatggacgtctgcgcccgatggtcaaccttggtgtgaggcgcggcgagctggataagcgcgatgtcgaactgaccgagcgcgtgattgaagcgttgccggatctgatgggccgagccgcgtccgacaagccggcgcgcatccacggtgatctgtggagcggcaatgtgatgtggaccgccgattccgggcagcccgaggctgtgctcatcgacccggcggcacatggcggtcatcgcgaggaggatctggctatgctgcacctgttcggcatgagctatctgagcgaaatcaccgagggctaccagtccgtgcatccgttgaaggccggatggcaggagcgtatcacgctctggcagctctaccccatcgccggtcactgtgtcttcttcggcggcggctacgtcaacgaataccgctccatgtgccgctccctgctgaagtaacagacttggctcccctctctgaggggagccaagaacgcatccactctcagctcagcgcgtccttcaacttgctgaagaagcctttcttttggccagcctgtggacgggatgcctgggagacgtgcgtggcgcctgaatcgtgcgaggcggcgaactgttcgatgaggccgcgctcggtttcattgagcttggtgggaatcagcacattgacgtgggcgatgaggttgccgcgctcgtccttgttgcggatgttcgtgacgcccagtcccttaagcgtcacagtgtcctcaggctggcagccggccgggatggacacggtcttctcaccatcgaacgtgtcaatggacagatcgtggccgagcacggcccagctcatcggcacctgaatccagcagtgcaggtcgtcgccatcgcgggtgaactgcttatccgccttgatgcgaatgtcgatgtacaggtcgccggcagcgccgccgccctcacccacttcgccctggttggccaaacgtagacgcgcgttgtcgttgatgccggcgggcacggtgacgcccacggtacgtgtggtacgcacacggccgtggcccatgcagctggggcacgggttcttgatgatggtaccgtggccctcgcaacgttcgcagggggcggaggtcatcatctggccgagcatggtgcgcacgaccttctgcatgaatccctggccgtggcagtcggggcaggtgaccggctgtgcgccgctctgggcgccggagccgccgcactcctggcacagggagaacgtgctgatcttgacgtgcgcggtgccgccgaacacggcggtcttcaggtcgatggacgcggaggccagggcgtcgcggccgggctgggtacgcggcaccgggccctgtgagccaccaccgaacgcggaaccgaagaacgtggagaacacgtcgctcatatcgccgaagcccgccccggagaagccgccggcaccggcgttcggatcgttcgggtcgacgcccgaatcatacatacggcgcttgtccggattggacagcacatcgtaggcgttgttcacttccttgaacttgtcctcgaattcagggcccgcgatgtcggggtggtacttacggctgagcttgcggtatgccttcttgatctcgtcgtcactggcgccgcgttccacacccagcgtctcgtaataatctgccacttgattgatcctttgtgttcgtttggtctgcgggtcattgtgccacagacggcggtcagtcttgggtccggccctcggagaggaaggcggtcaaatatctggctacggccctgacggcggccatagtggccgcatagtccatgtgggtcggccctatggagccgacgaaggcgatgggttccgtgtcgttcgtctggctctccgtctcggattcggtttcgggttcgcctacgggatcgttccccgccggttcgcccgccgcaccgctgcgcccatagccactgctgaccacggaggcatgcagtaggccgggggtgtgcatttcggagccgatggccacgcccacgccggatgcattcgtctcctcgctcaggttgctcatgagcttcatcagcacgacctgttcttccagcgcgtcgaagagcggggccagatcggccagggaccgggagtgggccaggtgcgaggtgccggacatgtacagttcgtccgcgcgttcgtccaatgccatcgattcgaaggcgtcggccagcgcgtcggccacgccgcgcaccgactcgtagccggcgctggcggcgatggatcgcacggtctccgcggatttcgatagggacagtccgacacattgttcgttgacggtgttggagagccggttgatctcgtccacggcgggcatggatgcgatggtcaggccgtgctgggccacgcggccggtgtcggtaatcaccaccgcgagcaacgtggtcatggcaacgggcaccatctccacgtgccgcaatgtggccttggccagcgatggcgaggtgactatggccacttgaccggtgatttcggacaacagtcgtgccgaacgctgcagcgcgtccttgagactcaccgatccggacaggaagctgttgatgccgcggcgctgcgcctcgctgagcggcaccacggtagcaagtcggtccacaaagtatcgatagcccttttcggtgggcacacgaccggccgaagtgtgcggctgaatcagatatccttcatcctccagagcggacatgtcgttacggatggtggccgaactgacgccgagatcatggtcgcgcgtcagcgaagtggagcccacgggctcctgagaacggatgtaatcctccaccacggcgcgcagcaccagcatgcgtcttgattgcgtcatgcgcgcctccttatatatgcatacatattcatatcagtcacggttcactcagggcgtaccccgacggtcggttcgccacgccgcgacacgcgggaacccagaaatattgcctctttcttggctccgccacgtgcaggtggcgcacttcaccttagaacattgtattagcactccttaggcttgagtgctaatgcgttcgtttgcagcgtagcaatgttcactgtgaacgctaacagaacacaaactaccaaaacacgccaaaattgcaccgcaacgtcgcaaaccgacgctagcatggtaatcgcaatgtgagggcgtcaagcgcccggcacaagccggatacgcggcccgaccaattggaaggaaagtaatccatgaccgaattcaaggagaccgagctcgacgagcgcgccatcaagatggcgaaggtcctttcggctgacgcggttgagaaggcaggctccggccaccccggctcccccgtctccctggcgcccgtcgcctacacgctgtaccagcacttcatcaagcacgatccgaatgatcccaactgggaaggccgcgatcgcttcatcctttccggtggccatgcctccctcacccagtacgtccagctgtacttctccggctacggcgtgaccctggacgaccttaagaacttccgtggcggcgctgccacccgcaccccgggccacccggagtacggcctgaccccgggcatcgaaatgaccaccggccctctgggccagggcttcgcctccgccatcggctttgcctacggcgagcgtttccagcgcggtctgcttgacccggagaccccgaaggaagattccccgttctaccacaagatttgggccatctgtggtgaaggcgacatcgaggagggcatctccggcgaggccgcttccctggccgccaaccagaagctcggcaacctgaccgtgatcttcgacgccaaccgcatccagatcgaaggcgacaccaacctggtgctggccgaggacgtgctcaagcgcttccaggcctacggctggtacaccgacgagttcagcttcatccagcccgacggctcctacaaggaggacatcgagggtctggccgacgtcatcgccaaggccgaagccgccgccccggaccagccgaagctcatcaaggtccactccctgatcgcctggccgaccccgggcaagaccaacgacccgtcctcccacggctccaagctgggcgccgaggccgtcgccggcctcaagaaactcctcggctacgatccggaggagtccttccacgtcgacgaagaagccctggcccacgcccgcaaggtcgccgatcgcggcctggaggcccacaaggcctgggacgagaagttcgacgcctggcgcaaggccaacccggacaaggccgccctgtacgaccgtctgaaggccggcgaactgccggaaggcttcgacaaggcccttgacgaccttgaggccaccttcgaagtcggcaagggtgtcgccactcgtggcgcctccggctccgtgctcaacgccatcgccgccgtcatgccggaactctggggcggctccgccgacctcggtggctccaacaagaccgacctcaagggcgctgccaccttcgccccggccgagtgcgccaccaagcagtggccgaactgcaacgagttcggtcgccagctgcacttcggcgtgcgcgagttcaccatgggctgcatcaccaacggcatcctgctgggttcccacacccgtccgttcggcggcaccttcttcatgttctccgactacgagcgttccgccgttcgtctggccgccctcatgcagatcccgaacctgtacatctggtcccacgactccgtcgccgtcggcgaggacggcccgacccaccagccggttgagcaccttgcttccttccgcgcgattcctcagcttgaggtcattcgcccggccgacgccttcgagaccgccgaggcttaccgttacttcttcgagaagaagaacaccctgcctggcgccatggttctgacccgtcagggtgtcccggttcttgccgagaccgctgccaaggccaaggacggtgtcaagaagggcgcttacatcctggtcgacaccgaaggtactccggacgtcatcctcatggcttccggttccgaggtccagtgggctgtggctgccgccaagaccctggccggcgagggcgtcaaggctcgcgtcgtgtccgtgccgtccatggaatggttcgaggagcaggacgccgagtacaaggaggctgtgcttccggccgctgtcaaggctcgtgtctccgtcgaggccggcgttgccatgccgtggtacaagtacctcggttcctacggcaagcctgtctccatcgagcagttcggcctgcagggtgacggcgctcagaacatgatcgacctcggcatcaccgccgagcacgtggtggaagccgccaaggcctccatcgccgaagtcgaagccgccaagtgagcaactaagcaataattcaataattgttggctcccctccctgaggggagctgtcaggcgaaagcttgactgaggggagcaatgcttgagcccactcccctcagtccgcgttgcggacagctcccctctcccaggagaggagagcctagggcttgaatccaaggagaaaataaatgactgaagcaactcagcgtacgtccgacaacggcgtttccatctggctggacgacctgtcccgctcccgcattgagtccggctccctgcaggacctcatcgccaacaagaacgtggtcggcgttaccaccaacccgtccatcttccagaaggccctgagccaggtcggcccgtacgacgctcagctcaaggagctcggcaaggttgacgttgagaccgctgtccgcgagctcaccaccaccgacgtgcgcaacgccaccgacatcttccgcgagatcgctgaggctaccgacttcgtcgacggccgcgtctccatcgaggtcgacccgcgtctggcccacgacaccgagaacaccgccaagcaggctgtggaactctgggagaaggtcaaccgtccgaacgccatgatcaagattccggcaaccctcgaaggcctgccggccatcaccgccaccctggccaagggtatctccgtcaacgtcaccctgatcttctcgctcgagcgctacgagcaggtcatcgacgccttcatcgagggcatcgcccaagctgacgccaacggccacgacctgaagcacatcggctccgtcgcttccttcttcgtctcccgcgtggacaccgctgtcgacaagctgctggaagccaacggctccgacgaggccaaggctctggagggcaaggccgctgtggccaacgctcgcctggcttacgagctcttcgagaagaagtttgccgaggatccgcgttgggccgacctggctgccaagggtgccaaggttcagcgtccgctgtgggcctccaccggtaccaagaacgccgcctactccgactgcaagtacgttgacgagctcgttgccaagcacatcgtcaacaccatgccggagaagaccctgaacgctctggccgaccacggcaacggcgctccgtccatcgagggcacctacgaggagtcccacgccgtcatcaacaagctggctgagctgggtatcaacctcaaggacgtcactgacaagctggaggccgacggtgtcgccgccttcatcaagtcctgggattccgtgctggctgacgtccagtccggcatcgaccgcgtgaacgcctgagattattagctgatgcgcatttcgcgcattaactgattagctcacagaagctccgaccccaaccggtcggggcttcttacgtttgttgctacagtagtacgagcacatgagagaaaggccgaaccgtaatgaacaaacttgtcgcacgccagcggttggtgatgacctttaccttcttttcgatgttcttcggagcgggcaacctgatcttcccgccgtttgtcggagctcaggccggttccgcgaccataccggcggccatcggcttcatcgtctccgcggtcggcctgccgattctcggcgtgctggcggtcaccttcgccggtggcttcgacaaactcgccggccgggtctcccccaaattcgccctgttcctcggcttggcgatcatgctcaccatcggcccctgctttgcgattccgcgtacggcgaccacctcgttcgaaatgatggtggcgcctttcgtgccgtcctcctacggctggctggcccaactcatctactcgctcgtgttcttcacactggcgttcctgttcgcccagcatcccgaaaaactctccaaagtgctcggccgattcatgggaccgttgctgctggtgctgattgccgtcctgttcatcgcctgcctaatccacggtatcggtaccccggccaaaccgatgggcgactactccacaaaccagattgcacgtggcttcctcgacggctaccagaccatggatctgctcgccgcgctctatttcggcatcgtgatttccgcgaatatccgcacccagcaggtcgatgacgaatcgcaagtgcagaaggagaccgcgtatgccggactcggcaccggtgtgctgctgatcgtgatctacggcgcactgagctacgtgggcgtggtgtccggtgccatcgccaccatcgatcccgccaaagacacgggcgcgaccgtgctcaccaatctcacctcgtccctgttcggcgcgttcggtaccgcgttcctcggtatcgtcttcgtcatcgcctgcctcaacgtatgcaccggactgatcggtacctgcgccacctacttccacactcggttccagaccgttgcagggagaacgttgagctaccgcacctggcaggtcatcttcaccgtgttcagtttcatcgtgtccaacgccgggctaagcgcgatcatcaaggtttccgtgccggtgttgtccgcactgtatccgatcgccatcgtgctggtgctgctggcgctgacccacaagtcgctcggcgcgcgattcccgcatgtctacttctggaccgtgctgctggtgggcatcgactccttcgccacctgcatctccagcctgatcaccgtcttcggcggctccatcggctggctggacacgacgctggccatgctgcccttgcagcaataccagctcggctgggtggtcccggctatcctcggtgttgccattggtatcgccgatgctccgcgacggtagttcttcccggtctgtgccggagtctggcggtcggtcggtgatggcggttgttgcgacgctcagcggtgccggtgtatcgttcgcaccactatatgagcgcatttggggcggcatgatgctgcatccgaactgtccggcgattggcagaatgacctactatctctcgggccaagcaactgacgattatggagtctgcgtcacctcaccactgtggtttatgacggtgactgcgctgagtgttgtcgcgattctctgtctgaccgttgcgggagtacagggcttttcgcgccatcggctctgttcccgttgccctgttctggtcaggtctcacgttctttacctacagctacaacactggtagacacaccgatttctgcccagcgctatcggtaactgacaatgcaggtcttgtcgcttattgcatcggccgtgaagctttgggactgctgaccgtcgtgttgtgcgtgctgccattgttctccctgctttcggcgattatggccatcacgttggctgcgcacgacgcgacaccactggcataaaatctccttcatatcacgaaacaacgggcacccgttttgcgaggcattctatccgtcccgtgtttcgcaacgcatgagacggcacatccattgaatcaggagtctagaccatatctcgccgaatcttgcggtaggtggcatagaacaggaagccggccacgatgccggaggtgacgtcggagatgggttcggcgatgaagatgccgttgacgctgatccagtgcggcagcagcagcgcgagcggcacgagcaggatgatcttgcggaagatggccaagaacaccgactgtttggcctggcccatgccgacgagtgcgcattgcgcgcccatctggatgccgaagataccccagccgcagacgaaaatcggcatcatgcgggtcacgatgtcgatgaccgtctgttccgaggtgaaccatgaggcgaagaagccggggaatgtggcgagcacgttcgcggcggccgctcccctgacgcccatccgaacacgaaaatgaacacggggtcaagaaggatggatatgccggtgccgatgagtacggagaccatggccacagtggttttgccaactgcagcagcacggtgagggtcagggctatggcgatgaggaacgcggcgctggtgccgaggatgcgttcggctttcttgaagttgccgcgcccaagttcaatggaggcgcgcggcgcgccgcctgcgccgatcagcgaggcgaaggcggtgacggccggcagaatcgggaagcagatgcccacgccggtcatcgccgcgttgcccacttcggggatgtgcccgatgaacagtcggtcgatgatcgtgtacgaggcgttcgccgcctgcgccacgatggtggggaccgacatggtcagggccagacggggcaccggtttggtgcccagcccggcatcgatcgtgttcgcctgtaccaaggatcagctctgccagtagtagctgaagaagtcggcgagctcccccatggtttcgtgcagcatgcccatgcgcggcaggtacaccacgcggaagtggtcggggcgatgccagttgaacgcgccgccgtggctgatgaggatgtgcttgtcatgcagcaggtcgagcgcgaactgctcgtccgagtggatgttgaagcgtttgacgtcgatcttcgggaagatgtagaacgcggccttcggcttgacggcggtgatgccgggaatctggttgagcatgtcgtaaacgaggtcacgctggtcgtgcacgcggccgcccggcacgatgtagtcgttgacgctctggtggccgccgagcgcggtctgcaccacggactgggcgggcacgttcgagcacatgcgcatgttggcgagcatgttgaggccctcgatgtagtccttggcgatacgcttgttgccggacaggatcatccagccgatgcggtagccggcgatcatgtgcgatttcgacaggccggagaaggtcacgcagaacaggtccggggccatcgaggcgatggagatgtgctgcaggccgtccatgacgaggcgatcgtagatttcgtcggagaagatgatgagctggtgttcacgcgcgatgtcgacgatctgctggagcacttcctttgggtaaagtgcgccggtggggttgttcgggttgatgatgacaatcgccttggtgttgctggtgatcttggagcggatgtcatcgatgtccggataccattcggactgttcgtcgcacaggtagtgcacggcggtgccgccggccaggttcacgcaggcggtccacagcgggtagtccggggagggcacgagcacttcgtcgccggtgtcgagcagcgcggacatggacaggttgatgagctcgctgacgccgttgccggtgtagatgtcgtcgatggtgacgttcgggatgttcttcagctgcgcgtactgcatgatggccttgcgcgcggagaacaggcccttggacggcgagtagccttctgtgtcggtgagctggtgggccatgtcatagacgacttcgtccggcgtgcggaagccgaagggtgctggattgccgatgttcaatttcaggatgtgggtgccgttggcctccatgcgcatcgcctcgtcggcgaccgggccgcgcacgtcgtagagcacgttgtcgagcttgtgcgatttgccgaaggtacggcggcggcccacgggaatctcgctgtccgtcaggggcttggcggtgcccgtggcaagcggcgtggcggcgtgttcgccgtccgtgacgctgttggaagcgtccgagttcaattgcggggtggattcctcgccgcgcagccagttcgcgtcgacgtccagttcgctggccaggaattcgagcacgtcttcgcggggcatggtcttgccggccacgtattggctgatatggctcttacccatctttacgccacgatgttcggcggcgtgcaccaaatcgacctgcttcaatcccctactgttcatcgcattgcgcagacgttccgcaaacaccgatacgctcatatccttatgcctccaaccgggagttcaatttatcttttgaacaacagttcaaagcatactcccggttcaacacaagttcaattttggcgtgttctcgagtctcggccggttcagcccaactgcgcttcaatccattgggcgacgccgtcctcgttgttgggcgggcagatctcgtcggcgatagacaacaccttggggttcgcgttggccacggccacaccccggccggattcgctcatcatgttgatatcgatgaggtcgtcgccgaaggcggcggtctgttcgagcggcacgtccagtcgttcgcacagcaggtgcagcgcgtgctccttgttggcctgcgggttcatgagcatccacatcacgccttcgctaatggagatgtcgaagtccggcggaatcagcgcacgcagctcgttccactgttcaggctcggggaagatggtgatcttatccgccacgccttcgggcacgtcgtggaagttcgtgtattggaaggcctgtgttttccaatacacgcgcacatcgaagttggtgtagcgcacgtcgttcatcacgatgccgagcttcaggccgggcatgcgatcgagcaggaacagacagacttcgcaggcacgccgtgaggagaagccaatcttgatcaaatggttctcatcggccggcgtggcacctgaggtgagcaggtcgaagtcggagtgggccgggtcgaaatcgatgagggcaccgttcagatagattacggcgtccaccggcagtttttcggcgaactggaggccggtactcaccggccgcgcggtggcgatggcgaatttcagtccggcatcgtgcgcgcggttgatggtgtcgatgctgcgctgggtgatgaaccggtcctcgaatacctcggcgtcgtgcagcaacgtaccgtcgaggtcggcgaccagcagtcggggttgtttcggtgtgatggcgtcgagaatcacagcagcccctcgcagtgttcacgcacgagttcggcggaatggtgcaatttggcctgctcgtcctcgctcagatcgagttcgacgatctcgttggcaccattggcgcgcagttcagtggggacgccgaggaacacgtcatgttcgccgtattcgccgttcagcagggtggagacgggtacgatgcggcgttcgtcccacaggatggtctgcacgatgccggccacggtggaggcgatgccgaagttggtaccgcccttggccgcgacgatctcatcgccacgggtgcgggtcttctcttcgatttcggtggtggacacggaggcgaaacggtcttggttgtcggccaggaagcgggcgaatggcttgccgccgagcgagacggtggaccatgcggtgaactgggagtcgccgtgctcgcccatcacgaagccgcccacgttacgcgggtcgaggccggtctcttcgccgatgatggtcttgagacgcgaggtgtcgagcgcggtgccggtgcccagcacctgggtgcgcggcaggccggaacgtttccaggcataccaggccatcacatcgaccgggttggagaccatgacgatcacgccgtcgaaaccggaggccatgacgttgtcgaccacttcgcccacaaggcccacggtgaagccgagttcggccatgcggttggagttggccggcggcttgcggcccacggtgatgacgacgatgtccgcgtccttgcagtcggcgtagtcgccggcgcgcaccttgacgtggcggtcctggaattcgctgccgtcatcgaggtcgcgggcctcccccagggctttggcggcggagcggtcgatgagcacgagctcattgcacaggccgtgcgtgacgatgccgaaggcggcggtggcaccgacctggccagtgccgacgataacgactttgttgcggttcatagtgaccatggtgatgtcctttcgtaatactcgatagaacgcatacgacccatgaccgacggtaacggtcatgggtcgcgagcgacaagtctatatggcgtgcaagccgatcagccgaggttgaacttggtcatcatgtcgaggccgatgatcaatgccacccacacgagagcgatgataacggtccaacggttcaggttcttttcggcgacaccggaagtaccggcgttctgggtcagaccgccgccgaacatgtcggacaaaccgccgcccttgcccttgtgcataaggatgagcagggtcagcacgaagctgagcagcacgacgatgacttgcagcgtgatcttaagagcggtcacagggtacctccggattgattggactgttgaccagcatagcgcacacacgggaaaaccgtggtattagttccgtgatttcgtggatttcagtgccagtcgagcgattttggcgagttcctcaacatccagggccgcccctccgatcaggaagccgtcgacgtcgggttgggaaatgagttccgccgcgtttttcgaggtgaccgatccgccgtacaggatacgtacgctatcggataccttcgtaccaaaagtggtcttcaaatcgttgcggatggcgtttgcggcatcctgggcggattgcggagtggccaccatgccggtgccaatggcccagacaggttcgtaggccacgatgagttcggcggcttgttcttcgttgagatcgcgggtgacgtctcgtacctggcccacggcgaaatcgagttcaatgccttgacgtcgttcctcgaagctttcgccgacgcacaaaatcggctgcatgccggcggcgagcacggcacgtacctgatcgacgatattggcgtcatcttcaggatggtatttgcggcgttcggagtggccgacgatgacgtacgagcagccgagatgggcgatcatgtccgcggacacatcgccggtgaaggcaccttgggtggtcacggaaacggattgtgcgccgtaggcgacatggagcttgtcggcttcgaccagcacctgtacactgcgcaatgacgtgaacgaggggaaaagcgcgacttcgcagcgtttgaagtcaaagcgagcgtcacgcaacagccataccagcttctgcacgaagtaagtggcttcaagatggtcgaaattcatcttccagttgccggccaccaacggaatgcgtttggacgccatatgtttcccctctaaaaaatacgtagctcccctcaaggaggggagctagaaaatggattactcaagcaccttcagaccagggagctccttgccttcgaggaactcgagggaagcgccgccaccggtggagatgtgggagaagccgtcctccgggaagccgaggttacgcacggcggaggcggagtcgccgccaccgacgatggtgaacgcaccggctgcggtggcgtcgaccagaccctgggccacggccttggtgccggaggcgaactcaggaacctcgaacacgcccatcgggccgttccacacgacggtcttggagtcgacgatcttgtcgtggaagagcttctgggactccgggccaatgtccagacccatcttgtcggccgggatggcgtcggcggcaacgacttccggagcaaccggggtgtcaccggccgggaagccggcgttcacggcgacgtcggtcggcagcacgagctcaacgccgttcttctcggcggtctcgatgtagcccttgaccttctcaagctggtcctcttcaagcagggaggtgccgacctcgtagcccttggccttgaggaaggtgaacaccatgccgccgccgatgaccagacggttggccttgtcgagcaggttctcgatgacgccgagcttgtcggagaccttggaaccgccgagcaccacggtgaacggacgctccgggttctcggtggccttggacagggccttgacttccttctcgaccagcaggcctgcggcggccggcagatcggcggcaacgtcgtagttggagccctgggcgcggtggaccacgccgaagccatcggaaacgaaggcctcgccgagggcggcgatcttcttggcgtaagcggcgcgttcgtcggcgtccttggaggtctcctccgggttgaagcgaacgttctcaagcagcacaacatcgccatcgttcatggcggcgaccttggcctgagcgtcctcgccgtaggtgtccttggccagcggcacgttggtgccgagcagctcgccgaggcgggcggcaaccggggccaggctcagctcagggacgaccttgcccttcgggcggccgaggtgggccatgaggatgaccttggcgccttcttcgcgcagggtcttgatggtcggcagagcagccttgattcgaccgtcatcggtgatggtggtgccgtccagcggaacattgaaatcagcgcgaaccagaacgcgcttgcccttgagatctccaaggtccttgagtgtcttcatgaatatcctttccttgacgaatcgcacgtcaaagtggccaattttgccactttgcatattacaggcattccggaacaaaacaccgcattcgcctactgactgaatgcggtgtttcgttacgtcgttgtcgggttacttgccttcggctgcgcgagccttctccgttttctcggcaagctgaagcagtcggcgaattcggccggcaatcgcatccttggtgatttgcggttcggcgatcttgccaagctcctcgaggctcttgtccacgtgatcgatgcgcagctggccggcctgacggaggttgtccggaatgttatcgccgagcacttcgaaggcatgctgcactttttcgctggcttcggcggcagccttggcggaacggcgcatattggcgtcatcgaagttggccagacggttggccttgccgcgggcctcgccgtcggagcgcttgccggtccattcgcgggccgaacgggtggcgcccatgagcttgagcatgcgttcgatggcgtcgggatccttgagggtcacgcgctcggagctgcgcagcgtgcgatgcttggcctggatgccgagacgacgggccacgccacacagggccatggcggcctcttccgtggggcaagcgatttccaggaagctggccttaccgggatcggataggaagccacgggccatgaaggcgccgcgccatgctgctttgatttgggcgatggatccgttgaccacttcagacggcagtccacggacctgctgcttgcggcggtcgaccagtccggtctgcaaagccaaggccactacgttgcgggtgacgagcaccacgtaggtctcgacagggccgttcggggtctgacgggtgaggtggttgacctcggcttcatgcccgaacgtgttcctcaacgtgttcttcagccattctgcaacgtcaagcgaggtgaatacggcttggataacgtatgtattctgtaccggtcgaagaccgccgccaaaacggatcatggccgcagcttgggccttgatcgcggctggcgaatcgccttcaaaggccgccaactcgcttttgacatcgtccagaagagccaagatctacctcctacagtcccgttcttctcaatgcttcaggcgcttcgtgccgttatctgctgtcatacggtcggaagccatcggctttctgtgatacctaatctggtggacaagcgaacccgtttgatacgtattatgggctttgctttctcgcagtgtggtcaccgaacgcttgcccgatgaccgctcgacgcctgcttacgatgagtgacgcttatgctgttctctcgcggaaacggttacgttgagcccatgtgcgcgcaagcggcgagccagctcttcgctcatcgccaccgaccggtgctgaccaccggtgcagccgacggcgatggttacatagtgcttgtcttcctgggcgtatccttccaacgcaatctcgatagctttctcataagcgtcgagaaattccttggctcccttgctggaaagcacgtagtcggcgaccggcttgtcgtgcccggtaagctcgcgcaggttgggaacccagaacgggttgggcagaaaacgcacatcggccacgaaatcggcgtcgatgggcatgccgtatttgaagccgaagctgaagatgtgtaccgccacggtggtggggccggaaccgagcatcgtctcgtagagtttggtggacagctggtggatgctcagggagctggtgtcaatgacccagtcggctcgctccttgaggtcttccagcaggtgacgttcctcaaggatgccgtcgatcagtcggttgccgtgctgcagcgggtgcgggcggcgcacggattcatagcgcttgatgagcacttcgttgctggcgtcgaggaacagaatatgggttttgacgccgagatcatccagatggccgagcacggcggccagctcgtcgaaatagctggagcgcacgtcgatgacggcggcaagcttgtggacgcccgaccccgatccggaaccggaggtggtcatcatgtcgacaagcgggataagcagtttgggaggcaggttgtcgaccacataccatcccatgtcttccacgcagtcagcggcatgagagcggcctgcgccggacataccggtgatgagcagcacctcgaaggcatcaagcggggtcggctggttgtccggagtcgatgtggatgtcgcggaattcgccggcgcattcgtggcggccgcctcgccggtatcgcggattgttgtctgttgactcattacaacgcctcctcaagagctttgcgcatcgcgatctccagctggtcgtcttcggtggtggtgtcctgcagacgctggtcggcatcgctgggcgggtcgtcatcccagataccggtcatcagcaatacctgtacgagagcttggtacagcagcatttcttcgccgccgatggcgtgaccgccatgagcgcgccaggcttccatgagcttggtggggcgtggatcgtagaccacgtccagcagcagtccggagaatggctcggttccggcattggtgagggcatccgcgacgttgtcggccgcatgtccgggaatcgtgttgatgacataggtggcgttgcgggctgcctcgagcagggcctgatcgtcgcctaattcgatttcgctgtacgggttatgcacgttgacgaacttttcggccactggtttaagcccggtgtttttcccagggtggcgggcggcgacgatgatatggccgatttcgggcatcatgcagcatgcggccaacgccgaagtggcggtgttgccattgccgaggatcagcgcggcgccgcttctcgatgcggtgtggtgttcgccgagttcgcgattggcgtggtcgaaggcgagttggatgccgatgacatcggtgttgtacagcttgatgcccggcttgccgttcggccaagcgggatcatcggtagccacactccagtcgaataccgcggtattcgccaccttcagttccttggcccacagattttccggaacaccgtacggttggatggtcttcttcaacggcatggtcaggctcaggccagcccacgtcgagccaaggcctttgaggaaagcgtcgaggtcgtcttcccccacctcgtgcttgtcgtacagccaatcgtcgagtttcagcgaacgataagccgcgttgtggagcacgggtgacaatgagtgcgcgacgggtttgccgagtacagcgcaacgatgattggccatatcccctccttgatgtctgtttccatgctagccgacactttgcttcgaatatgtcaaccacaggccccgcaaccgaaaattcactctgggctgctggaccgggccggctcactgctcgtgcagcgcgttgtacagcgctttggctttggcgtggccgatgcctttgaccttctcgaagtcctcgacactggcttcgcgcatggctttgaccgagccgaagtggttgagcagccgcttctggtagctttcgccgatgccgggaatctcgtcgagcgcgctgcgcagggcgcctttgcgccgctgttggcggtggtaggtgatggcgaagcggtgggattcgtcgcgtacacgctgcagcagatacatgccttcggactggcgtttgaggatgatcggatagtcgtcgtccggcacccacacctcttccaagcgtttggccagtccgcagacggccacgtcgatcacgccacagtcctcaagcgccttggcggcggccatgacctgtggcttaccgccgtcgaccaccaccaggttcggcgtgtaggcaaagtgatgccggtttgtgttctgctggacgatgtcgggcgaggactcccgtgcatcgttctgcactccgaccggcaccgcgtgccccttgccactgatgtcggaaccgccctcaccattgtcgttaccgttcgcaacgattgtctccgccgccacggcagtggtcatcttgccggcggccgaggccgcgcgctgttccgcgtcgatgctttcgccggagtcgccggcgatgttgccgtgcctgaagcggcgggtgagcgtctcgtaaagcgcggacagatcatccaccgcgcctttgccgtccttgcctcggacggcgaagcgtcggtattcggatttcttggcgatcgcgtcttcgaacaccaccatggaggccacttggaaggcaccgcccacagtgttcgaaatgtcgtagcattcgatgcgcagcggggcttgcgcgagtcccaatgccttggccacatcgttcatggcctgggtgcgtgcgcccatgtcggagatgcggctcatcttgctgcgttgcagtgcttggctggcgttctcgttggcgcggtccataagctgcttcttgtcgcctcgcgaggccacgcggatggtcaccgcgcccccgcgcagattggtcagccagccttcgagttcctcgcggcgggccggttcgacgggcacgatgatttcgcgcggtaccggtgcgatgggtgccagcaggtccgcgcgtccggtggtctcctgacgggtgttgcgttctcgggtggcctgggcgcgtgccacagcgtccgtggccgtgatggtctgtgtggagccgatggcctcgcgattggtggagatggtcgcggccgactgggggtgattgtccccggcggcgtccgaatacacctgcaccagaaggtcggccatcaagtcggcgtcatcgatgtcctcaactcgttcgacgctccagttgcgttcgccgcgaatagagccggcgcgcacataaaaggcgtgcaccgaggcttcgagctcgtcgctggcgaagccgaacacgtccgcgtccacatcctggtcgaagacgacggcgttctgttgcaccacggtttccagcatttggatctggtcgcgcagtcgggcggctttctcgaattcgagttcggcgctggcctctttcatgtcgcgggtcaactgggcgatgtatggccgtccgagtcgtccggtcatcacgccgaccagctgttcgcacagccgccggtgttcgtccgcttcgatacggttcacgcagggtgcggagcatttgccgatggaggcgaacagacatggccgtccggtcagttgcgccttgtggaatacgttggtggtgcaggtgcgtaccgggaacgtgcgcagcaaccggtcaagactgtgccgcaattcccacactttggcataggggccgaaataccgggtatcccgccgtttgcgcgaccgcgtgacccacacgcgcggaattcgctcccccgtgctgaccgcgagatacggataggtcttgtcgtcgcggaactgcacgttgaaccgtgggtcgaattccttgatccacgtgtattccaacgtcagtgattccagttcggtggcgacaaccgtccactccagactgcgtgcggtcagcaccatggtctgcgtgcgcggatgcagcagatacagcggctggaaataattggtgagcctgttgcgcaggttcttcgccttgcccacataaatgacgcgcccttccccgtcgcgccatttgtacacaccgggtttggcgggaatatccgaggtcttgggtcggaacaggtcgcgagaatcccccagcaaaggtgccccattcgcattcaccttcgccgtcgtttccccggcgcccacagctacgctttccggcattaacgccgccgcggtcttccgccactcatccggactatgccgctcaatatcgttcgtcataatcctcctcgctattaagcaaaaccaatcatcagggattgggcgggttggtatgtgctgctggaccgtaaagacttggcctgagcggcccggagcatgtccagcaacataccactcccacccacccgaggtcagcagcaatggaaggctaaagcatgggcttcaggaacttgccggtccatgaggcttcgcattcggcaacctgttcgggcgtgccctgcgtgacgatggtgccgcctccgtcgccaccctccggaccgagatcgatcagccagtcggcctccttgatcacatccagattatgttcgatgacgatgaccgtattgcccttgtccaccagggactgcagcaccttgagcagcttgttcacgtcttcgaagtgcaggccggtggtcggctcgtcgaggatgtacacggttttgccgtcggatcggcgctgcagctcggtggcaagcttgacgcgctgcgattcgccgccggacagggtgggtgcgggctggccgagtcggatgtagccgaggccgacgtccacgagggtcttcaggtatcgggagatgccggtgtacgccttgaagaagtcggcggcctcctcgatgggcatgttgaggatgtcggccacggtcttgccgttgtacgtgacttcaagggtctcgcggttgtatcgtttgccgtggcagacctcgcagtccacgtagacgtcgggcaggaagttcatttcgatcttcagcgtgccgtcgccgtggcaggcctcgcatcggccgcctttgacgttgaaactgaagcggccggggccgtagccgcgcacctgggcttcgggagtcttggcgaaaagggtgcggatcttgtcccacacaccggtgtaggtggcggggttggatcgcggcgtgcggccgatcgggttctggtcgacgtggatcaccttgcgcacctggtccacgccttccacgcgcctgtggcggccgggtacgatgcgtgcaccgttgagcttgtcggcgagcaccgggtagaggatcgtgttgaccagcgaggatttgccggagccggagacgccggtgaccacggtgagcacgccgagcgggaagctcacgtcgatgttcttgaggttgttctcgcgggcacccacgactttgagcacctgggtcttgtggatcttgcggcgcttggcgggcacggcgatctctcgccggtgggcgatgtagtcgccggtgatggagcgcttggcttcgatgaggtgcttggcggggccggagtagatgacttcgccgccgtgttcgccggcgccggggccgatgtcgaccacccagtcggcgcggcgtatcgtgtcctcgtcgtgttcgacgacgatcagcgtgttgccgagatcgcgcaggtggtgcagggtttcgatgaggcgttcgttgtcgcgctggtgcaggccgatggacggctcgtcgagcacgtacatgacgccgaccaggccggagccgatctgcgtggcgagtcggatgcgctgcgcttctccgccggacagggtggcggccgcgcgcgagagggtcaggtagtcgaggccgacgtcgttcaggaagccgagtcgggccttgatctccttgagcacttcgccggcgatcagctgtgccgagccttcgagtttcaggccgttgatccaggcgagttcgcgtacgacgggcatgtcacatacgtcgaagatggatttgccgtccacggtgacagagagcacctcgggcttcagacgacgtccgtggcagacctggcagggcacttcgcgcatgtacgactcgtagtattcgcgcatggactgcgaatcggtttcgtcgtggcgtcgcatgagcgtgcggatcacgccttcgaaaccggtggagtattcacgcaggcgtccccagcgattgcggtaggagacgttgaccttgaagtcgtggccgtagaggatgtcgtgcttgacgtcgtccggcaggtccttccaaggggtcttcatggagaagcccatttccttggccaagccttcgaggatgtggccgtagtactgggaggtcatcttggtgccgctccacggttcgatgacgccgtcggccagtgacttgtccgggtcggagatgatgaggtccgggtcgatttccagtttgaagccgagaccggtgcaggcggggcaggcaccgtagggggcgttgaaggagaaggtgcgcggctcgacctcatcgagttcgagcgtgtgcccgttcgggcagctgcggtgttcggagaacggctggcggcgggccgggctgccttcctcctcgtccacgaagtcgatgacgatgctgccgttggcgagcttgagggcggtttccaccgaatcagtcaaacgttggcggataccgtccttgaccacgagtcggtcgaccacgacctcgatggtgtgcttcttctgcttggtgagtttgatgtcgtcggacagctgtgtcatctcgccgtcgatgagcgcgcgggcgtagccgtcggagcgcagcagctcgatcatgtccacgaactcgcccttgcggcccttgaccacgggcgagagaatctggaatcgagtgcgctccgggtagccgagcagcgtgtcgacgatctgctgcggggtctgggaggcgacgggctcgccgcattcggggcagtgcgggatgccggtgcgggcgaagaggagtcgcaggtaatcgtagatttcggtgatggtgccgacggtcgaacgcgggttgcggttggtggtcttctgatcgatggagacggccgggctcaggccctcgatgaagtcaacatcgggcttgtccatctgacccaggaactggcgggcgtaggcggacagggattcgacgtagcgtcgctggccttcggcgaacagggtgtcaaacgcgagcgaggatttgccggaaccggacaggccggtgaacacgaccatacggttgcgtggaatcgccaggtcgacattcttgaggttgtgttcgcgcgcaccctgaatcgtgatcttgagatcgttcgggatgtgcgagatatcagctaccagcgaaccatcgtgttcgatcagcggcgcctttttgatttcccggctcaggaaggagtcgctggtcatcaccttttcgacgatgacctcaccgttcttgcccttgctggttttcgcgccctttgcgcttgttgcgcgccttgcgccagtccgcgttgccgccacagccacaccccaccttccatctcaccgttcccgcgcgcacggttatgcgcgcgccaaatctgtcccaaggatacccgaacacacgaccaaattcgaacgcttgttcgatggcgtgtcaggccggaaaaccgaaccatagtatgcaaaattccggaccatcagtggaccaaaacgcaagagccggcccacgcgacatcaaccgtgcgcccagccccagtcaagctctatcccgaagacctctcctcctctgatttgccccggttcacatgtcaatcgtttgacgtccgcatcggggcaaaacccgctgtcccggttcgtgattttggcctgttttcgagaaccaggacattccagtttccacgaaccacataaaacgcgaacggaaacggcggaataaagccaatctcagaatcgccatgttgtcccgattctcgcatcaaacgattgacgcccataccggggcaacacaacatgtcccggttcgcgaaaaacacccgaaatcacaaaccgggacaacggattctgccccggtacgtccgtcaaacgattgatgttcgaaccgggacaaaatcttcaatggactccacggggatgccaagcttgcgtaattcgtcaactgcatcacgcatgggaatgcgttcctgttcgatacgccgataagcgatggttttgtcagcacacagtcgttcataaagacgtcgctccgccgattgaaggccgggcgtcggcttaggctcccgcatagcaatcttcgcgctgcgttcagtacgatcggtaccaaaatcgtcgtggcccggatcgagataacggaaccgcagttcggtcggccgttttgacagacccaacgtttcgacaccgagcagtcggcaaatggccttacgacgattggtttttgactcattcagccatttgccgctgaatcctgtcagtggaatctgtgcgacggtgcgcttcgcgatattccgccgccagcgtacgaccaaccacacgcatggctattgattcgtcaggaacgacgactttggagatcaactcgacagaggtgcctatggtgcgatgcttggttatgatttcgcaaccattcttgcttgcccattgccgtatctcattgttgttgtcatgcactgcaatcgcattggtttccaaaaatgcttggtccggcaatcccaccggcacgggaaatggccatgccggttcgatgtcgtacatatgtgaacgcatatgtttcttcacgcatgtggtgatcgcagcgatgtctttcatgccggccatagttcccatcacctgctttcgaacatcgtcgagtcgaaccgaatcgtcttaataccggcgacgccgggactgctcattcggcaaccccgtcatccttcaatatatccgacgatgattcatcgtccatgtcattctgatgcagcacggcctcgcacagggaggtgaggccggtgtcggggtccttgtaggtcacgtaggccttggtggagacctcgaggatttcaccggtcttgctttccggggcggagacgatgacctggaatccgaggcgcggtagcaccgtgagggcgcgctgcgtgtaacggccgtcggccttgatgagcgcctcgtcgaggaacagcgtggtgtacgagggttcgctggtcaggccgccgccgagcaggtagatgagcgccgcgccgtatacgaacgaggtgagctcctgcaaggcgccgcccgaacggccgccggtggaggtgatgcgttcgtccggaccgtcggcatgatgcacgatggcgtagaaggacgagcggcagcgcgggtcgaggttgcgggcgccgtagcttttcacgccgttcgtgtccttgacctgcgcgagttcggcgcgcagcagcccgaccatcggcgcgcaggccgcgaaagccttgcgcgaggcgtcggaatcgttgacgtcggcggatttccaatcgttcagggtgccgatgacgcggatgagctgcgcccagaaggtgcgctcgggacggcgcacgtccgcgtgcagggacaggctgccgtgcttggggccgaactgctggcctttgagcatggcgttgatgcggtcaagctggtcgtggatgtcgctggcatccgtgtcgatggcgcgtttgatggtcaggaagctcctgagcagctgttcgaggcagcgccggtattcggcgtcggtggcggcgaccgcggccagctgggtgaggctggcgagttcgtcgagatagtaccggtagtcctccacgctggcggtcagcgagtcgtcgtcggccgcgtagagcgcgatgtaggtgctcattttcgattcgacgccggtgcgtgcggcgtcggcctggccgttcagcaggttgatgcgggaggccatgtccttgccgatgccggcgatggtgcgttcggggaagttctcccccggcgcctgcgttcctgccgcgcccgcgccgatgatcatgtgcgcgcgcatggccgcgtccgccagcccggcgaatcggttgtcgtaggattcggcgagcgccgccgtgacttcgtccggcagcgggccggacgcggcgtcatcgtcattgtcggcggtggcaccggcggcgtccgtcgtgccggtgtcggcatggtcgcgcagccagatgagcgccgcttcgacggcgctgccggcgcgggccgcggcctggtcggattcgatgcgctggcgttccacacggtcgagttcggcgttcagttcgtcgcgctgtttggcgagttcggcgagtttgggatcgtttttgatggatgcgatggcgtcctgcgtgtccgtgatggtccgttgcgcgccggcgatgtcgatgcgttcccaggacgtgtaggcgagctggttggccagttcgagttcgcggtggaggttatcggactgtgttttggcggccgtgtagtcggtgtcggcttggctgagcgcgttgcgggcggcgtcgacctgcgctgcgagcgcgttgaggtaggtttcgttgacgaatccgatgacctgggcgcggtctttggtgccgtgctggccgcgtgcgccggatttgatctgaccgtcggcctgcacctgacggttggtgcggtcggtgtcgtcgatggcggtgacgcatagggcgtcgaatcgttcgtcctgggtctgcgagcgcagccagtcggcgaagggcgagtcgtcgcggtagcgcagtttgccggacagccagtcgccgtcctgttctccggtgagtatgttcgcgtgcgcgccggtgtcgtcgtagtggcgtgcggtgtccacgaactgccaggtgcgtcggggcatggtgcgcgggtcgatggtgctgattttggcggcgaagccctgttcgtggcgcttgtcgacgaggatggtctgggcgatgggcgcgtaggcgacgttcatggcgagacgccagtcttcctcgtgttcgttcacgtccatgagttcggccacgtacggcagttcggcgggggcgagtccggtggcgcggcagagcatggcgcgggtttcgtccatctgctgggagatgcgggtgcgctgggagcgttgccggtcgaagtcgcgttgcagtcgttcgaggtcgccgcgtgcgccggcccgtgcgttgatggcggcggtgagggcttcctcgcattcgccgtctcgtttgttgtattcgcgtttgaagttcacggcgttgatgcggcgctcgttccaggcctgttcgttgccgggcagcgtctcgccgatggatgcgaacgtttgttcgattcgtgttcggttggcttgcatgtcttcgagggtgcggcgggcctggtcgagttcgagttcgagtcgggtcaggttgccgccgtccagaccctgcatctggcctcggatcatgtcgaggcgggtgcgcaggtcttcggttcggcggcgcagcagcttggcttccgcctcgctgttctgttgttcggcgcggtcggcgggcagttgggcggcgacttcgccgcgcatgcgggccaatgcccagtcgcgcagcacggccggcaccgtgccgtcgacggccggcttgaccggttcgaaggcgcgggccttgccgcgtgcggcggcgtattcgccgtaggcctgttggatgccgcgcagcgtgtccatgcggcgggtcttctcgtccatggcgtggaagttctcgtcgtaacgttcgtagtcctcgaccgtggtgcgggccaggtccagggcttcgggcacgccgagcacgccttgtttgaagatgtcgtcgagccgggagggcgcgtcggcggactggatcttgtgcagcagtcggcaggcggcctcgctcaggcccattgcgctccagatgtgtgtgtggaacgcttcggcgctggggaatgtgaggcagtcggggtaggtggctttgagctgggctggtgtgaacggggcgtcacggtattggtccatgcgcctggggtccacgggcttgccccagaccacgtactggcggcgcacgtcgccgcggccgtcgccgggcatcaggtagaggaatttggcgcaggaaagcacctggccggtggtctggttgcgataggtgtccacgatggcgccccacacgggttgcggcgcgccgttctcgtcgcgaccgcgcaggtagagcggctcgtcgccggtttcggtgctgcccacgccgaccatgccgcgcaggtaggtgtagtcgctgcgttcggagcggccggagttcgaggccttgttgaacggcgtgccggtcgggtacagcagggagatctgcgcgtcgaccagcgtggatttgccggattcgctggcgccggcgagcagggtcaccggcagcttgtggtccgtggaggggcggaattcgtggtagccctcataggagccccagttgatgagtcggcgggattccagcatccaccggtccgcgatcatctgcacgtctgtcgcctgcatcattcggctcccttctcgtcgtcatcgtcatcttccgtgtcgccgtcgccgtgttccgcgacgtcgagccaggtgtcggccagttcgcggtcgagcaccacgggcacgagcggcgtgatctggtacatggcttcgtcgtccaggcgcgccaaatacccgtaggtgatcatcgcggagacgatggcgccgatctgctttgccacgccttcctcgtcattgcgggctgccaggtaaccggcgccggtggcgagcgcggcgcggatctcctcaaagctgacgagccagtcggcggggtcggcgtgcacgttctcgtattcgaggacgcggatgcgcaggaaggcgagcagcgcggcctcctcgcgtttgaggctgacacgggttttgagcgagcgcagggtcacgtcgtcgccggccacgggcgtggcgtacatgatgcggtagcgttcgttgatcaccaagtcgagcaggtcgttgttcagggagcgtacgacgacgtcgcggttgtcgagcacggtgtcgtaggtgggcccgctgatatagcggtcgcgtttgagggcgatggcggccatgcgtgcctcggccggcatgtcgccggtgtcgccttcgaacagggcgtacgggttggcgttgtccatgtgctcctcgtgttcctcggccacggtcatccttcctccacaatgatgttcagctcgtccatgtcggccagcaccggtctagtgatccagtgccggggctcgccgtcgatcgatacgcaatgccaagtcgcggtatcgccgcgctgcgccggggccggctcggtggcgatgtcgctgtcgatgccgacgccgtcagtggacggctcgtcggcgatggcgctgccgcttacggctcccagcccgcccaggaagccgacgatctcgctttcgcggcgttcgctttcgggcagccggttgaagctggcggcgatgtccacgagggttgcgttggacctgtcatcggacctgtcaacggtcaccgggttgcgccggatgaggctgaccatgcgcaggagtcgggggccgccgctgttgaccatatcccgcagatcggccaccggagtcgcctgcggggcttcggcggcgaggtcgctcaggccgggtgcggtggcgcgggtcatggatttggccgggcgcatcggcaatggcgcgaacagcgcgtccgcggtggccgtgtcgtacgggcgcgaggcgtctcccatatgggttttcgcatccgcgttgaggcgcgcgtacagtcggttcaagcgggtgagcatcgtacggtagcgagtgtcggtttgctggcgcacgagccggctgatcgcctcgtcggagacgcgcatctggcggcgcacggcttcgatgccgtcgtagatgcgggccagttcgtcgcggatctggccgagcagcacgccggattcgccggccagatacggggttttggcgatggcgcgcagggcttcgtcgatttgctggcggccctcgtcggtgatgatcacctggaaggcgtcctcgaagcggcggccgctgtccgattcgctgaacgagcggcggtattcgtcgtggtagcgggtcaggttctcgtccacgctgatgtcgccggtctgcatgcgccggcgcaaggcgtcgccgttgtcccgctcgtcgagcacgagttcgcgcaggtcgatgggtacgccgcgcagcgtgttgtggatcacggcgatcacgtcctccacttgggcttcgctcagcgtggcgtgctgcttgccctgttggatgcgtttgatctcgtgcttgcgttccttgatttcacggttgaggagtttgatgcgctcgccggggtcggcggtcagctgcatgcgcgcgtgttcgatttccatgatgatgctgttggcctgcgcgccggacagggcgcgtgattcgtcttcgagcctgctcagtgcctcgatggcgcggtgggcgcgggccgtcaaacggtagaggaatcggtgtgtggccgcatcatgcgagttggcgagccaggcgtagtcgccttcgccttcacgggtcaggtcggcgaggatctgatgggcggcctcggcgaaggtctggtcctcgcgcggcgcatattcgccggcgtcggccagagcgttcagactttgcgcgaaccgctcctccacggtctcgcgcggcagctcgccggtgagcgggtcgaacgtggaacgcagcagcgacacgtacagcatcgcgttctggcgcaacagcaaccgcaggacgcccgtctcatacaccggtcgcagccgttccagctcccgcatcacatcggccacagcatgcctccctctgtcgtgaccgcaccatactagccgatagccgcgaaccacaccccgcccgcgccacgcgtgctctctcccgcccagcaccaatatgtcacttttactgcacatgtcatcatgtgcagtaaaagtgacattgaggctgcgcactcatggtgatcgttcactccagccgtcgcccctattcgccgcgcagggcctcggtcggggtgagacgggcggcgcgggaggccgggtagaggccggcgaggatgccgaccaggatggcggcggcccaggcgagcggcagggaggtccagtcgagggcgatcggctggccggcactggcggcgacgccgatggcagcgccggcgccgagcgcgatgccggcgaatccgccgagtgtggacaggagggccgcttcggtgacgaattgcatgcggatgttgccgggcgtggcgccgagcgcgcgtctcaggccgatttcgccgcgacgttccatcacggtgacaatcatcatgttggcgatgctcatgccgcccacggccagcgcgatcacgccgatcatcaggccgagcgtggtcagtgaatcgttggtggtgttgcgcgctttggataggtcggcggacgcggtgacggacacgttgccgccggccgggttggcggcgtgggcgagcgtgcggcgggtgccttcggcgtcgccgggcgtggtgcgcacgtagatggcgctgatccgtccgatggtgtcggcctggtcggggtaccggccgagcgcccattgctcgccgatgatgacggcggcgttcaggttttcagcctgcggcgtggggttcaggatgccgatgacgccgtaccatgcgttgtcgatgaggatgcggtcgccgggctcgttgacgccgagccggtaggcggcgtccgagccgagcacggcgacgggcaggtgctcgttgttcgcgtcgatgccatgaccttgggcgaggcttgctccgacggcgtcgagtgcgccgggccgcatgatggcgagggccagcgcgttgccgttggttttggggcacagcccgttcttgaagatctgcaccttctctggcgcggtgtcgaagacaccgacccgttcgacctgcggctgacgggcgatggttgtgggcgcgtaatccggcagcggaaccttctgctgggcggcgtccacgccgggggcgaccaccgacagattcgcgccaagcgcgtcgagttgggcgaggagcgctgcctggttcgatgcggcgatgccggacaacgccacatatgcggccacgccaagcgcgatgcccagcgatgccagcaccgtgcgggacgcccgcccggcggccccaacccaagccgcatgcatcaaatccgcaagtcgcgtgcgtattggtttactcataggagtacgttcactcatatctctcccccagtcagcctttggctgacagcccctcgtcagagggggcttgattcggcttgtcgagttcggtgactaggccgtcttggatgtgcagacgcctggggaaacgtgcggcgatggtctggtcgtgggtgaccatgaccaggcttgcgccggaatcggccgccgtgagcagcaggtcgacgatggtgtggccggtttcgcagtccagcgcgccggtcggctcgtcggcgaagatgatgtccggccgtttggccagggcgcgggcgatggccacacgctgctgttcgccgcccgacaactgggccggccggtgatgcaggcggttccccaatccgacctgttccaacgcctcggcggcccgttgccgacgttcgccgcgcggcagggttgtgtattgcaggcctgtcatcacgttctccaaggcggatacggtggcgatcagatggaactgctggaacacgaagccgatgcgcgcggcccgcaggacgctacgctgccgctcacccatcgcattcacatccccgccgtcgtatcgcaatattcccgaggtcggcatgtccagcgtgcccagtaacgacagcagcgtgcttttgcccgagccggacggcccgacgatggccacgagctcgctgcgatcgatggccagtgacgtatcatgcaatatctccagcacgctcccgtccttgcctggaaacgccttcgtcacatgctccaacgtcagcaatgccccatgctctgggccagcgggggcaaactcgatgtcgttcatgagaccaccaccttgtctcccgccttgaggccgtcggacttggtgatttgcacttgcgcgtcggacaccagcccgattgacaccgacacacgcaccaacttgccgccgcgtaccgcttcgaccgcatacgcgctgccggcgctggcgatcagtgcggtcaccggcacgatcagcgcctccccggtcgaggcatcggcgttcgggatgatgactcgcacggccgtcggcccgaaagccgccacctgcgactggtccgggaagtcgatgcgcgccgatggctgtgtggcttgcccgttgtcgccggtcttctgcccgccctgatcgaccgaggcgagcgtcgtttcgacggtggtgttgtccggcagcacgacctgcgccttgtctccggctttgaacatcgccgcctgcgtggcggtcaacgtggcctgcgcatgcagggtgacgcccgtatagcttgccgggctgacctgtgattggccgagtttcgcgttcaccgccgtgatgcggattggtgcggccgcggccagggccaccgtattcgggtcgaatgtgccggtgaccgcgtcgccggtcaggccgagcgagcgctgccattgccggatcgcctcgcgggtcagccagttgaaatgcggtccgacctcgccgccgtagaatccgagttcctgcaggttctgctccagttgcgtgacgtccgggccgtcggagacgccatcgccgatcgtccgccagaacgggcggtcgccatggaacagcggcacgggcgcgccgtccatctcgtacacctgttcgccggtgttgatctgtttgccggccaccggcagttgggtgattgtgccggaagcggccgcgaaatcggagtcgtcatcgtattgcagactcgcgccgagccgggtctcggcgttgagtacgcccttggtcacctcctgcgtgcgcagcgtggacacatccacctgctgcgatcggccagtctgcccggtcgcggtgacgtgcccggccaacgtccacggcctcaccgccacgcacaccgcggccagtccgatcacggcgatcgccgcgataatcatcgtcacgattctgcggtgtttcccgaatctgcgcgcttccgtccgtgtcatgattgctcctttgtccgttatcggatggccgtctcattgctggggcgcggcttcggtggacgcgctgccggaggtgaattcggaaaggactttgttgtagtcatagccgaattcctcggtggtgccggcgaaggcataggagatgttcgcgccatcggtcgggcattccttgaggaatcggcgcagttcggattcgcttacggtgccgggaatcgtgattgaggtgggcgtatcggcgtccgggtccttgacccagtcgaagcccttcttacgcgcggcctgggcgtaggcgagcgccgcctgcttgtcttccccggaatactggtgttgcggccccatgtccggaatgggctgggtgaagtcggggttcttggcctcgcagtcggcgtattcccgctgtttggattcgtagggtgagccggcgagcgccttggcgtccttgaacaccacccaggtgctgtcgtcttccatcgacgtgtaggcagcgttcgggtagagttgcgggccgtcgtcggatgcgctgaggctgttgccttgggaggcgaccggcttgccgtcggtgccgatcatgcgcagtgcgaccgcgtttttggtcggggcttgtttgcccgagccggagccggacgacacgccagcagccgtacgcgcgtcgaatcctttgccggtcaggcaggcggcgaatcgcttcgccgtggcgtcggtggtggtcgtcgcatcggaccgatcgtcggcacctgagcctgttccgactgccgccagcggtgacgagcaggcgcccagcatcgaagccagcgagagtgcggacgtaagcattgcgattcgccgtaccaggcgcgtatgagtagtggacattaccgtctccattccgtgagtcgattgtgacgacttccatccaatcgccctcaccgtggagcgtcggtaagcggacggattactttcgccttaccgtagaatcgggaaaatgttgggtgatgccattggttcgggaaggctcggaaggggacatgatgcggattctgatcgtcgaggacgaccgcgaactggccgccgcgttggacgacgcgctgcgctacgaggggtacgcgaccagtctggcaaccaccggcgtcgaagcgttgaagatccttgccggcacgaacgtggacatcatgctgctcgaccgtgatctgccggtattgtccggtgacgcggtgatggccaccgtcgccgcgaaccgcattcccgtggccgtaatcatgctgacggccgccgccgaggtcagcgaccgcgtgagcgggctggacctaggggccgacgattacctgaccaaaccgttcgcctatcccgaactgctggcccgtatccgcgccctgcaacggcgcagcgggaccagcaacgcgaccgcagccgtgctcacgcgcggcgacatcaccctcgattccacacgccggctcgtgttccgcgaccacgggcgcacgctcgtcaaactcacacccaaggagtacggcatattgctggagctcatgcgtgcggaaggcggatacgtgaccgcgcacgaactctacgatgcggtttgggatgagccgaccgccgccgacccgaccgacgtgatcaaaaccaccatctattcgctacggcgcaaactcgccgatcgcgaggccatcgtctcgacacgcggggaaggataccggctgcaatgaaggcgacgaacacggcgaaagcatcaggtcgtatacaggcgcttgccggcaaactgcggcccaaatcattccgcgccaaactgacgttggccatcagtctcgtgttcctcatcgccatgggatcggcgaccctcgtgcagaccattgtggtcaacagcatgttcacgtacgccacgacggtcaccgccaaaaaccctgagatgcaggtcgaaagccagcacagcggttccggcaccggcaaacgcccggattccgacccgcgaatgttttcccggggaagcggcacaggtctgaacgatatcactggaacatccagcgtcggcggcgatatgggcgacggtgactatcaggtggaatggggcaaggacgggtcgtataccatcaacaccccgtatggcgtctccgtgtggaaccaggacaacatcgccaccggattgcgcatcagcgcggccatcatcttcgtgttcttcgggatcaccagcattctgatcatctggctggtcacctcgcgcatgtcccggcaactgacctccatcagcgcgcaggcggcggcattggacccggccaaacttgatacgcgcatcgacgtgaatgggccgccatctcgccgtaggccccagttccggcgtgcgggcagacgcgggaccgaggattgggatcatagcacggacagccgcacggacggtcgagctgccggccaatcctccgaagtcacgcagctcggtgacgccatcaacggcatgctcgaccggattcaggccgcatccgaagcggagcggcggttcgtgtccaatgcctcgcacgagctgcgcacgccgattgccgcggtggagaccaatctggacgcgccgttggcccaggggcggttccccgaggatgtgcgaccgtcggtacagcgcgcactggatgccaatcggcgcggcgcgcaactggtgcaggcgctgctgaccttgtcccgtattcaaagcgggaccatcggcggcaagcaggcgggcgatgtgacacagatgagtcccgcatcaacggcacgcacatccacagatttgtacggatgcgtcggcaactcccttgcggatatcgacgatgccgccaccaagcgtcgcatcaccataaccgtgaacaaggccggcggcgacgcggacatgtttctcatcgccgccgacccggcgttgctggaactggcggtcggcaacctgctgcgcaatgccgtcgtgcacaacacggatgatgggtcgatcgacgtgaccgtcgtatcggatgaggatggaagcggaccccgtctgaccgtcacgaacaccacggatgagatgctgccggacgatctgaacgagctgacccaaccgttccatcgcggcgagaactcgcgtatcagcgccgtgcccggcgtggggctcggcctgtccatcgccagtgcggcatgcgaggcgatgggagccaggctggaactcggccaaccggccgaaggcgagttccgggcgagcattcggttttgatggaacactcaggctccccttcaaagaggggagctctattgtttcgcacgcaaaaatcacagacagactattgccttgcgggaaatcatcgttagattggcgagaggaatattgtcaatgcatacgaaacggaaaacatcgtgaccgtaccgaacacgcccgccgaaacctctgaccagctcaacaagcccgccaaatccggcaaactggaggtctccgacctcatcaccatcggcgtgtttgcggccctgtacttcgtgatggtgtgcatcgccacactggtgagcaccctgttcaccagcggcttcggctccatcttcctgcccgccggacgctcgatccgcgcgcgagactcttccttctgctggtggcgaacctcatgctgttcttccatgtagggctcgccacgcaaatcgtcatggtcgtgctgttcctgttgcccctgctggcggccgcccgatggcgaaccgcgttgaacttcggcgtgacccatgccgtactcaccgcgctgggaatgctcgaccccgatgccctgggactgccgtggctgcatgtggtctccgcgctggccgtgggcgtcacgatgatgctgccctgtttcatcaccgactcgcatggctcaacggcgtggccgaccggtacgtggtattcgacggcggacatatcgtgcaggattacgaggccgatgaattcctgtccctctcccccggctgcgtggccgccatgggattgcgggcgtttgacttggaaccgtatcggcaccggattgcggccctggcttcaagcccggccgccgaagacagcccgttccgctggctgctggccatcaaccctctgccttcgcgcaaggcgttcgccgagggcgggctgctcagccacctgcatttccagtacgccaacgatctgcacacgctcgtcgccacggatgaggccaccggcgccgagaccttgcgcaatccgcgttggtacgcacaccatgtgcgccaacgagggaaccaccgaggaccgttgcgccatcatccgtgcgttgcaccacttgcagtagatctggcaacatacggcggtatgacggctccccgctagtgaaacagcatcgcttcagtagccatgcgagtgcagatactcatcatcgaagccggaataatggccgatctcgtgcaacacggttttgcggatctgttggcgcagctcggcccgtgttgagcatacgcgttcatgcggtcccttgaacagggtgatggcgtcccggcatcacgccgctgtagcccgtggttcgctttgtgatgggtatgccctcatacagtccgagcagctcaccgcacggattgctcattgtggccagttcgcgctcattgggctcgtccgcaacgacgatgccgacattctccagcacccgcgcaaaccgttcaggcaaatcatccaacacctgttcaatggcccgttcaaactcatcgtcaccgatgtgcatactcaatccttcacctgttgcttggctcccacgataacagacatattccgggttccggcttcttgcgggtgccataacgttgcgcggaacgcttccaatcattcattaggtcgattcttcattcattaggtcatgaggctgcgattgtcggtgttggaatggcaccattccagtggtgactgtcagagctcaccgacctaatgaatgaagaatcgacctaatgaatgcgtccggtcatatctcattgtgaaaatgacccggtattgcggtattccgcaattgcacttccaacgattctgaagtattcatccagattctgcgtggtagcgaacgttcttcttgtggcgggaaaagtcttatagcccgcgaaggagaggttgttccttttctcgatatctccttcccatcggtttcggtcatagtggtaccgtccgtcgtattccagaatcacatgatcattcggatacaccatgtccacaaccacctctttgttctgcaacgggaggtatatcggagcattcacctccaattcgggtaatccacgttttaccgattcaaggcgaaggatgctttcctgcggcgagtcggtgttctctctgcacaacgagagcgctttgcgaaataatctgatacctgggaatctacctatatcggcgaggaacaacgatatcttgtctttcgttgtctgtttcaaatgctcattacggcaggtggcccaatccaaggcaatgaccatactttccacatcgacgaactgtgcgatctgacacagcgcctgttccactgaaaccacggcgataagatcatcaatcatcgtctggtcaatgccatgaccccaataatggcattgcgtttcggtgagattcgacaatctttcagccccggacaccgtaacgtgcagtttgttgaggtcatagttgggcttgtaattcagagtggccgtcataccagcaagctgtagcctggtgccatggctgaagcaaagctcctgtgaagtgcgcatcgatctggcacggcattgttccagtgttttctgggcgaggtctcgcgcctcatcaagtgtgaagaacgtgttgtatgcataggactccatgccatccccctgatggttgtatccgtgaaccgcgttattcacggatacaactcacgatggcataaccaacttctgcgcgcaaccagctcggccgaatcggtggatatgtgtataacctgccagctcagctgttgcggttgatctcgatgtcggtgacggtgaggttggcctcgttgatcaggttgaagaggatgacttcggccagcggaccgggctgcatgaaggtatgctgcttggcttcggagacgtagtcgtggctatcacggtagaaggcggtgtcgatgccgcccggatagacggcgaccaccttgacgctggtgcccttgtatgcggcctgcagactcttggtatagcccttctcgccccacttggtggcgcagtacacgctttcgttcgcgttgccgcgcgtggcggcggtgctcatgatctgggcgattttcacgtcgcgctctccacaggccttgagggtttccaccgtccacagaatcatgcctttgagccccttgaggcatttgtcaatgtcagcggcttcataggcggtgggcaccttgaacgaaggctggccggcgttgttgatgagcaggtcgatgtggccgagcgcggcgatgctcgccacggattccttgacaaacgcttcgtcggtgatgtcgcctacgaaggcgcggtaggattcggctggccactgcgcgctcagctcggcctgacgttcggcgttgaagtcgatgccggccaccagccagcccttggcgatgagttggctggcgagctcgtagcccaaacccagcgcgctgccggtgacgatggcgatcttctggcctgttgtggttggcatggttgattcctttgcatgcttgcgagactcccctcagcgaggggagcctagggttaacccgttctttgctgacagctcccggtaggggggccacggtaggactattcttcggctacgagttcgaggtacgaatcattccagaggtcttcgtcgccgtcgggcatgaggagcacgcgctcggggttgagcgcctcgacggcgccctcatcgtgggtgacgagcacgatggcgccctcatacttggcaatggccttcagaatctcctcacgagaagcggggtcgaggttgttggtgggctcgtcgagcagcagcacattggcccgcgaggtgaccagcgtggccagagccagacgggtcttctcaccgccggaaagcacgtgagccggtttcatcgcgtcgtcaccggagaacaggaacgagccgagaatcgaacgggcctgcgtgttatcgagctcgggcgccacatgctgcaggttctccaacacggtggcgttcagatccaaggtgtcgtgctcctgcgcgaagtagccgatcttgcagccgtgaccgtattccacggaaccggtgtccggctcctcgatgtgggccagcaggcgcagcgtggtggtcttgccggcaccgttgtaaccgaggatcaccacacgcgagcccttgtcgatggccaggttcacgccggcgaacacgatgttggaaccgtaggccttggagatgtccttggccatgatcggcgtgcggccgcagggcgcgggctcggggaaacggatgtccgccaccttctcggccttctgcgcctcggaggtgttttccagcagcttttcggcgcggcgcatcatgttctgcgctgccacggccttggtggccttggcgtgcagccgaatgccttgcttcatgagacggtcggccttcttctcggccacttcgcgttcgcggcggcggcgctcctcgtccaccacgcgctggtgcaggtaggccttccagccgagcgaatacatgtcgatctggccgagctgcgcgtccagatgccagaccttgttcaccacttcgtccagcagttcggtggagtgggagatgaccaggaagccgccctcgtacttcttcaagtagccgcgcagccattcgatggaatcggcatccaagtggttggtcggctcgtcgaggatcagggtgtcggcattggaaaacaggatgcgcgccagctcgatgcggcggcgctggccaccggagagcgtgccgagctgctgctccatgacctcctgcggcaggccgagcgaggcggccatggaaatcgcctcggactgggccgcgtatccgccggccttgtcgaagtcctgcatggccttgtcgtaccgggtcatggccttgctcatcacgtccggatccgggtcggtcatatccttttcggccttgcggatgcggttgatgatggtggcgatgtcacgcgcgctcatcatgcggtcgagcgcggtctgcgtgggatcggaggcgtgcgtgtcctgcggcaggtagccgagcttgccggagacgcgcaccttgccggcggtgggcagcatgtcgccggtgatcacgcgggtcagcgttgtcttgccggcgccgttgcggcccaccagaccgatcttgtctcccttggccacatggaagttggtggggtgaagcagcgtgcgcgcgccgatctgaatttcaagtccctgcacctcaatagccatgaataacctacttgcctgttacgaatactgtctcttaccaaagtccgactgtccatcatagcgaacaccatgccgaccgggctcagccgacgctcatgcgtccatacgcttatacgcccgtagactcatgtaataacctgcaatgtgcgcgataagacagttgaatcgtgatttccgtcgtacactatccatatccgggcacgcttgcggcgcaatgcgtgtgcagtataggaaggatttcccacatggaaccaaattatctcgtgttattgggaatcgtgatcgtgattgtgggtttcgccctcaaacttgatgcgattctgatcattatcgtggcggctgtggtgactgcgctggtcggcggcattggcgtcgacggtttcctgaccacgttgggtacgtcgttcgtctcgaaccgcagcatggcgattttcatcatcgtgttgctggtcaccggcacattggagcgcaacggtctgaaaaccgcagccgcgcagctgatcggcaaggtgaagaatgcgacgcccggtatggtgatcgccctgtatggtgtgatgcgtctcgtgttcgccgcgttcaacgtgagttttggtggcgtggccgggttcgtgcgtccggtcatcatgccgatggcggtgggtgcgattgaagcgtccggtcacgagccgaacgacgagtatgtggaagagctcaagggcatggcttccggtatggagaacgtcgcatggttctttggccaggtgctgttcgtaggtacggccggtgcgctgctcgtgcagtccacgttgaagccgctgggttatgacgtcgaactgttgcgcatggccattatcgagatcccggtcgcggtgattgccgtggcggtcaccgccgtctattacatcatcaaggacacacgactgcgtaagaagtactacggtgccgaagccgccgctcaggccgccaccgctaccaccaccggcaaggaggcctgatatgtcgttcttcatggaccccagcgtgaccgttggcaccaagatcctcgagctcttctatattttcatgggtttcatgtccgtgtatgcgggcgtacgcaacctactcgataaaaccaacaaggcccgctacggcactttcgtgttctggacggcgctcggtatcgtcatcgcgttcggccgttggattccggccattgcggacggtgtgctcattatcatcatggtcattcccgccatcttccgccaagtgcgtaagggatcggcgtccgattcgagcgctcccagcaccgccgaagtggccgcgaacttccagcgcatcggcatgcgcatctttattccctccctgtgtctgggcgtgttcgccattatcggcgccctgattcccagcgtcagcgccctgaccggctgctgcatcggtgtgatgattgccgccgtgattctgttcgcgttctcgcatgacaacaagccggtcgtattcctcaacgattcggaacgcctgttgtctgccatgggtgcgctctgcatgctgccgatgctgctggccagtctcggcgcgattttcacagccgcaggtgtcggcgacgtgatcgccacgctggtcggcggcattattccgaagggcaacgtcacgctgggcatcatcgtattcagtgtgggcatgatgctgttcacgatgatcatgggcaatgccttcgccgcgattaccgtaatgaccgtgggcattggcgcgccattcgtgctcgcctacggtgcggacccggcggtgattggcattctggcgctgacctgtggctactgcggcacgctgtgcacgccgatggccgccaacttcaacatcgtgcccgtcgcgatgctcgatatgaaggaccgcatgggcgtgattaagaagcaggtgctgcccgcattggtgatgattgtggtgcagatcgtctatatgctgatcgcgcaataacctcgttgtccaaataccacaacaatccgtgaaataaggagctaatgatgagcaagattctggtgaccggattcgatccgttcggcggcgagccggttaaccccgcattcgaggcagtcaagctgttgccggatgaaatcgccggtgcgacagtggtgaaactggagattccgacggtgttcacgcgcagtgcgaccgtggttgaggaagccatggtgcgcgagcagcctgactatgtgctgtgcattggtcaggctggtggccgttcggctctgaccgtggagaaagtggccattaatttggccgaggcgcgtattcccgataatgatggcgagcagccgttcgatacgccgttgcgtgaggacggcgacaccgcgtatttcgccacgttgccggtcaaggccatggtcaggaacatcaatgaccacgggattcccgcattcatgtcgtatacggcaggcacgtatgtgtgcaacagcatcatgtataacgtgttgtatctgattgaccgcaaattccccggcgtcaagggcggcttcattcatgtgccgtatgcgaccgcgcagggcgtgggcaagccgaacggcacgccgaccatggaaatcgcgaccatggcgcgcggcatcgaagccgccatcgaggccgctgtgagcaccggaaccgacgccaccgacatcatgggcgaaacccactgatacgcatattgttatgcccctgctgacagcagttgtcagcaggggcatcgctatgcgttgaacgttacagttcgcgcagctgggcggcgatctggatggattcgacgctggcctcggccttgttgcgcgtctcctgccattcggtagcgggcacggagtcgagcacaatgccggcaccggcctgcacgctcgcctcatggtcgcgcaggaacgcggtgcggatggcgatggccatgtccatgttgccagagagatcgaagtagccgacggtgccgccgtagatgccgcggtcggccggttccaactcgtcgatgatttcgactgcgcgcggctttggcgcgccggaaagcgtgccggccgggaacgcggacttgaacacatcgaatgcggtcagcgaggggtcgaccttgccggtgaccgtcgagcagatgtgcatgatgtggctgaaacgcttgatgtccatgagctgcacgacttccacggactgcggcacgcacaccttgctcaggtcgttgcgggacaggtcgacgagcatgatgtgctcgctgcgttccttcggatcggcaagcaattccttggcgaatttttcgtcttcctcaggggtggcgccgcgagggcgggatccggcaatcgggaaggtcatcgcgtggccgttgtccaccttgatgagggtttccgggctggagccgatcacgttgaagtcgcggccccgagcatcggtcaacgccatgaaatacatgtacgggctcgggttcagcgtgcgcaacacacggtacacgtcgaacgggtcggcaggcgaatcgatgtcgagacgctgggagatgaccacctggaacacgtcgccgtcgacgatgtgctgcttggcgcgttcgacggcctgctcgtagtggcttttctcggtgcggaagcgcagctcaggctgggcgaccgtttcgtccaagatgttgacgcgggactcgcccggagccggggtggcggcatcgtgctgcatctggtcgagtcgagcgacggcctcgttgtaggcgacgtcggcgcgggtggatttatcatccacgttcaccgcgttggcgatgagccacaccgaaccggatacgtggtcgaccacggcgatatcggtggccagggcgagcacggtctcaggctggccggtctcgtccggagcttcggcgcgcagggtcggttcccagtggcggatggcatcccagccgaccgtgccgaccagaccgctggtcaggttcggcaggccttccacatgcggggccttcagagtcttcaacgtggcgtgagcgacttcgaccacgtcaccggtgactggcacaccaaccgggaccttgcccagccagtcggcctgaccgttgttggagcgcagctgggccatcgagttgacgccgatgaagctgtaacggctccacgtgccgccgtattccgccgattcgaggatgaaggtgccggatcggccgccggcgagacgctcgtagaagccgaccggggtgagcgagtcggcgagcagacggcgcacgatcggaatcacacggtagccggcgtcggccagttcgcggaactggccgcgactgggccaggtggcgccccacttcaggtgtttgacgctgcattcgctcatattcgctcctttacttacaactcgatgtcttgtttcgtagtacgcggtcgttcggcttcccccagtcagggaagcccgttctactgctcggccgggcggtggccttcgaccacggacagggggccgccttcgaggaagcagctgcgcttgccggtgtggcaggcggcaccgacttggtctacttcgacgagcagtgcgtctccgtcgcaatccagggacacgcccttgacgtattgcacatggccggaggtatcacccttgcgccagtattcctgacgggaccgggaccagaaggtcacgcggccggtggtcagcgtgcggcgtaatgcctcgtcgttcatgtagccgaccatcagcacctcgtgtgtgtcgtactgctggatgacggcagcgaccaggcccttggcgtcacgcttcaggcgtgcggcaatacggggatcgagttcagtggaattgtcgtatgtagtgtctgtcatacctatcttccttatgtggaccaccctcagtcagcttcgctgacagctcccggattatgtgcgacatgtgcatagcgcactgctacgaacaatccactggattgttcgtccagcgggagcaaggtgtattcgtttagcgaacggtgtagccgtgcttcttgagttccgccttgacatcggcgatggtcaggatgccgtaatggaatacggatgcggccagcaccgcgtcggcacctgcttcgatggcgggcgggaagtcctcgaccttgccggcaccgccggaggcgatgatcggaatcttgacttccttgcgcacggcgcgaatcatctcgagatcaaagccttccttggtaccgtcggcgtccatcgagttaagcagaatctcgccggcgccaagctgctcggcgcgcttgacccaccagatggcatcaatgccggtggatttgcggccgcccatcgtggtgacctcgaagccggattgcgtgtgttgctcgcccttttcgcggcgggcgtccacggagagcaccagcacctggttgccgaaacggtcggccacgcggctgataagcgacgggtcattgatggccgccgtgttgacaccgaccttgtctgcaccgcagcgcagcagcgagtcgacgtcctcgggcgtgcgtacgccgccgcccacggtcatcggaatgaacacctgttcggcggtgcgggagaccacgtcaatcatcgtgttgcggtgggagctggatgcggtcacatccaggaaggtgatctcgtcggcgccctgacgatagtattcggccgccagctccaccgggtcgcccgcatccttgaggttttcgaaatgcacacccttcaccacgcgaccggcgtcaacgtccaggcacgggatgactcgtaccgccaacgacatgcttcactcccctgttcggctttgcattacagtccttcagactacctaccgcccgttacatgcgccgcacccgtttctggaatatgagaatccgagctgacgcgcccgttgcgcgatctcaaggccgccggtgccaaggtgacgcttgccgccactaccttggacccgtgtgagacggtgcagcacgaccgctacgaaggcgagacgctgacgccggatgcgctgctgagcgacgtgcagaccgctgattatgacctactggtggtgcccggtggtacctgcaatgtggatcgtatccgcgtcaatgaggatgcgatcgcgctggcgcaggagttcgcgcacgaaggcaagccgatcgccgcgatctgtcatggcgcgtggctgctggtcaacgcgggtctggtggctggcaagaccgccgcgccctgccgttatatcgccgccgatatcgagaacgcgggcggccattacgtcgacgagcagctgcacgtggacgacgccaacggcttcaagctcatcacgtcccgcaagcccgctgatttggactacttcgtggacgcaatcaaggatgcgctgaagtaactaccgctccttagcggccaactgcccgcaggcaccgtcaatgtcctggccgcgggtgtcacgcagtgtggcggtgatgcccgcgcggtgcaggatctccaggaaccgctgttcgtctcccggcttggaggcggtccacttcgagccctcgatggggttgagcggaatcgggttgacgtgggcccagttgtcgccgtaatggttaagcctcttggccagcaactgcgcatgctcggcctggtcgttgatgccgcgcatcagcgcgtattcgatactgacgcggcgcttggaggccagccaataatcgtgcgcggcatccaacacctgcgtggtgttgaaacgcttgttcatcggcaccagctcgtcacgcagttcgtcgctgggggcatgcagggaaacggccagacgcacgggaatgccttcggcagtgagcttcttgatgccgggcaccacgcccaccgtggatacggtgatgttgcgcgcggaaatgccgaagccttcgggaggcatggcggaaatctgtcgtacggcggacagcacggagttgtagttgcccatcggctcgcccatgcccatgaacacgatgttgctcaggcggccctctcccccggccacttcgccgtcacgcatcattttggcggccacacgcacctgttcgattatttcaccggtggacatgttacgggtcaggccaagcttgccggtggcgcagaacgggcagcccatgccgcagccgacctgcgaggaaatgcacagcgtggtgcgggtcgggtatcgcataagcaccgattcgatgagggagccgtcgaacagcttccacaaggtcttgatggtggtgccttcgtccgccacttggcgggtcacctcggtgatgagctgcgggaagaacgcggcggcggcctcgctgcgcttggctgccggaaaatcagtgaattcggcggcattcacatcgaaatggccaaagtaatggttggcgagctgcttgactcggaacttcggcaatccgagttcggccgctttctcgatgcgctgctcgggcgtcatatccacaaagtgcagcggcggcttaccacggcgggcatggtccttggatagcacgtcacggaaggcacctgatgtgccgccgggagtaatgccggtttccggagtgtcaggatgctgtgtggtcatgatgggttcgcttcgctctcaatatcagaaaatagtcaaacatgcaatagaaatatcagaatccaccatacggcgtgccgcatacgaatcagatggcccatgtcttagcccatggcgaacgcatattgaacgatgatttcccccatatatgacatgtggcaccgtgcgatatacacacgatgccacattgttcatgcacgaggcatgcgaatcacagtccggtgacccacagcaaggcgcaggtgaacggtgcactcatcaaaatggaatccacacgatccatcacaccgccgtgtcccttgagcagatggcccatgtctttgatgccgatatcgcgcttgagcatggaagcacacaaatcaccgaacgtgcccacggcgccgatgagaatacccgccacgatcggcacccaccaacgagtggcccatttcgaggcatcatacgtgcacgcgaatacggcgaatgcgccagccatggcgaagagcatcgagccgataaggccctcaacggacttcttcggcgagatgcgcgggctgagcttgtgtttgccgagccaggcaccggcaaacaaaccacccgtatcggagagggcgggcaggaacaccagcatgatggcgtgtgcaatcggatgcccattgaaagtcagcgagatgatgatgcagctggccagcaacggaatgtacaacacggtaagcacggacacagccacatggctgagccgggaatgatgctgttccccgccctcatgattgaacgaggattcgaggcgcgcgctggcatccgtgttggacagtttgccggcaaccgccagagataggcggttgccgacgctgatttttgcgctggccgcgatggcgaccagaataatcgacacgatgatactcagcgacatcgtaatgagatggtacggggaataataggtggcgatgagggtgaaggacgagcacagccacagcatgaacaccgggatgtgcaggcctacggtggcgaagtccaccctgagctcccacagcgccagaatcatgaacacgactaccagcagcacgaagaggtcgacgctgagcagcaggcacgcgacaataaggatgaccagtgccgcgcctgtggcgatggcctgcggcatgttgcggccggtcttcttgttgatccggtcgagcgtctcctcggcctcttcatggagttgttcgttgcgttccataattctccggacctggtctgaatcagacctccatgatctccttctgcttggtctccagcagagtatcgatctcgtcggtaacggacttggtgaccttgtcaagatccttcagcaggcgatcgccttcgtcctcacccatctcgccgtccttgacggccttgtcgatggtttccttggtcttacgacgaatgttgcgcacggcgaccttgccgtcctcggccttgcccttggcgagcttgacatattccttacgacggtcctcggtgagttccggcatggtcaggcggatgacgttgccatcacggttcgggctgatgccgaggtcggagttgcgcagggccttttcgacggcaccggcctgggaagcgtcaaacggggtgacggacagggtgcgcggttcgggaacgccgatggaggcgacggccttaatcggggtgggggcaccatagtagtccacggtgatgccgttgagcagggccgggtttgcgcgaccggtgcggatgccggagaagttttccttggtgttttccacggtcctggccatctgttccttggcctggtcgataagagacatattcactccttgtgtgttggtgttcgtctgtgttgttcgtctatgaacgtttgattcgattgtaggcgtttgcggcttactcggccacgcgcgattcggcggtggagaccagcgtaccgatttcatcgccgacgagggcgcgggtcacgttgcccggctcttcgaggccgaagacgcggatgcgcttcttgttgtcgcgggccatggacagtgcggaggcgtccatgactgccagattgtccacgagggcgcgattgtagctcagggtttcaaaacgcttggcgttctcgtccctgcgcgggtcggcggtgtagacgccgtcgacgccgttcttacccataagcacttcgtcgcagtggatttcgagggaacgctggatggaaaccgtgtcggtggagaagtacggcatgccggcaccggcgccgaaaatcaccacgcgacccttttcaaggtggcggatggccttgagcggaatatacggctcggcgacctgtcccatggtgatggcggtctgcacgcgggtggcctgaccctcctgctccaggaagtcctgcagggcgaggcagttcatcaccgtgccgagcatacccatgtagtcgccgcgggaacgatcgataccggcctgctgcagttcggcaccgcggaagaagttgccgccgccgaccacgatggccacctgcacaccctgttgtacggccggaacgatttcctcggcaatgcgacgaatcacatgggtatctatgccgaccttgccaccaccgaatgcttcgccggacaacttgagcagaactctgcgcggcttgtcgctatcagtcatattgtgcctttctcaaaaccgaaagtgcgaaattatccgtagacaagcgtatcggtttacgacgacaccccctagcaacgacacccttggaatagcgaaacgccatccgattattgaataaccggatggcgtttcgttgaaattacgctaagcgcgtggagtaagccttaggctcactcctcttcgcccttgccgacctcgacacgagcgaatgcggtggcgttgccaccgacttccttgaacaggtcgccgacggtcttggacggatccttgacgaacggctgctcgagcagcacgacttccttgaagaaagcgttgagacggccttcgacgatcttcggaacgatcttctccggcttgccctcggccagggacttctcggtggccacgcgacgctcggactcgaccacatcggccggaacgtcctcgcgggtcagccacttagcgcccatggcggagatctgcagagcagcttcgtgagccacggcggcgccggccttgtcggtggcgatcatggcgacgatgctcggcggcatctcggcggacttcttgtgagcgtagacttcgacgtgctcgccggaaatcttggcgaactggccgaccttgacgtgctcaccgaacagggcggcggcctcctcgacagccagcttgacggtggtgtcgccagccttggcctcgagcagctcgtcagcggagttggcgtcggcgtccacggcgtagccgagaacttcctcggtgaactcgacgaacttcggggtcttggccacgaagtcggtctcggagttcagctcgacggcgtagccggtctcgccattggcggtctcgacgaccttggaggcgatggtgccttcctgagccttgcggccttcacgcttgccggctgcggcgatacccttggctcggatgatttccttggcgcgggcgacgtcgccttcggcttcggtcagagccttcttgacgtcgagcatgccggcgccggtgtcttcacgaacctgcttgatcagtgcggcggtaattgctgccattgattattctccttgagaaattttgcttacccatgaacgatgggaagcgcttattcaggcacttcccatcgtagagcatcactcggccttgggggcctcggcggtttcgccctcggcggcagccggagcggcggcttcagcggaagcctcggcaggagcctcgttggtcaggagttccttctcccaagcggccatcggctgctcggcggcttcgccctcggccttgttggcgccggagcgctccagcagaccttcggcgacggcgtcagccatcaggctggtcagcagttcgatgccgcggatggcgtcatcgttggccgggatcgggtactcaacggtgtccgggtcggcgttggtgtcgacgatggcgacaaccgggatacccagcttgtgagcttcctcaacagccagggcctccttggtgatgtcgacgacgaacatcgcggacggggtgcggttcatgttgcggataccgcccagctgcctgttgagcttgtccttctcgcgctcgagcaggaggagctccttcttggtcaggccggagccgtgcacgtcggtgaagtccatttcctcaagttccttgaggcggttgacgcgcttggagacggtctggaagttggtcagcatgccgccgagccaacgctcggagacgtaaggcatgttcacgcgggtggcctggttggcaatagcttcctgagcctgcttcttggtgccgacaaagagcacagtgccgttgtgggccacggtggtcttgatgaagtcgtacgccttgtcgatcatgtcgagcgacttgaacaggttgatgatgtggatgccgttgcgctgggtgaggatgaactgcttcatcttcgggttccaacgacgggtctggtggccgaagtgcaggccagccttcagcatatcgctcatagtgatctgagccatggtattactacctttcattgtcggttcttgcctggccatgcgcacctgcgtgcagctgctcccccggtttcacgagttgtgcagccgaccgacacaggccgtcgcgagcatgacgcgaatttgttgtgtgccggttgacaatattgggtggttccggacgccagcgactgcgtccgttgccgggtggcacacaagtttcgagaatagcacggagccagtactaagaagacaggttcccctccttgaggggaacctgtcgccgtaggcgactgaggggagttacgggcggtaccggcagaaccaccctcagtctcactacgttcggcggctcccgccagcgggagccgggtatggactacttcgcctgacgattgcgcatgtagcgcagggcttcgcggcgttcttccttttccaggcgatccaaatacacgtggccgtcgagatggtcgcattcgtgctgaagcatacggcccatcagcccggagccctcgagcacgacctcgttgccgtccaggtcgatgccacgcacgcgagcgtagtcggcccgacgggtcttgtaccacaagccgggcacggacagacaaccttcatcgccatactgctcgccggacttctcctcgagtacggggttcagaacgtagccgaccttgccgtcgatgttgtaggagaaggccctcaggctcacgccgatctggttggcggacaggcccgctcggcccggatcgtccacggtttccagcaggtcgtcaaccaggcggcgcacggccggggtgatttccttgatctcatcgcagggggtgcgcaggactgggtcgggcacgaccctgatctcacggatggccacttctcgttactcctcgttcttctcgtcagccggccggtccggcttgctgccggtgtcagcggcattgtcgacagcgtcggcattgtcggcggaatcgccggtctcgccctcttcgggttcggccttcgacttcttgatcttctccgacacgctagcaatcgaatcagacacgctggttttcatctgttccgaggcctgtttgacctgttcggacgcctgcttgaccgattcggaggacttcttgacggtctccagcgtgctgtcgatgatcttggcagtggcgggcagcggcttgttggatggcttgggcgcgtacagatcctcttcgatgacggtggcgtatcgctgcaataccttgggacgcaccactttcatgctcggggtgagcgtgccgtgctcctgactgaattcctcatccagcaccgcgaatttgcgcacggactcagcgcgggagacattggcgttggcctggtcgatgtactgctggataaaggcgcgcaccgcgtcgttgtcgctggcctcggcgagtgtcatgtcggcattgaggccctgaccttccagccaggaatgcagcatttcggggtcaagctcgataagtgcggacacgaacggcttgccgtcgccgactactactgcatgagccacgatcgggcaggtgtcgatgacatcctccatcggggtggggctgatgttcttgccgccggcggtgatgatgatgtccttcttgcgtccggtaatgaaggtgaagccgcggtcgtcgatacgacccagatcgccggttttgatccagccgtcggcagtcatcgtctgtgcggtgagttcgggctgcttgtagtagccaaggaacacgttcgggccggtcagctcaatttcatcgtcttcgccaagacgcacgcccatgccaggcccaggcttgccgaccgaaccgacctcgttgtcgtcctcccaattgacgagcatcggagcggcggtttcggtcatgccataaccctggatgaaggtgatgtcatccatgccgttgaagaagtgggccaaatccacgttgagcggcgcaccaccgcaggccagccatttgaggttcggtccgagagcggaacgaatggatttgcccaccgtggccatgtagaacgaatggcgcatgcgctcgatgaacgaatggccgcggccggcctgctcatccttgctccacttgacgaagtgcttgaacgactgggcgaagatatgcccctggatgccggcaccagccttctgcgaggccgcgttatacaccttctcgaacacacgtggcacgcccagcaggtaggtgggcttgaagctgcggatatcggcgagcagtcgcttggcgtcgggaatgtatccgaccacgccgcagccaccgatgcacacatactggatgtagcgggcgaagcagtgcgccagtggcaggaacagcagcagacggttgtcgtcgtacagcatgccacgcagaatctcgtagccgttaagcacgatgtgcgtgtaattgcggttggagagcatcgcgcccttgggcttgccggtggaaccggaggtgtagaccacggtaagcagatcatcggctttgatacgagcgatagccgcatccaacgtctcatcggatacgccatgcccgaagtcagcgacagcgtcaaggccatcggccttgaaattgaacacgtatttcatgcccggatgattgacacggatctgctcaagcgtctgtgcgcgctggaagtcgccggcaaaggcgatggcgggatcgacttcctcgacgatgcccgcggtctgacgggcggaatcggtctcatagacgggcacaaccacagcgccgattgccgcgcaagcgaaatcagccacaccccactcatagcaggtaggcgagtaaatcagcaccatggtgccggctttgacgccaagtcccaacaggcccttggccacctcgcgtacgcgggacagcatttcagtagctgtggcgccgcgccattggtgggtgttgtcatcctgccattccgcgatgatgtcatccggcgtgcgagctgctcgtttggccagcagcgagtagacggtgtcgtcatcggtggtgacatatctgggttcttctacatgttcacgcatggtcactactataggcgaaccagcctatgacacggcagaaccgtcttccgctgccagcgtaggaatcggtgtgcgggcggggccgtctggtcagcccagatcggcatagatgcacatccatcgagaaccgatgaacttcagtttgaggttgactcgcagattttcctggccgatggtcatgaataccgccatttccagcgtgtccttgccggtgatcatgccgtcgatcaatgtggggacagtgggcagatagcagaatttcgctttgagctccggatgagtgaccatgtgggtgccgagcaggtattgcatggtttgcagccgttccaggcatggttttgtcatggctctgttgagatgtgcgacgctgagtctgccacgtatcgcgtccgccgatgtgcaggcgatgcggcatgcagccatggccatggaatgacattccttcgcattcagcccgcctatgaatgtgggttggatatgataccgcaccgggcgatccgacagctccacaacgatgaatccgtcataactcggcaacggcccgtactgatatgtgccgtggaaaaatcccgaatactccatgatgaccccttcaagcccccttgcaactcaccatcatcggcgagcgtttgtactacaacatcacgaaaggcgcgccaagtcaaacgacttgagcgcgccttagggcaagctaagcctcctgcatggagggcaaaccccccattttcaggggggtaatcgggattatcgtgcggaatacgggttgaccaccatgccgcaacgctggaagttcttcacgtcgacgtagccggtggaggccatcgcgcgcttgagggcgccgatgaagttggtcttgccgtccgcctggtggctcggtccgaacagcacctgttcgagcgggccgaccgtgccgaccgtggtgcggtagccgcgcggcagcgtctggtggcgggcttcggaaccccagtgggtgcccttgccgggggcctcggtggcgcgggccagcggcgcgccgagcatgaccgcgtcggcgccgagggccagggccttgacgaagctgccggagtcgcccatgccgccgtcggcgatgacctgcacgtagcggccgccggattcgtccatgtagtcgcggcgggcctcggccacgtcggcgatggcggtggccatcggggcctgcacgccgatggtctggcgggtggcggagaccgcgccgccgccgaagccgacgagcacgccggccgcgccggtgcgcatcaggtgcagggcagcggtgtagttggatgcgccgccgacgatgacgggcacgtcaaggtcgtagatgaacttcttgaggttcagcggttcctgaccggaggagacgtgctcggcggagaccacagtgccgcggatcacgaacaggtccacgcccgcgtccaccacggtggagtagaactgctgggtgcgctgcggggagagcgcgccggccacggtgacaccggcggcgcgaatctcgtgcagacgttgcgtgatgagctccggcttgaccggctcggcatagatctgctggatacgctcggtggcctgatcggccggcagcccggcgatttcgtccagcagcggggtcgggtcctcgtaacgggtccacagaccttccaaatcgagcacgccgagcgcgcccatcttgcccatggcgatggcggtggccgggctggtcaccgaatccatgggggcgccgatcaccggcacatcgaactcataggcgtcgatctgccaagaggtggagacgtcctcggggtcgcgggtgcgacgggaggggacgatcgccacatcgtcgagtgcgtagccgagacggccctttttgcccaaaccgatttcaatttcctgagacatggttgtaagcctattgcccgggtgggacgccaacaaggtcgtttcccacggaccggacgattgcttcaagtcgttacaaacatgcgctatgactaaatcatcttcacaccatctatcaggaggaagcatggccaaaatcaaggtcgaaggcactgtcgtcgaactcgacggcgacgagatgacccgcgtgatctggaaggacatcaaggatcgcctgatcctgccgtacctcgacgtgaacctcgactactacgatctgggcatcgagcaccgcgacgagaccgatgaccaggtgaccatcgacgccgcccacgccatccagaagcaccatgtcggcgtcaagtgcgccaccatcacccccgatgaggcccgagtcaaggaattcggtctcaagaagatgtggaagtcccccaacggcaccattcgcaacatcctgggcggcacgatcttccgcgagcctatcgtgatgagcaacgtgcctcgtctggtgcccggctggaccaagccgatcgtcgtggcccgtcacgcattcggcgaccagtacaaggccaccgatttcaaggttccgggcgccggccagctgaccgtcaccttcactccggacgatggctccgagccgattcagcacgtggtctacaactacggcgaagacggaggcgtggcccaggtgcagtacaacgtcaacgattcgatccgcggtttcgctcgtgcctgcttcaactacggcctgatgcgtcattacccggtgtacctgtccaccaagaacacgattttgaaggcctacgacggccaattcaaggacatcttcgctgaggtgttcgagaccgaatacaaggacaagtacgccgaggccggcctgacttacgagcaccgcctgatcgacgacatggtggccagctccctgaagtggcacggcggttacatctgggcctgcaagaactacgatggcgatgtgcagtccgactccgtggcccagggcttcggttcgctgggcctcatgacctccgtgctcatgaccccggacggccagaccgtcgaggccgaagcggcgcacggcaccgtgacccgtcactaccgccgctggaagaagggcgagaagacctccaccaacccgatcgcctccatcttcgcgtggaccggcggcctcaagcaccgcgccgatctggacggcacgcccgaagtccgtcacttcgccgagacgctggaaaaggtcatcgtcgacaccgttgaaggtggtcagatgaccaaggatctggccatgctcatcggcccggacgaaccgtggctcgacaccgacggcttcatgaacgcgctggacgagaacctggccaaggctctggccgagtaaatcatcgaacacatcgtgcggacctacatgggtcatgtcatgtcgccaactgtcatgattgtcgtgcttcatctggattgttcctcagcacgacaatcatgacagttgttcgatacacgcgcgaaatacccctaattgttcccggatatgtggcgatttgtccactggtccgggactttttcgtatacggcctactagaatcgtgattcagtttgttttcacgcccgcttgaggaggtttcgccgcttatggtgttcgcacgccgctcaaccaccctgctcgccgccattgtcgcatcctgcgcgatggtgctgtcactgaccgcgtgcacctcagacaataagaccgttgtagatggtcaaaccacggtgacgtccaattctgccggcggcgtggccgtgttcacgccttcggacggcattacgctgaatcagcagacgccactgaacaaatgggcgaagctggtgcccgacctgaccaaggccctggtcgacgccggtttcaagaaaggcgatatcgatcatacgacgtccgactcgttggacaagcaaagccgcgccatccaagactttgtggtcgatcatctttcgaataacaccacggacgattccggcattgccatcgcgcccgacaacatgacattgctcgtggctccagtagtcgaggccgacgcttccactcgccaatacggcgattacatcagccagaacctgagcaccaacgatgccacggatgagggagctacttctgacggtgattctcccgaagacagctcttccaaagatgactcgtccaacactgagagcgacggcactgcatcggacgagcaggcgcaggccgtggaccggctggtctcatcgctcaagctggccaaggaatccggcatgcatgtggtattgctcggcaacagcatcgaggggtataggccggacgccttcgtcaagttctcggacgcccagaccatcggcaagctacaggcggaaaagatggtgtccaaactcaagttggataaggccagtaaagacaaccccaaatacattgaggtgctgctgccatacaccgccgtggacgaaaaaggcaacgccaacgattccacgttcgcccaagaggcgttccgtggtatctggcaggtactgggctcctactatcagaagggcgttgtggaaagcccttcaggcaccttggacggcagatccacggaaaacgattggcaagccgtggcctacgatgccgccaaggaaggctccactgcgaaagtgcttgacaagcgtctggcaaaaaccgacgggcagtccacactcacccgtattgacggcatcatcacgatgaacgactacatcgcctccgaggtcgtcaaggaattggacgatctgggatacaccggctctgccgccgatatcaatccgcagatcaccatctcgggcattgtcggcaatatcaccggcaagaaggatctcagccgcgacgccgtgccggacccgatcaaatcccctgaaaacgacaacgcaaacgactcatccagttccgatgacgatgcggacaaggacacctccgcttccgacaaggaccgtgactcgcaatggcctctggtaaccggatacggcgcgtacgtctcgaacatcccatccatcgtcaatggcaagcaatggatgaccggcatggaagacagacagaccatcgccacggatatcgctcaggcctgcgccaggctcaacaagaacgaagcgctgaattccatgccttcaatcaggaactccgaggtaggcggcgtgaagaagatcccgaccatcaacgaaccgttgctggctgtcagcgccagcaatctcaagtccgcgctgatcgcccccggatatatatccttggccgatgccggtctgtgattcatactcgtcacgccgctagccgcctgcgatgcctcttccgtacggccctgttccggccgacaaacattgctgaatcatgacggcttcagtacgatttttcgactccccgcatattgctgtgggtcaagatagtcggccgttcctcgcttgaggccccaatgcaggcaacggtcttcgcaatggtccgagttgccctcaacgatgcctacgggctgtctgcgggagatcgtatcccccaccgagagctcggtaacagccggttcgaatgtcgacgtgacacctccacgatgccgtacactcaccacatctttgccagctactttgccagcaaaactcacggtccctgcctgtggtgacagaatcacggtaccttgctccgcagcaagatccacgccacgatgacctggcgcccacgggttgatcggccgctcgaactgttgttcgacctgtggatcgtcgaccggccagtcgaaccgggattcgcactgattgccattgcgccacgccagatcagacatatcggtgaaatcctccaccgtgtatgccgcatctccggtcaccgcagtatccgcatgcgcaacatgctgaggcgtggatgccagtcccactcccaaggcaagcagcaggccgataacggcggccaacgcgattatggcatccatacgccgttgccgttcctgagcccgctgacgcgcctgctgacgccgcctgccggcacgtcgggcttcgtcgcgacgccaatcaaacaacaatggtgcattcatgagattcctccccatagtgtgagtgtgatgtgattccggcttctttgccggtgatacccaccttgaggggtccgaaacaggatgtccagccagaacgacctatgtggttccagcttccgaagttatccacaatgaaatttcgcgtgacagtatcgccgcatcgtcatcatgttgtatgagtgggtattcgatgagtccgattctgcggaattcggcgcgacatgccctacacgcatgtaatttgctttttcgtggcaagcatgtaagatgtgtgacttgtgcgcgagagaaatctcaaacacagcagacattcctgcgtagctcagttggcagagcatccgactgttaatcggacggtcactggttcaagcccagtcgcaggagctcacctgaacgggtaactccggacgggatgaaaat

SEQ ID NO: 2276 - DNA, 17399 bp, Unknown
  R119_18m  MAG No. k141_12009
cgatgaacgctacgagcactactccgtggacctcgacgtggtcagctccctgatggaactcgccgacaagcagtcgccgcgctactggcagctcgcgaaggcgttgcagcgttcgctcaacgcctacgacgagcgcaaccccgaatccgtggaagccgcgcgcgcagcactcgccggcgtactggccaagccggccaatgcctcggccatgaacgtcagcgccatcggccacgcgcatatcgactccgcatggctgtggccggtgcgcgagacccgccgcaaggtggcccgcaccgtatccaacgcattggcgctgatggacgccgaccccgacttcaaatacgcgatgagctccgcccagcagtacgcctggctggaagaggatcatccggacatcttcaagcgcatgaagcggcgcattgaagaaggccggttcatcccggtcggcggcatgtgggtggaagccgatggcatgttgcccgccggtgagtcgctgatccgccagattgcatatggccgcaaatacttcaaggaacatctcggtgtggagcccaagggcgtatggctgccggacagcttcggctacaccggcgcatggccgcagatcgcccgccgtgccgggtacgaatggttcctcacgcagaagatctcgtggaacgacactaccaagttcccgcaccactcgttcatgtgggaaggcatcgacggctcgcgcatcttcacccacttcccgccggcggatacctatgctgcttggtgcaaggttcaggaactcgactacgccgagaagaacttccaggacaaggatctctccgaccgctcgcttctgctcttcggtttcggtgatggcggtggcggccccacgcgcaacatgatggagcacctgcaccgctacgagaacctcgaaggcgtctccagggtaactattgagagcccgaacgatttcttcgacaaagcccaccgacagatcgaaaagaacgccggagaggaaatgcccgtctggaagggcgagctgtacctcgaactgcatcgcggcactttgacctcgcagcaggacatgaaacgcggctgccgccaagaggaatcgctgctgcgcacggtcgaatacctgggcgcggccgccacgttggccgacccgaactacgcctatccgcgcgaagagctggaccgtatctggaagacgctgctgctgaaccagttccacgacatcctgcccggctcggccatcgcatgggtgcaccgcgaagcccgcgaggactatcgccgcgacctgaagcgtctcgctgaaatcgcccaagacatgtgcgccgtgctgcgcaaggccaacccgcaggccgacctgctcgccgaggcccgcatcagccagttccgcaatgacggcgcgtcttggcatgccaaccgcatcaacgaaccgaccgacgcgctttccgtactgacccagacattggacaacggccgtgtactgctggccaacggcgtactgtccgtcaccatcgaggccgacggtacgatctcgtcactgcttgacgaggagcatggccgtgaactggttccggccggcacccgattgggccaatacgaactgttgaaggacgaacccgccgtttgggatgcctgggagatcgaatgcgaatccctgctcatggcgaatgccatgaccggatcaatcgaatcggtcgataccgaaaacggtgcggcacgagtccgcgtgcgtaccgccgacgatgacaccgtcatcaccaccaccatcacgctgcgccccggttcgcacacgctcgatttccacgccgacattgactggcacgaacgtgaacgcttcctcaaagtcgatctgccgctgggtatcgtggccgaccaagcgacatacgactgccagtatggtctggtccgccgcccaatcgtcaaaaacaccgcatcagacgaagccaagtatgagagcagcacgaaccgtttcgcccttatcggcgatgccggttacgccgcggccgtcatcaacggatcggtatacgggtccgatgccacgccgatcgccgggaatgccgccgaaggttgtgactcgggcaccatgttccgactgtcattgctctccgcgccgaccttccccgacccgcgcaccgatatcggctcgcacgagttcgactggtccgtggtggccaacgccacggtgggccgtgcgcttgacgccgcttgcgcactcaacgcaccgacgcttcatgacatgcccgacttagcgccgctcgcctcgatcgagtcagcaaacggcaccgtggtgttggactggataaagctggccgacgatggctccggcgacctgattgtgcgcgcctatgaggcggccggcggcagggccgatgccacgctgcacgtctgcccggcgctcgcaggcgcttcggtgcatgagaccaatgtgctggaaggcgacgatctggccgccgacctgccggtcgcgctgcaagacggcacacagaacgccgaaggcgccacactgcacttcggcccgttccagctcgccaccctgcgcatcacgcgctgaattcccgtctgatgcttctgcctcctcgaaccatgaggaggcagaagtatgtcgtattacggttttcccaattgtcaccacacccatcatttccatcagacacagcaaaggagaactctccatgtttcttctgcccaatcagcagttggagcgctgcgaccgcgtcatgcagcagcgcgtcaaaccgcatatccacaccacactcgccgcatgcgccttgcgttcgttccacaatcccggcgaaccggtgccctccagcgaatttctagccaaagtgcgcaacggccaagtgcccttcgaacctttccgcgttcccggagtctggggcaccacatggggcaccacatggttcgaggtgaacggccatatcgacatggcggcggtcaaaggacgaaaagtcgaactcatggtagacctcggctggctcgatcaccgcggccccggattccaatccgagggacttgtctatcgtgccgacggcaccgccatcaaatccgcgaacccacgcaaccactggattccactcgtctacgcggacggcagcagcaccgtagaactcgatgaacatggcgacttcaccgtctatatcgaagccgccgccaacccattcgtcgaaggccccaccccgttctcacccaccgaactcggcgaagaggccaccggcacctgtgacttcccatacacactgagtcgcatggatatcaccatcttcaacgaagacgtgttcgcctactacatggatctggaaaccgtatcttccctgattcgcgaactcaaggacgacgacccgcgctactggcagctcgccaaagcactgcaacgctccctgaacatctacgatgaacgcgacttggaaaccgtgtcggcagcccgtgcggcgctcgccggcgtactcgccgaaccggccgcctccagcgcaatcaaacacatcgccatcggccacgcgcatatcgactccgcatggctgtggccggtgcgcgagacccgccgcaaggtggcccgtaccgtatccaacgtgctggctttgatggacgaagacccggacttcacgtatgcgatgagttccgcccaacagtacgcatggctggaagaggagcatcccgacctgttcgcacgaatgaagcggcgcatcgaagagggccgcttcatcccggtcggcggcatgtgggtggaatccgacaacatgattccttccggcgaatcattggtgcggcagatcacgttcggccgccgatatttcaaggagcatctcggcgtcgcgccgcgcggcgtctggctaccggacagtttcggctacaccggctcttggccgcagatcgcccgccgtgcaggattcgactggttccttacgcagaagatctcgtggaacgacaccaccaagttcccgcaccactcgttcatgtgggagggcatcgatggcacgcgtattctcacgcacttcccgccctcggatacctactgctcgtggatgagcatgcacgagctgatgtattcgcagcgcaacttcctggacaaggacctctcccgtaacgcgattctgctgtacggcttcggcgatggcggtggcggccccacccgtgagatgaccgcgcgcatccgccgcgaccatgatctcgccggcgcgccgaagatcgaattcggtactcccgaccaactgttcgaccgtgtgcgtaaggatatcgtcgacgatgcgcaaggggagaccccggtgttcaagggcgaactgtaccttgaactgcaccgcgccaccctcaccgcccagcaggacatgaagcgcggctgccgccaggaggagtcgatgctgcgcgtcaccgaatacctgtgcgccgcggcccgcatcaagaacccggactatgtctatccgcgcgaagagctggaccgtatttggaagacgctgctcctgaaccagttccacgacattctgcccggttcggccatcgcatgggtacaccgtcaggcgcggaccgaatacgcgcgtgacatcgctcggctgaacgagatcgcccttgaagccgggcgcgcgatcgcagccgtggaacccgatgacgcaaccataaccgacgccgtaatcgccccatattcccgccaagcctgtgagacgtgggtggtacgcccggcttcgagccgagccgaagcgggaaccgcatccatggctcgggtcgccgttacccatgacggcgatacgattgtgctcgacaacggccgactgcacgtgcgcattgaagccgacggcaccgtttcgtcaatcgtcgatcagcgaaccaatcgtgaactggtgcccgccggcacccgactgggccgctacgaaatgctcaaagacgaacccttccactgggacgcctgggatattcaacgcgatgcgttcctcaccgccaacgcgctcagcgaggcatcgattgcaagcgtggacgaaaccgccaacggtggggccgtcgtgcatgctgtcactcgcgcgaagggcgttgaaattcgtacgggcattgccttaaggccgggctccgccacactggacttcaccgccgatgtggactggcatgccgtcgaacagttcctcaaagtggatatgccggtcaccgtgcaagcggtgaacgcgcaatacgaatgccaatacggtctggtcgaacgccccatcaacaagaacacgcgcagcgatgatgccaaattcgaaagctgcacgcaccgcttcgtgcggatcgccgacgccgactatgccgccgctgtggtcaacgcctccacctacggctccgacgtcagccccatccacgccgatgcggcacatggcaccggccgcggcaccatggtgcggctctcgctgctgtccgcaccgctgtaccccgacccacgcaccgaccaaggcgcacactccttcgcgtggtctctggtcgctgacgccgatatgaatgcggtgctggacgaagcggcgcgacttaacagccccgtaataggggagttgcctgatatagcgccgctggtctcgctcgccgacgccaccggcgtcatcgtattggactggatcaagctcgccgatgacggttccagcgatctgatcgtgcgcctgtacgaggccgccggcggcaatgccacggccacactgcgccttgacgccgctctctccgatgccaaggccggcgtgcaggaggtgaatctcatggaggagccggagctggatgccgaactgccgcgcgcgctcgccggtgacgaaccaatgcctgccgacggtgcggtcgtttcgttggcgccattccagctcgccacgctgcgtattcgccgataagggatattgggcctaggctcgatattttgggtcgcgcccaaccgtaacggaaccggaacagaccggctctgccatacggttgggcgcggcccattattgtatgagaagagggagagcgatcccgttgggcaaatatcaatgcgacacgcgacgatgaattcgttgcgtgcatgtttcgattgtgttatgtttttactaaaccgatttagttaacaggttcgcgactggccggaagctaaaacggtttagtctcagcgatgagaactgaataaaggttgtgataccacgtcaatcaccgcgacgggtgactgtgctggagcacaacgattaggtttctccgtccacagcagggcgggatgaaaaaggaatcaaaaggaaaggaaaacatcatgttttctatgaagaagatcctcgccatcgccggtgccggtgcgatgctcgtatcggtggctgcctgtggtagcggaactgcgggggatgacggcggcaagaaggagatctccttccagacctggaacctcaagaacgacaagtacaccccgtatttcgaggcgctgatcaaggcctatgagaaggaccacccggacgtcaccgtcaagtggcttgacgccccgtccgatggttacgaagacaagctgtccagccaggctgcggccggcgaactgccggacatcgtcgacggcggcaactccatcctgtacggtcttgccaaggccggcgcgctgctcgatgtctccaagcaggctccggatgcggaaaaggactactacgaaggcgcatggaagtccgtgaccatgcagggcaatggcatcgagaagggtgcctacggcctgccgtggtatgtcaacgatggcccgacctactggaacaccgagctgatgcagaagtgcggccttgatccgaacaagattccgaccacatgggatgagtacttcgccgccggcgacaccatcgtgcagaactgcaaggatgtctacctgggcaccacgatgggttacaacaccgaagatctgatgaccgcaggcgtcaagtccttcatgaacgatgaccacagcaagtacaccttcaatgatgaggccggtgtcaagcagatcagccgcttcgttgagctgtacaagaagggcggcatcccgccggaggccctcgactcctcctggagccaggccgccgatctcttccagcgtggcaacctggtctccatggccggctccgcctactccgctgacggcttcaagcagaacgctccggacctttacaagaacctcgcagtcggcccgcgtatcagcaacgacggcaagtccgcttccgtggcctacgagatgctcggcatcagcgccaactcgaagcaccccgacgttgccattgacttcgcccgattcgtgaccaacgagaagaaccagatcgagttcgacaagaaggcctccgtgttcccgtccgccaaggggggtctggatgacgactactacaagagcatcgacgaaagcacccttgagggcaaggctctgaagatcacgctcgaccaggtcaaggacggctacggctctcgtccgtccgagttcaccgacaacaacggctccaagaacttccagcagcagatcgccctcgctatgcagggcaagcagaccgccaaggaagcccttgacaagtccgtcgagttcgcaaacgagaagctcgcacagtgagcaacgcggcactcgccgctgacaggtcggaggcccgcacggcctccgaccggcctgaaccgatgaacctcaaccacggcaagaagcagaatcgtagcttcggcaccatcattgccccctacctgtttgttctgccagcgttcgcgattgtgtttgtattcatcgtccttgcggcactcaacactttcaggcttgctttcaccaactccacactgctccgtccgggaaccttcgtcggactcgaaaacttcatcaaactgttccatgacgagtacttcctcacggcactgctgaactccacactctacgtgatctgcgtagtgccgttcatggtgatcctcccgttgatcctggcctatctggtcaagggcaactcccgcatcatgggcttcttccgcaccgccttctacatgccggtggttatgtccgccgttgtggtgggtatgatctggaccaacctgctggattccgccggtctggtcaactccgtgctcaaggcattgaagatcatctccaagccggttccattcctcaccgatcgatggggcgtgctcttcagctcgatgttcgtgacaatctggctgggcctcggctactacatggtcatctacctgaccgccctcgccaacatcgatgaatccctttacgaagccgcctccctcgacggcgctggccctgtccgccagttcatctacgtgacaatgcccggcgtgcgctccacgatgatgctcatcatgatgctgtccaccatcgccgcattccgagtcttcaacgaaatctacgtgttgaccaacggctccgcaggccccggcggcatggatatgacgatgtcgatgcttatcaagcgcgaaggcaccggtatccaggcccgcactggttacgcgagcgccatctccatcgtcgtgctcgtcatcgtcggcgtcatgctcatcgtgcagcagatcgtacaaaagcgaggtgaggactgatgaataccaacacgcataaggtcaccgtcggcaaagtcgtccagtatctgattctgattctgatgttcctgctgctcgtcggcccgttcgtctgggaactgtccctgtcgttcaagggcaagggcgacaacgtctacgccgtgcctccctacctgatgccgaagaccccgacgctggacaactacatttccgtgttcaagcaggtcccggtattccactacatgctcaacacgctggtggtctgcctgatctccatcttcggcaacgtggtcttctccacgatggccggctacgcactgggacgcctgaagtggcgtggccgcggactggtgttcaccatgttcatgggcaccatggtcatcccgatcgaaggcgtgatgatctcccagttcctgatcattcgctccatccacctgcagaacacactgctggcagtcgcactgcctggcctgtgcggcgccatcaacatcctgctcatgaccaacgccttcaaatccattccaatggaactcgaagaggcggccatggtggacggtgccaacctatggcagcggttcttccacatctgtgtaccgcaggtcaaaggcacgatgaccgttgtcggcatcttcgcattcgtcggtgcctggaacgacttcctgtggccgttgatcgcgatctccgatgaaagcaagtacaccttgaccctcggcatgaaccgactcaagggcatgttcatccaagatccgcgactgatcgccgccggtgcgctcgtctcgcttatcccgatcatcgtcttcttctgctgcttccagcgctacttcttccgtggcctggaacagggtggactcaagggctgagcggactggaaaaaggaggtactccaatgaaattcggagtcaactacacgccgtcgcatggctggttccacgcatggctcgacccggactgggacggcatcgacaatgatctcaagcagatcagcgaactgggtatggaccatgtgcgcatcttcccgatctggccgtatctgcaacctaatcgcacctggatcaacaagaagggcgtggcggatgtgcgccgcatggtgcacatcgccggcgagcacggtttggatgcctatgtggacgtgttccaagggcatctgtccagcttcgacttcctgccttcatggctggtcacctggcatgcgggcaacatgttcaccgatgcggacgccgttgcggccgagcgtgaactggtcaagaccatgaccgatgagctgtccaaggaacccgcgttcaagggtctgaccttgggcaacgaggtcaatcagctgtctgacaggccgcatcccacgaagatgagcgccacggaccggcagatcgacgcatggctggacgcgctgcttccgaccgccgccggtgaagggcacaacgcgctgtacagcgtcaacgatggcacctggttcatcgatgggcacccgttcactccggtgcagtccgccaccaagggtgatatgacagtgattcactcctgggtgttcaacggcatcgcgcaaggatacggcgccaccagtgaggagtgctcgtcgtacgcactgtacctggccgagctggccaaggcgttcggcaaggattccgagcgcccggtgtggctccaggaagtcggtgcgccggagaatgtgctggaaaccgactacacgccggaattctgccgcaagaccgttgaacgtgccatggattgccggaacctgtggggtgtgacgtggtggtgctcgcacgatgtgcccgccagcatggaagacttcccgttcttcgagcactctctgggcttgttcgacgagcaaggccagctgaagccgatcggccgtacgttcggggaactcgccgcacagtaccgttccgcattgccggctcagccgaagaccgtcgccgtggtgattgatgtggatgaggccggaaacccggtgaaccgcagtgcgctcggcccgggaggctcggtgtgcgacctgtggatgaagctgcaggtggcgggccagcgcccgaccatcatcacctcgcaggtggcggccaatcaagaggcgctcgcgcagcgtggcattctggaattgcacgctgacgaacacccctatgccgcccgttactacactgcggtttcggacccatcgttcgaaacggctgattaaaccgatatccggttgtggaatcatctactccttgttccacaaccggatattttcaattgcagtgcgcagggcaaaacataagatccggtactcgccgaagagcgagaagaacgagaagacaatatacgagaagggggagcgctcaatgagcatcaattgccccgcagtggaccgactcattgattcgatgagcttcacgcagaaagttggccagttgaaccagcgtctgctcggttggaagtccgtggaacgcaatgctgcgggacggctggtggcctcggacgagctcaagcaggagattgaccgatggggtggactcggcaccctgtacggtctattgcgagccgacccatggtctggtcaacattggggtaacggcatacgccctgaggagcggactgaggcgattgccgtggtgcagcaaactgtgctggaacgtggcgcgcacggcatcggcgtattactcagcgaagaggcgcctcacgggcatcaggcgctgggcggcacggtgctgcccaccaatctgggtttgggcgctacgtttgacccgcagggggtgcaggaagcggaagccgcggttgccgcagaactggccgccagcggcattcatatcgcattggtatccggtttggacatcgcccgtgacccacgctggggccgttgcgaggaatgcttcggcgaggatccgctgatggctgcccgcatgtgcgaggccatcgttaccggcatgcagggtgagcatcgcagcaaggtcggccacgggggagtggccgtggtgctcaagcatctggcggcgcaaggcgaggccgtgggcggccgcaacggacagtccgccgtactgggcccgcacgatcttcatgaaattcatctgccgccggtggccgccggtgtgcgcgccggtgccttgggctttatggcagcctacaacgatatcgattctgtaccttgctgcgccaacccgtggctgctcaaggattatctgcgcgaccagctcggtttcgacggcatcgtgatggccgatggcctggccgtggatcggctcgaagacatggccggctccattcccgcggcagggcgtgccgcactgctcgccggcgtggacgtctccctgtgggatgaaggattcacccgcctcgaagaatatgcggatgacgaacaggtagtggccgctgtcgacacggccttgcgccgggtgctggaactcaaagccatgttcggtctcttgcccgaagacggtgccgataccgccgcaattgccatgccgagcgccgacgccatcgcgcaggccactgcggatgggcgtgagcaggccaagcgcatggcccgcgaggcgataacgctgatcaatgatggccagtctgccgccacgctcgacgatatccgcagcgtcatagctgatgctcaagccggccctgtgattgtcgccggcccgttcgccgacgatttcggctgcttcctgggcgattacaccgcccctctgcccgccgatgaacagtcaagcgtctaccggcaattggtggcacgtctcggggaggaccgggttctcttggccgccaagccgagcgatgcgccggccgatcaatgggcgcgtgcgtcgaccgtggtattcgtatgcggcagcaccagcgaacgcagctatgacagtgaattcgacgacaatggcgcggcgaaggccgtaaccgaatacggtgccacctgcggcgaaggcgtggacttgtctgacatccgcctgccctggcgtcaggatgacatgctaggcgaagtcgcggcattgaccaccgctccaattgtttcggtggcggtgtgcggtcgcgcgcatgtactgaccgatgtgctggaacgctccgccgtgacgatctgggccggatatgccggccaatatgggccgcaggccgtagccgacgtattggttgacggagccgacatgtctggccgccttcctgtgaccttacccgcatatcccgcagccattcccgttcgatacaatgaccgccaaagtgccgcgcatgtctacaaggatgcggcggaaccgatattgcgcggcttcggctatggagccggttcgctggcggcggtgacgttcagcgagatgcacgccgatacgcaatcgcatccaggtgaagtgctggtgcaggtgacggcacatgctgacgatcacggggccgcgggtgccgtgaatctgttcgcgcatgtcagcggcggccgccgcatcccacgtttggcaatgcttgtcgattcggtatacatggacttgaacgcgggagagcgtcgcgatatcgcgttccacgtgccgtgtgatcgtctgcgggatgtcggtgacgggcaagttcaggtgacctgcacgctggatggagattcgacgcatacggtcacggcgacgctgccgggggaatattagggggcatgtatgaatgtggggtgcgaagcactggaaccgcatcacacccccggatggagcctgaaaccgcaaggcatccatcctcgcaacctgcaagtctgcgggttgtcacccgatagaggaaacaacaaaggagattatatatgtgttgctcacaaggtagtgaagggcgctcgtccatcgggcgcagactcgccgccgtcgcggcgggcgtagtcgccacagcactgatgctcggatgttcgctggccatgggaacggttgcgaacgcccaggagggggattcccccgttgcgacgtcgcaggagggtaacggcaacaagcatttcatggtgtattaccgcgcatggcgtgacgtgaccatgaaaggcgtgaacaccgatttaccggatgacaattggatctccatgtacgacattccatacggcatcgatgtcgtcaatgtgttcagctacgttcccagtggccaggaagcggcggcccagccgttctatgacaagctcaagagcgattacgcgccgtatctgcatgcccgaggcatcaaactcgtacgaggtttggattacagcggtgttatggtcgacggtttcaagacgtggattgctcagcagggcaaaaacgtcgatagcgcgaccgaatcggattatgacgcatacgccgatcatgtcatcgaaacgtacatgacctcggttggcctcgacggtcttgacatcgatatggaaactttcccggatgccgcgcaggtggcgatttccgatcaggtcatcacagccctcgccaagcgcatcgggccgaagtcggataacccggaaggcacgatgttcctttacgacaccaatggcagctacactgctccgtttaagaacgtttctgattgcttcgactatgttgcctaccagcagtacggttccgattcgaaccggacggccaaggccgctgccacctacgaacagtttatcgactcgaccaagttcgttcccggcctgaccttccccgaagagggtgacatgaataaccggtggaacgacgcgaccgaaccatacctggacagtcatttctatgatgtggcctcatactcgtacgaccacaatctcggaggcatgttcgtctacgcgctcgaccgcgacggacgcacctattccgacgatgatttggcacacatcaaaccgtcgaatctgatttggacgaagacggccatcgcacaaagccaaggcatgagtctggaaaacgccaagcaggctgccaaccacttccttgaccgtatgtcctataccaaggatgttccagccgaaacgcgccaaaccgtggcagcggccaccaacctgtatgaggtgaacaaggcggtgctcggcgcggattggaacgacggatacagcaacacatatgatccgacgctcgaactttccctgacctccatcgacaccacggcacttaccggtgccatagccaaggcggatgcattgctagctgacggcgcaaccgataccgatgtgcggacaacgctgaccacggccagaaacgcggcggtcactggcctgaccagcaagctgtataccggagctgacgttgtctcctggacggcatcgctcaacaccgcaatcgcagatgcaacgggcggcaagcccaagccgcaacagccaggcacaggcgaaacggacaaacctagttccggtgacgcatcacacaacaagccacagtctgcaaccggacgtctggcaagcaccggttccgatggcaccgtcgtgctatcggtcgccgtgattatgacgctcgccggtatcagcgtattcgcagtccgccgccgcggataacaccggttcgaatgaaccgaaaaacagtatttgggatacggcgcgatatgcgaagcgccgtatcccatggcccacatcggtagggacgaagtagtacgcagacggttgatctccggcgtaagccggaagaagtcaaaggagattatagatgagattgtcactaggcgatcccgctgggtgtacttctgcccgggctcaacacaggaaatggctgtgcagcggtctggccgcggtattgtcgatgaccacgctggcggcgttggccgcaccggccagcgccaccggcacaatgccatgggggtgttcctatgtttttgtcaactccttggggagttgacgtgtcgggattccggttggctgtcgtgggcgcgcttcgccctgccggtggcgtccggcgtcctttcccgtgtggcccgattcaggctacgagggctggttcctggtagaggacgccgtttttgagcatgctgtagattacgtcgcagcgtcggcgcgcgaggcagatgacagcggcgttgtggtgcttgccctgttcgcgtttgcgcttgtagtaggcgatggacggcgggtgtttggcggacgcgacgaacaaggactgccacagcgcgttcctgaggcgtttgttgccccgtctggagggtctctcgcccttgatgctggtgccggactggccggtggccggagcgatgccggcgtaggcggccaggtgggtcgcgcttttgaagttggcgatgtcgccgacgatgttccagcctaccaggacttcatgaagcagatcgtcgatcagggcatttacatccagtggtacgactcagccacatacccgggtggcggcgtaggctaccaagacatgttcaacggcagcaattcgccgtatgtgcaggatacggacaagggcaagatctctgattccatcttcctgaactactggttcagcggcaacatgcttaaggattcggccgctcacgccgagagtttcggcatcgatccgaaatatgcggtgtttgctggcatcgagtccggacagaagaagttcgacagtatcggcagcaatgcgggctatatgaacgtcaatctcgacgatacaggtaagccgtatgtgagcctcgccgcgctcggcaccgacttcgtctcccgcgaactgggcgacgacaagaaggtctatccgaaataccagaaccaggtgttcgaccgcgaacgccgactgtggaccggctcgtccaccggcgagaagggcaccaccgacatcgccgacaattacatcgacgacggcacgagcaatgacggttggaagggcttcgcttcccagatcgccgaatgctccgtggttggcggttccatgttctctacgtcgttcgacaccggtcacggtctcgaatggcgtgatggcggcgaacggaccagcgaccagcagtggggcaacatcaacctgcaggatattctgccgacatggcagtggtggatcgatgccgactccgacccgctgcaggccgacttcgactacggtaaggactacgaggcggtaccacgcttcaagtacaccaaggtcggtggttacgaaggcggcgattcgctggtgctgagcggcaagctctccaacgacaacaccattcgcctgtacaagaccgacctggatgtcgctgccggctccaagattgacctgacctacaacaagctcaacagcgatgattccaagttgcagcttggcctcatccttgccgacgaccccgagaccgtggtgccggtggacgtgacggacggttcggcaggcaacggctggaagaccgcgagcgtggacctgtcccagtacgcgggtaagaagatcgccacgctgggtctgatcgtcaaggccggagccgactactccaccatcaagaactacttgctctacctggacaataccttcctcggcggccgctacgacgacaccctgtatgtcaagcacctgcccgccaagaccggcacgctcaagctctacgccgtgggcgcggacggctcgcgttcgctcgccaccgaagcgccgctgaacgaagcggcggccgtctccgacgtgaaagtcgaaccaggcaaggacggcaacgtcaaggtctcttggaccaatccgcaggtatccggcgagaaaaccgtgaccgtcaaatccgacaccggttcgtggcgttacgccgcgaaaccgtattcccagaccgtcaaggtcgccgccgacaagagcaaagtgacgattgccaatgcgccggttgacagctcccgctatgtggtgaacgtcgataatgcaggtggcactaccgctacggcaacaggtgcatttgccgatgccgccattgagccgtatccggcttgctcggtgatctggaatggcgataatgtgacgttggcccgtcctgagactcaagactggcgctacctgtacatgaccgagaagtggatcggcgagaatggcaagcagcagcaggagaaccagctgggtgctagctacacctactcgcagaacactccgccaatcactggtattatccgtggtcgtaccacacctgcctcatacaccaggtccatcccccgccagtcatgaactgcgggtgcaggtcgagga

SEQ ID NO: 2277 - DNA, 54016 bp, Unknown
  R119_18m  MAG No. k141_12192
caacggattgtcatacaggttgatgtccgcgaacttgaggttctcaccgtcgcgttccgcccagaacgaatcgttgaccgacagccccttgcacaggtcgatgatgcccagcgtatccgcaatgttcaaccccgcctgcgcaagaacctgcgtggcgaactcacgattcttcggaatcgtgcgccgctccagccacgtcgtcagcttcgcattatccggctccggagccaacggaaacggcagcaacgcgcgcttcgactcatcgaaccagcggacatgcgcctcgatcttgcccgccagcaggccctcgccatacgacgcatcgaaccggagcagcggatcatcatagagccgcagcacgtaactcgtcatatccggcccctccaatcacaagcccgctccaaagtcatatcgggcgattcacatatgaagaacaactgtctacagtatagacaagggccttggaacgcgggggcttcactctgaagtcaagtatttgatacaatttggtgcaaaaagatagtaaatagcaataaggagtggctatgagcatgcagattgccacgcgagttgatgacgagcaggctgcgttgtttaaggagacgacccgacagctgggtaccaccccggccgatgccctgcgtatgttcatcagcgcgttcaatgattaccgtgggttcccctatgaggtgcgtttgccacgaaatgacgtggagccgtttgcgtccgagcgggacgctactgagtatgccagtcgtctcgccttgaggatgtccgatgaaacgaggtgagatttggacgttgcaggccgatggctacgccagcaagccacggccggttgtcatcgtgcagagcgatgccgtcgatcggttcgattccgtcatcacttgtctgctgacctcatacgattcctccgacatcgacacgcgggtccgattggaaccaagtccggagaacggcctgaacaaagtgagttacgtgatgacggacaagatcgtcaccgtcgaccgcaaactgctgggataccaagtcggcgtggttgatgatgcagccatggcgaatatcggccgtcagctcatgcgggttctaggtttgctgtgacgtttgggatggctggcgggcgtgcgtctacttgtgacatcgtttatgcacccttgaggccgtatgatgatggcgtcgaattcaagctctccccaacgtctaagaaatggcttccttcatattacggtcatacgaccaacaccatatgaaggaagccatcatgaatggtctaacggcaatcagcttctcatacgtgattgccagtcattcaccgaatcagccgcggttgtcgaacatctgcagcagcatcttgctgggttcgacggcatagacggtgtgcggcagacgggcgctcaggtagacgatgccgccggccgtaagctcgacttcacggccttcgccgccgacgcgcagcttgccttccagcacctggatgatcacgggcatggccgcggtgtgctcgctcagtgcctggtccttgtcgaagccgaacagcacggcgcgcaggccgtcctcgcgcagcaccgtacgggagacagtggcctcctcctgaatatcgatcaacgaggccaagtcttcgatgaatccaagatgcggctcggtcgaaatggcgtggccttcggcgtcgtgggcgtcgtgcttgcaggcgcagtgcttggcctcacccgcttcagcggccgcgacttcgccatgcttgcagtggcactccttcttcgcgcccggctccgcggccgcgccctcggcgtgctcgtgcttgcaggcgcagtggtgttcgccgttggcggcagccgcctcggctgccgcggcggctttcctacgctgcttgcacttgcaatgctgctcgtcgcgtcctgccttgcatgcggtctgctgctcgttctcatcggccatgatgctctcctattcgtcgcgcgtacctcacatacgcgtcatcgcttttacttgtttcccattatccggccatcgttgggccggcacaccgctgttacgcttcgggcttgcgcacctcatccttgacggattcgtccaggttgtccggctgcaggccgagttcgtgaatcgagtaggtgccgccggcgcgcagtagtcggaaggcctcgccgataatcgcctgcttgccacgctcggtctgcatggtaagcatggcttcgccgatcaccacgtcggcgctgttggattccagaccggtgtcggcggcgtcgcgctgcacgcagcttgccggaatcgtggccttctcactggtgagtttggagatgatgtccacgacctgctggtcgcggtccacgccacggtagctcttggggtcgcggtcggactgcggcaggggcagctcgcggttggcggcgggtttggtggcggtggactgagatgcctgagaaggctgcgatgtagtggtcatgtgtcgtgatgctatagtccacagcccgcccgcacaagggttttcgctagaaatcagccgaatgtgagaatgctcacccgagtaggcgcctgagcatgcggctcagggacgattcaggggatgctcagggttcccgtcaccgattccccacatatcgcccgcgttcgcctaatagaatggaatccagcattcgattcggtatccggcgcaatgccggcaaacgtgaggaacttacgatgagggtcatcggcaatattctgtggatcattctgggcggactggcaatcgccatcagctggacactgatcggactgtttctgtgcatcaccattatcggtattccactaggagttcaggcgttcaaaatggcgggccttaccttgacgccgttcggcaaaaccgtgcaatacggtggcggcgttggctccacgctggtcaatatcctctgggtggtgctggtcggctggtggatggcactcggctatctgggtgcaggcgtgctcaactgcatcaccatcatcggcatcccgttcggcctccagtcgttcaaaatggccaagctcgcgctctggccgttcggcgcacagatctacagtctgtaacaattgtttctgcagtaagtccgatgcaacgcattatcatcgtgcgttgcaccggacttttttatatacaacgggcatttcacacaccgcgtgatttgacggatttggatgcaatgccttatagtgcgcgaaccatgattcaacacatcgcattaagcagcaacggcgtgaacgaacacgccatctgatcagtacacctctcattggcgcatagctgaatcattgccggtgatatcgagcgactcattcgcaccatgcctcataaacgcacctgtacgagcatgtgttcttggcatcgtcgcaactcaatgcaccgcggcaaaacccattgcataccatcacatattcagaaagaacaacagatcatgaagtatttcactactgacacgcatttcgggcactacatatgtcactcacacgcagtcatgcgcacaactatatttttgcatcatccatgattttatagttgtttattgactcatttccttctccatcttatactttctacaatcaaggatgctctttgggaagcgagtctctctcatggatatgaagtatagaagtttggcaaggctgttccatgccgacaggtcagtcgattccttcaataaccatgcagcactcgcacggcagcggcttgaggcagattccacattcaggaccggggtcatcacgccattgggcgagctgttctccgccacgccacgcgagacgaccctgctcacggaaaatatacttctcgccgaaaggcgcgtatcacggctctggaaccagattcccggcgtcatgcgctgggactacatacggcattccatcagtgaggaactgttcgccaccaacgagatggaaggcgtgcgcagcacccgcaaggaaacccaggacgccgtggacgcggccgacaaggcaaggagggacggcgacgactccaaggcgcggttcagcgaatttgccaagctgtacctgaacctcacggacaaggactccgcgttgccggcgggcatcgccgacatccgcgacatctatgacaaggtcgtgctcgacgaaatcgatgagagcgatcagccggacggcgacctgttccggaaaggcgatgtggaaatacaggggccgcacggcctcgcgatccataacggagtcaaaggcgaaggcaacatcggcgcactcctcaccgatatgatccatctcgcgacctccgacgagattccccggctgcagtcggccatcatgtcgcacttcctgttcgaatacgtccacccgttttacgacggcaacggcaggaccggccggtatctcctggccctgtacctgaaccatgacctgactatgcccaccgtgctatccctgtcccgcaccatcgcggagaacaagaacgcctactacaaagcattcatggaggcggaggacaagctgaactgcggcgaactcacgctcttcgtgaacaccatcctcggattcatccaacaagcccaggatgagctgattgacgaactcagtatcaaggtcgatcagctcgacaaaggtcggatactctgtacacagcttgaaaagaggcatgccctatcgcgcaatgccgtctcggtgctctatggcgtgattcaggaagaactgttcgactcgtccaaatccatgtcgttggacgaagtggcccatcacatcggactatccaaacagagcgcaaggaaatacgtggaagagctcttggccgcggggctggtcgtacagaccggaaaacgtccgctgaaaatacaggtggcgaaatcattgaggaatgttctcgccacaggagccgacgagaacgcggaagcctaagaaaagtagacgcaaacatctcatctcaacgaggttcataaaggttcgtaacatgaagaaaggtctgggcaaccaacactgctcggacctttccgcaacactcccgtcagtcgctttccgcgacggctcccctcaggaaggggagccgaggaaaactacttggacacattaaatttgaactccacaatatctccgtcggccatgacgtagtcgcggccttcctgacggagcttgccttcctccttgatcttggccatggagccgtcggcggccacgaaatcgtcgtaggagacgatgtcagccttgatgaagcccttttcgaagtcggtgtgaatcacgccggcggcctgcggggcggtccagcccttgtggatctgccaagcgcgcacttccttgacgcctgcggtcaggaaggtctgcagtccgaggatgtcgaagcccacgcgggccagttggtcgagaccggactcgctcaagccagcgtcggccagcatttcgcgggcgtccgcctcgtcgagctcggtcaggtctgcctcgaactgagcgttgaggaacacggccggagccggggccacggatgcggcgagctttgcctgcaggttcttgttggccagctcgttgtcgtccacgttgaacacgtagatgaacggcttggcggtcatcagatgcaggtcgtagacggaatccttgtcgaagcggccttcgcgtgcggccttgtcgagcgtctcgccggcttcaaggatggtctttgcctgcttgactgcgtccatgtaggccggctcgatcttcttgcccctcagatccttctccagcttgggcagcgcgttttcgatggtctgcaggtcagcgaggatcagctcggtgttgatggtgtcgatgtcgtcggccggatccaccttgccgttgacgtggacgatgtcgtcgtcctcgaaggcgcgcacgacctcgcagatcgcgtccgcctcgcggatgttggccaggaacttgttgcccaggccttcgccttcggaggcgcccttgacgatgccggcgatgtccacgaaggtcaccgtggcgggcacgaccttttcggtgtggaccagcttggccagcacgggcaaacgcttgtccggcaatggtacgatgccggtgttcggctcgatggtggcgaacgggtagttttcggccagcacgttgttgcgggtcagtgcgttgaacatggtggacttgccgacgttgggcagtccgacgattccgatagtaagagacatggttccagtctagggagaagctggacacattgaacgtgcatgtggtgaaccggccatatgcaaaggcctccgagcatacggctcgaaggccttgactgtgatatgcgaatatacgcgaactctgattggcagtcagccgacgatggcgtctacggcgtcgatgaccgagccgcggaacccgtccttttcaagctgggcgacgcccttgatggtggtaccaccgggcgagcagacggcgtccttcatggcaccgggatgggtttcagtggccatgtagagcgcgccgacaccttcgaccatcttggcggcgagccggtaggcggtggctcgctgcagaccgtactgcacgccggcgtcgcccaaggcctcgatgtacatgtcagtgaaggcgggcgcacagccagccaccaccatggcgatgttcatatgcgcggtgtccacgcgctcgatgaggctgatggggccgaatagctgctcgaaggtttcggtttcgtcgtcggtcagggtgttgacggattcggtgacgagcacgcccttgcccacggccatcggagtgttcggaatggtgcactggatatggatgtccggggagtcgacggattcgccgtcttcggtggtgaacaggtcctggtacttcttgagattccagccggcggcgatggagacgacgatcttgcccggcttggcaagttcgtcggccagcggcttgacgacggcggcgatctggtagggcttgatggcgatgatgaccacgtcggcggccgtcaccacttccagcgcattgcgcaacggacgcacgccaagttcggcggtggtcttctcaagcttgtcgtagtgggcggcgcaggcgaccatctggccgccggcgaccacgcccgcgtcaacgaagccttgggcgatggcctgggccatgttgccatatccgataaaaccgatggtgaggttctgagtcatacgttttcctttcgtgcatgtatacagagctccctcatcagagggagcttgcttccttgagtcagaacagttcttcgaggtcgccccggttaagggcttcgtcatagagatgcttgaagacgagcgggccgtgcagaccatcatgctcgaattcgttggtggtccagtagtggctgttacccacgcggctcaaggtgtcgagctgcaggccggaatcgacatacatgtcgtcgaaatagacggcggcctgcaacggcacctcattgcgggccagctgttcttcgtcatagatcacgccgaagtgcgtgtcttccatgagcaggtccatggccggcctgaacggacgtaacgcagactcctgttcgaacatccacgggaacatggcctcgccggtgaagttgagcgggcgttcatcagcaccgaattcgggcttgccatcgcgcacgcgctgggcggcccaacgaatgggctcgtcaagctcaccgttggcgtagatgaactcctgcagcggccagtacagtgggcgcgacgacgtggcgttcatcactttggtcaaaaattcgtcagacaacggcgagtcggcagaagcggaaccatcgccatcaaggaaggcgtcgtcaagaatccaatggacacgctcgaagctcggcttcatgccaaagtcggatcccaagcactggaagcgttcgacggtgagcgggtcgccgttcggcatcagcgggaagccgtgggcggccatgccggcgatcacgccaagtcgatgctccacatcggtaccagccatcggattcagtacggaatcggtgagtttgccaacgaattcggcgacttccgcagtagtcggcagcttgtcggcgatggcggccacgcgctccttgtcctgtgggtagcgctcgtagaactgagtcgtcttgcgcaccatgcgcgggaaggtatgctcgtacacttcagcggcgtcggccggcacgtgcgggatgccgccggtggtgaagctggcgattacgccggccgggaacagggacagtgtggtcagggtcaggaagccgccgtagctttggcccatcgtcacccacttgcggccaccgaattcggtcaggcgcagatgttcgaagtcacgcacgatggaatcggcaaggaacttcttcaggtagtcggcttgggctcgtgcgccggccgcggcatcatcgtcgtgcgcggcggcgatgcgggccatggcgtgcgtgtccacgcgcgaggagcggccggtgccgcgctggtcgggcaggatcacccggaagtgcctgatggcctcctcgatccatccgtcggaggtcgggctgttgaggcgcgggccggcaccgccgggaccgccttgcaggaaaatcagcaggggcaggtcgtcatgcacgtgttcgggcgcggtgaccacgcgatagaacagtttgatggtttcgccgtcgaacgcttggcctggctcatggccggtccagtcgagcggaacatcgatggaatggtcctctatggccagtccgggcacgtagtatttgctcagcattgtcatggttcaagactctagtccataaatcctcctgaagagtgataccggttcgtcgccggacacgctagccttgcgcgttatggagattatggcgcgcgtgagggcatggtgcgcacgggagtcgacccgcacactgctatgggacacgttgctcgccgcggcgctgatcgccggctgcgtgccgttcatcggcgtcaccagccctgattcgacgggcggcatattgtttcccgcaactcaggcgtcgatgacgctgtggtcgctgccggtcttcgtgccgctgatgctgcgcaggtattgcccggagccggcggcctggctgttcgtggcgctgaccatcacgcatcttgtgttcggcccggcgatcatgtatttcgatttctacgccctgatcatggtgtattcggtgattctgtacggcaatccccgacattcctggcggttcatcgtcacggcgttcgtcatgggactggtcgcggcgatggtctggtcggtgtctttcaacgtgggtccgctgttcgacggaccttcctccggttcgcgcgtcatccgcgacggctggctgtccgatgccatcacgatgcccacatgcccggcggtcaccggcgtcgtgggggcaagcggcgccgtcaactgcggggccaagatgctcgcggacttcggcatggaggcggcgttcatcgaatcgagcgtgctgagcgtcatcatcatggccttgtggcagcgagcgcgcaacgccacgctggcggccatgcgcgagcgcaacgcctccattgtggcgaaagaggccgaggagacgcgcatcgcggcgctggccgaacgcgcacgcatcgcccgtgatatgcatgatgtggtggcacatacgctctccacgattattgtgcagtcggatggcggccggtatgcgggtgcgcatgatctggccatcgccaagcacacgatgggtacgattcgccatgaggccgaacgcgcgcagcatgatatgcagcgtctgttcaatgtgttcggtgcgagtggcagtaccggatatgccgacatcgattcgctgtttgacggtcatctggtggtgtcccggcatatgaccggcaaagcgcaacctgaccggctgtccgccgacgcggaaaccgccgtgttccgtcttgtgcaggaagcactgaccaatacgcgcaaacatgcgggcgagggtgctaaagccaccatcgatgaaatctggtcaaacgatgtgctgtcgattaccgtatccgataacggccgtggcgcgacgtctgcagcagacggtcataagcccggatacggattggttggtatgcacgaacgcattgagtcgttgggtggcagcgtgcaggccggcccagggccgaatggtggctttattgtggcggctacgattccgctctccccagccgccccacagtctggcaccgatacggaggatccggtgctagccgttatctcgcgtatacgaggattgatggatcgggcgcgccccaaagtactcgaccaaggagatacacgtgagtcgaactgggtgggtcgatttgcgcagtggaccgagcggcactatcttctgatggacgttatcgccactatcgtgctgattgcgctatttgattccgccacgtatggcgatttgcaaatgatcggcaatgccccgtattcgccgaaccgcgtgccgactataacgctgacgattattatgctctcgcctttggcgttccgtcgccgcttcccagagggcagcgcgctggcgatggcggtgctgtctgctgtgcaactgttgttcttgccatcgattttgaccatcaatatgtttgcgatggtatccgtgtattcggcggtattgtatggacgagagtccgcttggcgctgggtgagcgtggcgctggcagccgattcgtggcttgcgggcatcaaggtgatggctgggtggaatggatacagtcagctgttccatctgtttttgcccgatggtagttccatgctctcaaaatggaggctggttttgtccggcttgctgccgggcgcgggaatcatgttggtcggttttgcctgcattgcgatggctcgatggagccgttcgcgtggcgcaaacgctctggtgctgttgcgacgcgaggaggcactgcgagccgagcaggagcggcaaaaggtgctggcggccaacttggagcgcaaccgtattagtgcggcgatgcaaaccgaagtactgaccacgctggaatcggtgattgcgcaggctgacgagggactggtgatgctcaacgccgaacctgcgcctgatagtatgcagattgaagcggcttttgccgcgattggtgctcgggggcgcgccgcattggctcatatgcgtcagctgttgagagtgttgcgtgaaaccgggttcagcgacgaggcccatgagggtgtgcagccggatatgcagttgcgaccggcggcttcgttggatagtcagatgcaacacgcgggaacgttaccccggtgagagacttgcccaataagaactcagggaacaatcagggtgtttatggagcggcgctccgataggaaacggatacagtggagagcatgaacgagagcagaagcattcgcgtgattattgcggacgaccaggagctggtgcgtgccggttttgccatggtcattggttcgcaaccggatatggaggtggtcgggcaggcgtccgacggcgcccaagccgtggcgttggcggaatccctgcatcccgacgtggtgctgatggatgtgcgcatgcccggcatggatggcattgaggccacgagccgtattacctcgctctcggccgcgccgggcgacgcggccgattcggccagcccggccgcgccgggcgacgcgaccgtctcggccgaatcggctgacgaccggccgacgcgcgtaatcattctgacgacgttcgatttggacgagtatgtgatggcggccatcaatgccggtgcctcgggcttcctgctcaaggacaccgaaccggaaacgttgctcaattcgattcgtactgtattccaaggcaatgcgattatcgcgccttccgccaccaagcgactcatcgaaaagatgatgcaggacggttacgcgcagcatggttcgctgaccggcgatgtcgcgcgctccggtgccgtgtacggttccgccgtcggcgtctctggcggtgcggccggcaacggtgccggctcgatgaccggcatcccctcccctgccggggccgcttccgacggttccaatacgtcacgcccagcatacaccgatcccgaactggatctgcttaccgaccgtgaacgcgaggtgctggtggagatcgcccatggtctgagcaatcaggagatcgcggacaagctctttatctcccttcccaccgtcaaaacccacgtggcgcatatcctcgccaaaatcaacgcccgtgaccgcgtacaggctgtagtcttcgcgtacgataacgggctggtgtaacaaaaaagctccctctgatgagggagcttattgctctacgcttcggccaaggcttcaactggtggcgttttgacggcccggcgggcgggtgccacgctggccagcagagcggcgagcgcggcgacgccgagcaccacaccgttggtggcccattcgaacgggaacacggtgtcgccgtacaaactaaacaccatgtaggatccgagccagccgaacagggtacccaataccactcccaccacgccggagacgagcgaaagcagcaacgcctccaccgccagcgagcgccgcagttggccgcgcgtcatgccgatggcacgcaaggtggcggattcgcgtgtgcgttcgatcaccgacagactcagcgtgttcgctacgccgaccaaggcgatgagcacagccaccgcaatcaaaccgaccaacaatgccatcatgccgttgatcatggtctcccattgcgtacgtccggccaccggaccggtcacggtaacaccagcactggcggagaacacattctgcacgttggtgaatacgtcgttcagcgcaacacccgcgccctcggcgtcaatacgcataagcatgatatgcccgtcggccttgattccaccgttggtgaagtggctggcgtccacgaaggcgaccgcggcgtagttggaggcaatgcggcgatagtccaccttccgcggtttgagcgtcagcgtctgtgtgccgccggattgtccattgccgttttcggcgctgccgttcgcatcattaccggacggaccattggcggcatcggcttgtgcttcggccgctccagccgtgaacgtaacgctcttgtccagcggaatatccttgcctgtagcggcggaatacttgggcatcagtacggaatcgccatcaatggtcacaccggacaaatcggagcgcaccaccttgcgcagcgcgtcgacgccatccacgcccacgacaagcacactcaggctcttgccgtcggcatccttcatggtcatcatgcgggtcggcgcgtagatactgctctgaacgcccttgactttggctgcctcgccggcctgtttgccagtcatatcggcgccagcggcaatcatgtcgacgctgtagcgcgtggtcagcgcctcgttcatggtttgcttggcgctggcggcaccggtggcgatggtggagaccagggtcacgccgataagcagtgcggcaccggtggcggccacgcggcgcgggttcttctgaatgttcgcatgtgccactttggcggacggaccggccagtgcaaccagcgcgcccacgccgcgcatgagcaccggtagccagaacgtggcggaaagcaccagtccaaggaagatcaatgcacatccgatgatggcggcgagcagcaccagcgaatactgcttgtcggccattgaatcacgtccggcgattttctcggacatctgccatacagagaatgcgcacagtgccacgccgcccgcaatcagcagcatggaaatcacggcgcggaccacaccggcccgtcgcgtgtcggtcagttcgatgggtcgcaacgcttccagcggggtgacggcggtagcggaacgcgcggagcctagcgaggcaatcaccgtcataatgatgccgaatgccataggcaccgtgaacaccggaccggatagtaccagtcgcatggtcatgccggtggctttcatcaggcccgactggcatagtgcggccatgagtccgatgcccaggcccactcccagtgcggaggcgatcagtcccagcacaccggcttcaaacagcacggagacatacagctggcttttgttcgcgccgatggtgcgcagcagggcgagtgtgcggcggcgctgtgccacgagcacttggaaggtgttggcgatgacgagtgccgcgaccagcatggcgagcatgccgaagctcagcaggaagatggtggtgatgctggtttcgcccgagctcatgcttttgacggattcctcgacgagcgcggcacgggattgcacgctgaaatgcttagggagcagtgtgctgacctgttttacggtggatgccgcggccgtgtcgctggcatcgtcgatgtcgagatagacgaggtagacaggcaggttgccgaaatcgttgctgccggccattgcggtgatgacgttgtcggaaagcacggaagcgccaccgtagtaggcgtaggcaccgttcgggtcgtcggtgaggccgaccacgcgcacggtcatgccggagtcggcggccgtgtcggtgccgtcggatggggcggacgcgccggacgcggcatcggaatcaccgtcgtgcgagctcgtgccatcggcgttctgggccgactcatcaccagcgtcaccggtattaccggccgaatcgccggtcttgcccgcatactgcgccgcctgcgagttgacggtcacacggtcccctaccttgacgccgagctggtcggctacggacttggtcagggcgatctcgttgctgtccgccggctggtctccttgcgtgatggtgaccggcagcagcgtgcgctttgtggcggtggtgatgacgtagctgctggcatgcttgttgccacgggttacggtcacggaacccgcgtagccggcacgtgcgtccttgacgcctttggtggcgcggatgcggtcaagctggaagtcgttaaccgtgcgcgtgtagatgtagtcctggtccttatcggtcaggtccttgccgctatccgggctgatcacgtagttcgcgccgccgagctgggcggtattctgggcggcaagcgcatcgttcatcgcgttgccgaacaggaaggtagcggcgatgaacgcagtgccgatcaggatggcgatgcctgccggaatcagcatcctggcgcttttcttcataagtttcagagtgatggaaaacatgggggtatcctgtctctcgctttccggctcagcgagtgtgctgtgcggcggcgcgggcatggcgtatggtgccggttctcccggctgggggcaatggagcgtcggtgatgggcaggttgggcacatcctctacgccggcaagacgggcgagcgtgtcggcgcgtgtgctggtgacggcagtgcgcgtggcgcgttcgcgttcggccataagcagctcgttcatcgtttcggcagtaggattcgattcatcggccacgatctgtccgtcggcgaatacgatggcacggtcggcgtaggaggcggccaccgcatcgtgcgtgaccatgacgatggtttggccaagctcgttgaccgaacgcttcaggaagccgagcacttcggcgctggaaacggagtcgaggttgccggtcggctcgtcagcgaacaccagcttcggcttggtaatcagcgcgcgggcgatggccacgcgctgctgctggccaccggacagctcgttcggtcggtggttcaggcgctgcttgagtcccaaggtttctacgagcaggtcgaaccaggcacggtcgggcttatcaccggccaaagtcagcggcatgaggatgttctgctctgcggtgaacatgggcaacaggttgaagctttggaagatgaagccgatcttgtggcgacgtagcaaggtgagctgcttgtcgtccatgcgggtcaggtctgccccgccgaaaagaatatgcccggatgtggcggagtcgaggccggcgagcgtgtgcataagcgtggatttgccggagccggacgggcccatgatggcggtgaatttgccgcgttcgaaactcacgttcacgccacgcagggcgtgaaccatattgctgccggtgccgtagttcttgaccaagtcgacggcctgaatagcgatgccgcgcgatgcggacgggttctgcacgttcataatgcctctccatatttggccggaccttatgcccggatgacgattccaacttatgaagaaataacggcgcgccccatcgtgcgccagactgaattgggctaggggccacgcgccggccctcatccttgaggattatgtcgtctcaggtctcacactattcatgcctctgcgcaaacagtgtgaggcatacagacgcaagaaagcccgcactgcatgacgtcagtgcgagctttctactccttgggtcaagcgatcaggcggaaggcaccccatgcggctcgatgattcgcgatgcaccccattagcatcgcgccccttctcatcgggccgtcaaccctcctgtcgacctcacttggccaagccggaagcgcgaagggcttcgaagccgcccttcaggtcatcgagaatgtcctcgatgttctcggtgccgatggacaggcggatggtgccctggtgaatgccctggtcctcgagctcttccagggtctcctgggagtgcgtagtggaagccgggtggatgacgagggactttgcgtcggccacattggcaagcagagagaacaggtgcagattgtcgatgaagacgcgagccgcatcctttccgcccttgatatcgaaggtgaagatggagcctgctccgttcgggaagtacttctcgtacaggtcgtgatccggacggcccgggatggacgggtgggagacggactcgacttccggcacggtctgcaggtactcgacgaccttcagcgcgttctggacgtggcgctcgacgcgcagggacagggtttcggtgccctgcagcagcaggaaggccgcgaacggggacagggtggcgccggtgtcgcgcagcaggatggcgcggatacgggtcacgaaggcggtgccgccgagagcctcgtagaagttcaggccgtggtaggaggggtccggctcggtcagggtcgggaacttgcccggcacctcggcccagttgaacttgccgccttcgacgatcacaccgccgagggtggtgccgtggccgccgatgaacttggtggcggactcgaccaccacgtcggcgccgtgctccagcgggcggaacaggtacggagtggcgaaggtgttgtccacgatcaccggcaggtgatgcttgtgggcgatttcggagatggcctcgaagtccggcaggtcggcgttcgggttgccgaaggtctcgaagtagacgagcttggtgttctcctggatggcgtcctcgaactcctgcgggttctcggcggaaacgaaggtggtggtgatgccgtcacgcggcagggtgtggcgcagcaggttgaaggttccaccgtagatgttcttggcggcgacgatgtggtcaccggactgggtgatattacgcacagcgtattccacggcggctgcaccggaagcgacggccagaccagcggtaccaccttcaagggcggcgatgcggtcctcgaagacaccctgggtggtgttggtcaaacggccgtagatgttgcccgggtcagcgagaccgaagcgagcctcggcgtggtcgaagttgtggaagacgtagctggtggtggcgtagatcgggactgcacgggagtcggtggccgggtcggcctgctcctggcccacatgcagctgcagggtctcaaaacggtacttcttgttgttctcggccatgggtctttctccttggttgtgctaggtcgcgaggatttttccttgccacccgcctgccgtgttcgggcggttggcgaggtgttggttatgaagttacgacgcttgggccgcgcggcgcaagccgaacgttatcgggcttgcctataagggcttataaagccttgggatcattgacgtgggagactgtcagaagtcacgaaaaagtcgttgaaattatcgcgacacgccgggccgcacgcatgcgctttcacggtcgactgcggtcacggtgatatcgctaccatgcctttcgcgcatggctcaagtgtccgtgatgattgcttgttccacccgtcaccaagacggtttgcccgctcggcgatgacgtctgttcctttttccgccgcccggttacatggtttacatgacgaacgactacagtcaaacatcgccaatgaattattccgccaacatggtgaaggggttcgaacagacatgaccgatgtaacactgtatgaccgtgatccgaactatattccgcgcgtggccgccgtgcacgacatgtgcggctacggcaagtgctcgctgaccgccgcgattccgattctctcggccgcaggctgcgatgtgtgcccggtgccgaccgccctgttctcggcgcacacgcgctatgcagtgttcacgttccacgacaccacggatattctctccggttacttggatgcctggcagaaggaagacgtggaactggatggcgtgtattcaggcttcctcggctcccccgatcaggtggcgatcattcagcgtctctaccgcgaatatccgaatgcgctgcgtctggttgacccggtgatgggcgacgccggcgaaatgtaccccacgtatacaccggagctgtgcgaggcaatgggcgctctggccgatggtgccgacgtgttgatgccgaacctcaccgaagcgagtattctcaccaagcgtgactatcctggccagaatattgatgaggccacggttaacgagctgcttggtgctctgctgaagttgggtgccaagaacgtggtgttgaagggcatcgaccatggcgatggcaaaatcgtcaactatgtggccagcgcttccaccggtgttgccggcaagatcgagctggctcatgaaaagctgccatacatgattcacggcacgggtgacgccttcgcatctgccctgtgcggcgcggtgatggccggccgcggcctggccgagtcggccgaaatcgccggcgagttcgtgcgacacgccatggtcagcacccgtaaccagccacatttcgaggatcgtggcgtcagcttcgaactgaacctcggcgaactcaccgatttggtgaagtgaccgcaccttggctcccctctccgctcactgggtctgacgtattcagcgaacaactcggcgggttgtctgtcgtcacaggtaagtcggctggggagccttggtaaaccttctgaactaatggtggataaccgggttttcatccacacgttatccacaacacgccaaaccgcgtcatagtatccacatttgccggttgcgcttgtgctcttacataagtaacccgcacagtggaatcatgaacgctttaccacctacccagccgacgacgaagtccggcatcgacgccggtcttgcctttcaccagcccatgctggcttcacctgatccgcaggcaacgctgccttcggaacggattgcggccacgatgggcgaccgcaatctgacgcccaaacagttcggtgcgctcggcgagcagtatgccgccgtgtggctggaggaacacggttggacgaccttgagccgcaattggcatacccgttacggcgaattggacatcgtgatgctcaatcccgagtacacggtggtgttcgtcgaagtgaaatcacgccggtccatgcattacggatatccgcaagaggccatcacgccggcgaaacagcacaatctcaggaaagccgcctgcgattggctgcttgaccggcgtaatcgtgtgccgcatacggcagtccgtttcgatgtcgtcaccatcgtgcttcgggtgggcagaccgctcgtgcatcacatcgaaaacgccttctgaattcgtcccccaaaaaacagccacgttgcgaaacacattgcgaaaggagtagacatggctatcggcagcactctctcagtcggactgatcggccttaaggccttcatcgtccaagtgcaggctttcatcagccctggcttgccatacttcagcatcatcggattgccggatgcatcgttgtccgaagcccgcgagcgcgtgaaatcggcgtgtcaagccactggattcggttggccgcacacccgcgtgaccgtgaacatgagccctgcggccatgcccaaacgtggttcgtcgcatgatctggccatcgcggccagcgtcctatgcgcggcgggtgccatagggcatgattgcttggaagataccattgtgctcggcgaagtgaatcttgacggctcggtgctgccgattcatgggctgctcccgatcatgctgcatgccgaggaacgtggcgtgcgcaaaatgattgttccccatcgcaatcttgacgaggcttcgatggtggatggactggatgtagtgggtgtgaggcatgtgggtgagctcatcgaactgatgggcggcgatgccacctatacgattcccgatacaccggttgccgacgagaccaccacggatcaatcgcccacaagccatcccaacgattgtggcgatatgaacgaggttctgggtcaggaacatgccaaatgggcgctgcaagtggcggcggcaggcggacataatctcatcatgaccggaccgccaggcagcggcaaaaccatgctggcctcacgtatgcccggcatcatgtgcccgttgaacgaggcggaacaactggaggtggcgtcgatacggtcgctgtgcggcatactgcctcagtacggcatcaccgacatgccgccgttcgaggcaccgcaccacaccgccagcacggcggccttggtgggtggtggcagcggcatcgccgttcccggcgcgatcacgcgcgcgcatcgaggcattctgtttctggacgaggcaccggaattcagcgcacgcgccctgcagacgttgcgcgaaccattggaatccgggtatgtggcgctttcccgttcaaaaggcagcacctattacccggcctcattccaactcatcatggcggccaacccctgcccgtgcggatactattacggtaccggcgaacgttgcgcttgccgggaaaaagaccgtattcgttatttctcgcgattgtccggaccgatattggatcgtgtggatattcagatggcggtgccaccagtctcgcgcattgccgcgcagagcgagacgatcggcgagtccagtgccgggatacaagctcgtgtgattcgcgcccgtcaagtggccaaggaccggttcagacagtatggatgggtgtgcaacgcgcaagcttcgggcaaatggctgcacgccaatacgtcgctgaaagcgatggaattggtcaatcgggccctgtccaatcatcaactcacattgcgcggggccgatcgcgccatgcgtctgtcttggacgctcgccgatctggccggccgcgtatcccccaccgagcaggacgtccatcagggcatcgaaatgagaacgaggatgacatgagtaacgctactgatatccgacaatctggcggcaccgcaggcagtgtggatcacaccgatacgggcctcgctgtttcgcgcaccattcccatgcctcccacggatacgttataccgcgccgcgctcacgttctgtcttgatggggcggatgtgatgatgtacgccacgctcaaaggcgcggaaagcgccgaatccctctggcacgcgttggcgcaatcccatccaagccagccatctggaatctgcggcccggcgctgtcacgtattgaccgcatgttcgtggatggcctcacccgatggggccgcaaggcgtcggcgaacgcgatgcgctccttccgcaatgcactggccggctggcataaccgcatgatggacctgccctcgcaagacatcatccaactggccgactggttcactatggatggcacgcaatggattatcggccccggccatccatgttggccctcgcagttggccgacctgtccattcgctccgattgggcgccaccgctgtgtttgtggatcaaaggcgatccacgcgcattgaccagttgcgccaaaccggtcggcatcgtcggttcacgggacgtgaccgaatacggccggtatgtggcacacaccgtagccgaacaggcagtcgttgccgggcatctggtcgtgtccggaggcgcaatgggcacggatgcggcggcacattggggagcgttgaatgcgctgcacggcagaatgcccgccaatgtgggcagaaccgttgccgtattcgccggcgggctcaaccatatcggaccgatgcgtaaccgcacgctgttcgaacgtatcgaggcgcagggtggtgcactgatcagtgaactgtgcccagggacgattcccgaagcccgtcgttttctactccgcaaccgcattatcgcggccatgtcttccacattgattgtgacgcaagcccggttgcgttccggagcgctcaacaccgcgggatgggcatgcgaattgctgcgcgaagtgtatgcggttcccggtgacatcaatcagccttgcaacgccgggtgcaataagatgatcggcgaccaccgggcgatgattctgtgtgccgccacatccactgaggatatatgccatgaacggcataagcccgttatggcggcatgcccaggcataccgaaatccacaggtcaggactcgtccgaaaacgaggaggccatggaagtgccggcaacgactccgttatcgccagcatcctcggaatcatcggcgtcacaggagtcgtcacaagattcaggtcattcgaaacgtcttaggaccaagcatactcagcctacactcgttcaatccaaggatgggccggcgagcgcaactgccgaggccggtgccaacaagagcaagggtgaagagccgccctcgtcgcatcagatgccggatcttcgtgtcaagccgaagctcgatcccgagaaggaagcccaacaacgtatcattatcgccaagctgccggaaatggaacgcacattagtggcattgattcgtgaatgccgtaaacgacatctcatcgtcaccccggacgcactattgcgtgtggcgcgagagacggtacccgacgagattcccaatatcggcaccatacttgagctactcggcgcattggagctgaagggagtgatcgagcgggatgccggcatactcaagctgagcagccgtgtcggctaatcggcttccatgacacggctcgaagactgttcggcgggtgtgcgagaatcgaacccatgagtccgaaacgtttggaagatatgtatgatgcggtgatcgtcggcgccggagcggccggcctgtcggcggcgttgggactgctgcgctcccccaaaatcaccgagctcaaggaacaaggcgtggacccgaagatcctcgtggtctccaaactgcagccgctgcgttcgcacaccggttcggccgagggcggcatcgccgcgagcctgggcaatgtggagtccgatgactggcactggcattactacgacaccatcaagggcggcgactggctcgtcgaccaggacgcggccaaactgctcgccgaatacgcgccgcagaccgtgatcaatctggagcgtcagggcgtggccttctcccgtaccgatgacgggcatatcgcccagcgccggttcggcggccacacgcgcgagttcggcggtgccccggtcaagcgcgccgcctatgcggccgaccgcatcggccaccagattctgcacaccttgtggcagcagtgcgtggccgccggcgtcgagttcgccgaggaatggtatgtgaccgacctggtgctcgccgacgacggcaagcaggcggccggcatcgtggcatttgacacgcattcgggcaagattcaggccatccacgcgcgcaacgtgcttcttgccaccggtggcgcgggccgactgttccataccacatcgaattcctgggacctgaccggcgacggcatggcattggccttggccgccggcctgcagctggaggacatcgaatttgtgcagttccaccccaccgggctcgcgcacaccggcatcctgctgtccgaggcggcccgcgccgagggcggcatcctgaggaacgccgacggtgagccgtttatggaacgctacgccccggagcatagggatctggccgcgcgagacgtggtctcccgctccatcatggcggagatcgacgccggccgcggcgtcgccgacccgaaggacccggatggtccgaaggactgcgtctggctggacatgaccggcatcgaccccgaacgtatgaaggaagtgctaccgcaggtggtcgaaaccatcgagcagtacgcgaacctcgatccggccaaggacctggtgcctatcaagcccactgcgcattacacgatgggcggcatccccatcaccaccaatggcgaggtgtaccgttgggccgacggtgccgtgcaggtagtcgatggactgttctccgctggcgaatgctcttgtgtctccgtacatggtgcgaatcgtctgggcggcaattctctgctcgacgcctgcctgttcggtacacgtgctggtcagacgatggccgcacgcatcgtcgagaacccggttgactcccccatggccgatgattcgaccgatgacatgctgaccgatgccgccgatcaggctgccgattcccgcaaggcagagcttgacgaactgctcgccggaccgatggacgattcagacgatggcgggcccaccgccaatccttatcagctcatggcccaactcggatcagtgatggagcaggctctggccgtacgttgcaccgctcagaccatcgatacggcgttgactcagatcaacaacgacatcacaccggttgccgatatcttgcgggcccatgacaagaccgccgctttcaatcaggaggtcaccgccatctgggaagtccgtcatctaatcgaactggccgaggccatgctgcacgcttccgaatcccgtcaggaatcccgcggatccatgcaacgacttgatttccccgaacgcgacgatgagcatttccttgctcactcgatggtcgccgatgatggtccggcaagtttcaagccggtgcacatcaccgactatccacccaagaagcgcgagtactgatccgctgggggtaataccaagccgcctagggcttgtggcacaataggttggctgatattggacttgacatcccactgtttcatggaggcagaacatggctgaggcgagcaacacgacggttaccctgcaagtgcatcgtttcacgccgcgacccgagcgcgccgaacgtgcacgcggcggcagcccgttcgccaagaaaagctccccattcggcggcggctcggattcggcggcacgccgtcgtccgcgcggcaagcagtgggtgcaggaatacacgattcccgcgcgcccctcggacaccgtgctcgactgcctgctgaccatcaaacgcaccgtcgacccgacgctggccttccgctattcgtgcggtcacggcatgtgcggttcggacgccgtggccatcaacggcacccccaccctgctgtgcacggccaccatccgcgattgggccaagcagcccggcgccatccccgaagtcgatgacgaagggttccggcacaccggcaccgagtccgaagaatccgacgattccgcggaaaacggcgcaaacgcggcagccgaccaggactcggccgcaaacggctcgctgggagtcatcgaactggcatccctgcccggcttcccgccgcagcgcgacctcatcgccgacatcgacccgatgctcaaccaaataaggaagctcaccccatatcttcaggcggacggcgtgctcgccaccaccgccgaaggcaaggtggacgtgttcgaatacctgcagaaccccgaacaactcgccaaatacgagctgctgagcaactgcatcgcctgcggcgtgtgcgaaggcgcctgcccggtgtacgccggcggcgacgctttcatcggcccggcctcgctgatttgggcctcccgtttcgtcaacgattcgcgcgacaccaaggccatggagcgtatggacgccatcgacaccgccgacggcgtggccgcctgccagtccgtgcgcgcctgctcccgccactgcccgcgcggcatcgatgtgggcgaggagatgtggcagatcgtggccaaggtccgcgagcgctaagccgcgccacgaccagctacggcaatcgctgcaacacgtagtcgatacatccaccgggtgcccgcacgagagaagacataaaggaacgaattatggacagaacgcagtacaccaacctcgccaaggcatgggaattcaccgaggaacacgcgcgcgaacgtgaatccaatgcgttgaccgacgcccgtacggccgccgacaagtccggccagttgcagggttcggccgcgcaggcccgtctgctgggcatgctggtgcgcatcaccgacgccgcttcggtcatcgccgtaggcaccggctcgctggtggagaccttgcagctcgcccatgcgctggataacaagggcctgctgactgcggtcgattccaccgctcagggcatcgcgctgattcgcaaggcgttcgccgaactgcaggatgagaccgacaccacgttgcgtgcggtgaacgccccggccagcgtgtttctgccgcgcctcaacgccaatgattacgatctgatcgtggtggcgggcgacgccgagaactatgccgccacgttcgcccaggcctcccgtctgctgcgcgcgcacggcgtgatcgtgttcaccgatgtgctggcgttggaggacggtcagggcggcatgattaatccggccgaccgcagcgacaaggccatcgccatgcgtgagctgctcaccaccgtcgaagatgacgaaggtttcgagtccacgcttacccctgacggcacaggcctgctcatcgcctacaaaaagtaactctgcccttggctcccctcggagaggggagccactctatctcgcttacctcacaattgcgctgacagccacctccacggcttcgtcggcgtcatcggtcacggtgaccagtttcgggtcgattgccgaaatcatgccgtgctcggccaccggaccgttgagccagtcaaagagcccctgccagtattccttgccgtagagcaccaccggaatattcgccaccttgtgggtctggaccaaggtcagcagctcgaacatctcatccagtgtgccgaagccgcccgggcacacgatcacgccggaggaatacttgacgaacatggttttccgcacaaagaagtaccggaagctcatgccgaggttcacccactggttcaacccctgctcgtgcggcaattcgatgccgagtcccacggatttgccgccagccagtgccgctcccctattcgcggcttccatgatgccgggaccaccgccggtgatgacggcgatgttgcgcttggctatctggctacccatgcgccgggccgccttgtagatcgattcggtgcgctgggtgcgtgcggagccgaaaatagagaccgcaggtccgagctcggcgagcgccccgaaaccgtccacgaattccgattggatgcgcagcacacgccatgggtccatgtgcagccagtcggtgtcctggtcgggtttcagcagattggcggtggtattgtccgagggaatcatctggccgcgtagaatcaccgggccgcgatgataggtgtcgcccagcggcgagacgccctccaagtcgaccgggttcaccggcgttgcggcagcctcggttgccgtctcggcctccaacgttgccgcatcattcgcggctgtggcttccaatggttccatatcgtccacgactgtggacttggatgcggcctcggctggattctttgcttcagcggcctttttgccgtcgttcttcttggatttcttctgcttctttgccatccaatatcctcctgtacggtgctatcgactcttcgcattctagcgcctgaagctctgcatacgttttccgcgaaatcatccttgacttcgtgaagaacgtacggtgagtgacactcagcgtacggttttcacgaaataaggcctcatctcgtgaagaacgtacggtgagcgcgcctcagcgtacggttttcacgaaacaaggccaacaatggagtagggatcgtctaagccatcagtggcggaagtcaatctccacactggcggtgccgtcggcgagggtgccggggtgttccgtgggcgtggtggactttgtggtgcgaccggtctgaccagcgccatcgccatcaatcgattcgtcatcctccgcatcggccgctgctgcggctgcggccttctcgaatctcttggactgacggctcagcagcacaccggaaatcgcggcggcgatcagggaggccaccagcacgccgaagcgcgcctcagcggaaagttccgcattcttgtacgccagcgaggcgatgaggaaggacacagtgaagccaatgccgcaggcgacggcagcgggaatcatgtcgcgcacgcgcagccccttggccatcttgagcccgcccacatgcgtggccagccatgcggtggtgatgatgcccaaaggtttgccgaccaccaaagccacaatcagtgcgataaccaacggcgaagccagcaacagcgggctcaccgactcgaagtgcacgccggtggcgaacagggcgaagatgggcagggccagcagtgcggagaatggctgaagcttgttggcatagcgttcggcacgcggtgaaagttcgccgtgcatttcacgggagggagtcagcaggccaaccagcacgccggccagtgtgggatgcacgcctgcctcgaacatcatgatccaagcgaggacgccgacgatgccgaccgcaatccacggcacttttttcagtcgtacgaggtatgcccagatgacggcgcacacgacgatgccgatgaaccaataccaggcgttgatcgaggagaagaatacggcgatcagaataatggccagcaagtcatcgacggtggcaagcgtcatcaggaacgcgcggatcgaaccgggcagggccttggcaaacagggcgagcacggccagtgagaacgcgatatccgtggcggtgggcactgcccagccgtgcgacatctccgagaacggaatgctgctgccggtggtggtcagaatcagcgtgccgggttcaccaggcccgatctgagagaacaatgccgtgacggccaggaacaggatgggcggggcgatcatgccgcccaccgcgcacagcatcggcacggcggccgctttcggattggcgagcgagccggtggtgagttcctgcttcagttcgaggcccacggtcaggaagaagatggtaagcagaccatcctgggcccaatggccaatcggcaggtcgagattggtgtaggggatgaacagatgcgtttccgctacggtctcgaacgcatgcgcggtggcgggcaggttcgcgagcaccaggccggtgagcgcgaagccgagcatgatgagtccggaaatacggtctgaggcggcgattcgcctgatggtggaccaaagtcccttcttcgcgccggcggtcgtggccatcgcgtctccttgctgtactttcttggatgaaccgtatgtaatagtacggaatatctcaggacgttccgctccgggctgagtcgcgaagggcaaccttaccccacccctgtgtggccgactcaaacgggccaatacaattggaaaagcctcggaagcatttcgctttcgaggcttactgtgcgccagacaggattcgaacctgcgacctgctgatccgtagtcagctgctctaatccgctgggctactggcgcataccactgttgtccccgtggttcgggagtgcgccagacaggattcgaacctgcgacctgctgatccgtagtcagctgctctaatccgctgggctactggcgcatgtcgtcttttcagacaactcgatatataatacacgccgttcagatgaatgcaactcggcgtgttgcggcgagtcgcaccatcctaatcgccaccgcaacggcgtatttactggcctcacgccgcatgtgtacggactcggtcaagcaaaaccgactacgcaactttgaggcgtccctgcggcacatccacggcttcgcgcaagagtttgggcgtactggaaccctctacggacgccttgtccacaatcacctgcttcacatcatccaaactcggcaactggaacatcgtgtcctgcaacgtacgttcgataatcgaacgcaacccgcgcgcgccggtcccctgcttgatggcgatatcagcaatcgcccgaatggcctgttcggtgaactgcaggtcgacgccgtcgacggcgaacagcttacggtactgcttgatcagcgcgttggctggctgggtgagaatcgccgtcagatcgtctacggtaagttccttcagcacactggtgaccggcaaacgtccgatgaactcaggcaacagcccgaactcggccagatcatcggcattgacctgttcgagcaattcctcgtctttcatgtcggcgtcgtgccaattcgcgccgaagccggtctctcgacggcccaatcgcttgcgaacaatatccgtcagtcccacgaacgcaccgccgcagatgaataggatgccgcgtgtgtccatctgcgcagtgtcctgctccttatgcttgcgcgtgccctccaacggcacggaggcgatggtgccttccaaaatcttcagcaacgcctgctgaacgccctcaccggacacgtcacgggtgatggaggtgttctcacctgatttgcgcgcgatcttatcgatttcgtcaatgtagatgatgccgtgctgggctcggcttacgtcgccatccgcggcttggagaagacgttggagcacggtttccacatcgtcgcctacatagccggcctcggtcagggtggtggcgtcggtgatgacgaatggcacgttcattacgcgggccaacgcctgtgcaagataggttttgcccacaccggtggggccgagcaacagaatgtttgatttggcgacctcaacgtcagccaaagggtcactgttgcggcgggtagcacgcgtctgggcgggagcggattgcttggcttgtttgccggtctggccaccgtgcccgttattcccgtcaagctgctcagcggactcctgaagctccatattgacgcgtttgtaatgattgtatacggccacggacaatgcgcgcttggcgttctcctgaccgatgacgtagcggttgagataatcgaagatctgagcgggcttgggcaggctcagcgaattgacctcggcatctttgacacgctcctcggagatgatgtccacgcacagggcgatgcattcatcgcagatggaggcgttgggaccggccaccagttttctgacctgacgttcggttttgccgcagaacgtgcaacggggtacgtcctcgttgtagctcaccacacgtcccatgattctcctttgccgaccgcgccgcaccgtcgaaccgccacgctgcgcattatcattgtcatccttgaaatacaatacccccggtcgttgccgaccgagggtattgcaatgttcggaagttttactggcggtgttccagcacctcgtccacgatgccgtattccttggcttcaggagcggtcaggaaagtgtccacttcgatgtcgcggcgaatcttctcgacatcctggccggtgtgcttggcgagggtctcctccagccattcgcgcatacgcagcatttccttggcctgaatctcgatctccgtggccttgccgaatccttggtcgatggccggctggtggatgagcacacgggcgttcggcagcatcaggcgcttgcccttggtgccggaggccagcagaatggcggcggcggaggcggcctggccgagacacacggtctgcacgtcgggcttgatgtactgcatggtgtcgtagatggcggtcatggccgtcatcgaaccgccgggtgagttgatgtacatcatcacgtcacggttcggatcctgggattcaaggaccagcagctgggccatcacgtcgtcggcggaggcgtcgtccacctgcacgccgaggaagatgatgcgatcctcgaacaggcgggagtaggcgtcctgggtcttcatgccatacggggtcttctccacgaactgcggcatgatgtaacggttggtcggcgcgggctgggctgcgcgggcggcggccggcatgaaaccggctacgccatgacggccggccaagcggtcggcacgggcggcgaactttgcttcttcacttgccatgagtctcactccccctgctggttgttgccgatggtgtccggcgtggtcacgagcttgtccacgaagccatagtcgagggcttcctgggcggtgaaccagtggtcgtattcgttgtcgcggtagatctcctcgagggtgtggccggtctgctcagcggtcagctcgctcatggttttcttcatgtccatgatgagctcggcgttgatgcgcacgtcagtggcggtgccgccgatgccgccggaaggctggtgcatgagcacacgggcgtgcgaggtcaggtaacgcttgcccttggtgccggagctcagcaggaactggcccatggaagcgcacatgcccaggcccacggtcgccacgtcaggctcgatgagctgcatggtgtcgtagatggccatgcctgcggtgatggagccgcccggcgagttgatgtacagccagatgtccttcttcgggtcctcggcggccagcatcagcagctgagcgcagatgcggttggccatatcgtccttgacctcttcacccatccagatgatgcggtctttgagcagacggttgaaaatcgggtcgacggggccggccgggacgtcatcgcccgccatgaccggcaaggtcgcaaaggtattgctcaccttgattctccttctaattactcgaacattgttcagactaccgccttgaagcgactgaaggcggcttttcgcgtgctttttggcgggtagcgtagggatttcgggttattccaaggtgtcgaggacgtcgtcaatgaggaggcgggtctgggaggcggcatcgtcgcccagacgcgggaagcgacgggcggcattggcggggctggcaccggcggctcgcgccacgttggacttgctggcaccatgggccacggctttttccgcgagccgatcgaccagtgaatcggcgacttggcgcatctgttcggccacccataattgggccatatccgcaggcaagtcgtagtcttcggccacatcgctggcggcctcctgaatggcggcccacaacaccatgaatggctttcgatagtagtcaatctgctcagtgagcggctcagcggcaagcgattcaagtgccgcacggacttcggtgttttctgacatagctttctttacctcggctcccctcagtctcactgtgttcgacagctcccctcagagaggggagccagaatatatgcatctacttacttacgactcagcaaccactttgatatcaacgacgacgtggccacggccatgccgactggcccgaagaaggtaatcggcgcttcggtcagctccatcaccaagcacatggccataagcggtgcctgctgtgaggccgaaagcaacgaagccgcaccgatcaaggcacacgcggttaccgaatcagtcggaaacatcagtatccatacgaggccgagcatcgcacccagcgtggaacctaatgcgatgccgggctgcagcacaccgcccgatgcaccggagcgaatggtcatcagcgtcaccagcgccttggcgacaaaggtgagtgccaacacacccagcaacatccagatattggactgggacagcgggaaaccggcgttcatcacggatccagaagagccgctcccaccctgaagcatggcccaaaacgaggccattccagagcccgctcccccgccagaggccgaatcggatacattaccgccgcccgtcagcaagttccatggagaggcggccgctgaagatgccgactgcatggcaccagcagtgccggcggtttcaggaatgaacgtgctgaatccaagttgcgctgcggcacggccgttgcccatcacctgcggcacaacaatcgccaccaaaccggtgatgagaccagccagcggcatctgccacagaatggccttgccggtcggcttgtgcgcttccgcccattgcgaaccttttcggaacaatgcgccgcccactccacatgccgcaccgcagatcagagcgaacagcattaacgttggcgtggattccggttgcatggcggtgatgtcgtagaacaggcaatgccctttgatcgcaaccgccacgaatgcggcaatggcagacacgcccagtccaaacgcaaccttttcgatcgtcacatccaccaacaggatttcgacggcgaagaacatgccggccagcggcgcgtcatagacgcctcctagaccggcaccggcagccactgccaccaccatgcgccggtcgataccatcaacgccctcgatatggaacaggtcgcaaaaacgttgcgcgatcatggcgccgagttcgcgtggggcgacttctcggccgatcgaggcaccggagccgacgatgaaaatctgcaacaccacatgcacaatggtttgccagaaaggcattcgctttcccgccacggccttcttgactgagggcaccacagtcgttttgtgtcgtagcagataccagataatgcccgcgatgccgagtcccacggtcaccgatatcacacggcgtgcagcgggcacgccgaatggaccagacaattctgggccttcgatgtagccgagcagcacatgttcaacgccgtagagcaacagggtcagcagacctgctcccacaccgatgagcacgccgagcacaatggtcgccgcagcgagccaaccaaggcgtttgatagtaaccgttggctgcatgtcaacctccgcacgctatgcaacgagtatgccttgggaactcccctcagtctcgctacgcccgacagctccccccaaaggggagccaaagaaatagtccttttaccagaataggaagagcccggaaccgtgaaacacgattccgggctcaaacaatcacgctaacgcgatgaggctatgctcactcagcgtccttggcgtcatccttggcggacagttcgtcggccacggcggcagcagcggaagcggcctcgacggactcggactcttcgtcctcagcggcctcgcccaggaagccggagaggtccacaacctcgccatcagcggtgaacttgacggcgcgcatgccggcgagcagacccttggaacggccgacttcctgcacagcggagccaagctggccattcttgatgatggcctggatgaagttgttcgggtccatgccgtactgctgggcgatggaagcgaggaagttgaacacgtcggactgggacacctgaacgtccagcttctcggccagagcgtcgagcaccatctgatcgcgcagatccttctccacggtctcctcggcctgagccttctgctccttggtggccttctccgggtccggggtcatgcccttgagctgctcttcgaccatgttggccttgacacccttcggcaccgggatctcgaggccttcctgcagcttggcgatgaaggcatcgcgagcctcggtggcctgacgaccttcggcgtcctgagcggcagccttgcggatgtcagccttgagctcgtccagagtgtcgaactcggaagcttcggaagcgaactcatcgttcagctccggcagttcctcagccttgacggagttgaccttgaccttcacggtggccttctggccctcgtgctcgccggcttccagcgtgccttcgaaggtggtctcctcgccggcggacaggccgtcaagggcctcgtccagaccgtcgagcatggtgttggagccgagctcgtagctcacgccttcctgggagtcgacggtctcgccgtcaatctcagcagtcaggtcgatgttggcgaagtcgcccttggcggccgggcggtccacgccgaccaaggtgccgaagcgctgacgcagggtctcgaggcgcttgtcgacgtcctcatccttgacttccggcttggagatggcgatctcaagaccatcgatttccggcagttcgatgtcaggacgacgctcgacggtggcggtgaacttcagcttggtctcgtcgttggcggattgcggaacatcctgcacgtcgaactccggctgagccatcggacgaatcttcttctcatccagggccttggagtacagctccgggaccgcgtcgttcacggcctcaccggcgacggcggcgaaaccgatgcgctggtcgatgatcttgccgggaacgtggcccttacggaagccgggaacgttcacctgcttggcgatttccttacgggccgcatccagatacgggttgagctcttccggttcaacagtgacggtgagcttcaccttggtgggctcgaggttacgaacgctgatcttcacgctaatgactcctcaaaagtcgttatttcttacagttctgccgtaaggcaacctctacatgataacgccacttacggacggtgcaatgagtttcacctgccagtttcttgcgccctgctcgatcaggaacgtctcgacgtccacttccatcgggtcttccacccagcacaggttgcgtaggatctgtggcttgatgatcatctcggccggcgtgcgggtgtcttcggcgatgcggttgatcacacgccgtacccgctgcagacggtcataacgctccggatggcgctgttgccacagtcgcatggatcggggcgcgttcaccacaccgttttcgtcctgttcgggggcgggcatggtaggccattgggtgggcttcagggccatggcgcggtcgatggcctgcttccagaccttcggcttgaccgtacgctgaatcggcgcgtaccgctcgaacattttgtcctgctcggtgccggtatgaatgcgcacacgctcgttcagggatcggagtgcgcggaattgggcggcattgtgcggcttgttggtcgcggcctcgatgattgacgaatcggtcaataacaggctgggagcgatgtcgtatcgccgggcgagccggtcgcgctcctcccatagggatttggcgatggccaagcccctcggatcacgactcagctgggtgatgcgcgagatacgcagccaaggaatcggatgaggtttgcgcggggcaaggcccgcaaccaaagcgtgagaaaactcttcagcggcccactcgtccttgcctgcggctttcaggtcacgacgcatcaaggtttcgagttcgataagcacctccacgtcgagcgccgcatagttgcgccagtcgcgcggcagcggacggtaggaccaatcggcggcggaatgctctttggccagcgtgatgccgaggtagtgttcggtgacggcggccagaccgaagcggtgcaggccgagcaatcgcgccgctatttccgtgtcgaacagggctttgggtttgagcccgatttcggcgaatccgggcaagtccatcagagaatcatgcagaatccatgtagcatcgcccacggcgtcattgaattcattccagtcagctccggcccgtgtcagggcgacgggatcaagcaaggcgatgcccgcaccttcacgtttgaactgaatcagccaatcctcatgtccatagcggaatccggacgcccgttcggcgtcggcggccagcgagcccgtcgcctcggccagcgcatcgcaggctcgatgatagccatccagcgacgaagtgacatcgggcactcccccgcgaggctctttcagcagtcggggttcggtgtcacggacgtcactcaactggcgtcatcctcctcaaaacggatggtggatctgatgaatgcggcccacgagcggatttgtgcgccggcgtccatagtaccgtccggtccggtcccgtcaagcggggtccatgagacgcgaatctcacacccggcgctggtggagccggccatcgaaccaaaagctgtgttttgggtcacggtgactgtgccggataccgaatccggctcgatgccgtcgaaatagtcgcacatgtcatcccagtacatgccgggggtcagagaatcgttttcggcggtttccagcggcagccgcgcgaacgccacgcaacgccagttggaatcccggtcaatgcgcagctcatgagcataaagcatcatgatccagcctgtggcgattcgtgattcggcatcgttgccaagaccggcggaaaaggcatcgccgagggcacgctctcccgcttcgaattccacgccgataccataatcggccaaggtggaaggcacgggaatctcccgatagcgcacgtcatggatgcgcttcatggtgctgacggattcgacagctgcccatacttcatccggcacaccctgagggcgtacggggcgtccgtcgttggacgctcccataggaaatgcgtagatgtcggccatatctctagggtatgggcgaacgggccgaatcgtggtatttacgcgcggttcggccctgcaatttaatacacggtgaagccgtggtccttgaactggttggccacccgttcgcgggtggcggcgttgggtcccttctggttctccagcgggtatgggatgcgcagttcgtgccacttcgggcggccaagctggtggaatcccagcacgtcgatgtgttcgacggcatcgccgaaggactcgcagatcttcgccacgttttcgacgttctcttcggagtcggtcaggcccggcacgagcacaaatcgcacccagatcttcttgccggccttggccagtcgctggccaaaatcgatggtgggctgcaaggtgccgccggtgaccttgtgataggtctcctcgtcgccggatttgacgtcgagcagacacaggtcgatgtcctcgagcatctcgtcggtgtaattcgtgttgaggaagccggacgtgtcgaggcaggtgtgcacgcccatctccttggcggcatggaacacacgcgagacgaaggcgggctgcatcatggattcgccgccggagaaggtgataccgccatgcgtggccttgaacaggtccttgtaacgatcgaccttcttgatcatggcgtcaaggtagacgggcttgccgtcgcgcatcttccaagtgtccgggttctggcagtactggcagcgtagcgggcagccggacatgaacacggtcatgcgggtgcccggtccgtccacggaggtgttgatgtcccaagagtggacgaagccgatatcgccggatttcagggcggaaaggcggtcacgtcggtcgagtccgattggggattcaaagccggaaaggccgcccatcaaagtctgcgaggcataggtcttcgattccttgagcatatgcctggtcgtggtgcggaacgtgggtgttgcgggcatagttgtcctcctgttccaaatgatgcgaaggtctgtgggaaataaggaaggggtggagccgtgccccaccccttcagttagtcattgccgcggttcgcggggttggtcatcagtcgacgacggcgccctggtggaaggtacgggagatgacgtcgagctgctgctccttggtgagcttgacgaagttcaccgcgtagccggagacacgcacggtcaggtgcgggtacttttcggggtgctcgacggcatcctccatggtctcgcggcgcagaacgttgatgttcgcgtggtagaggccgtggccgttgcccgcgtccaggatgccgaccaggttgccgatgcgctcggcttcatcgcggcccaggccatcgggggtgatggtgttggtcagcgagatgccgtcgagggcgtcgttgtagtcgatcttgccgacggagaacatggacggcagcatgccgtgcgagtccatgccgttctccgggttggcgcccggggcgtacggggtgcccttcttgtggcgggacgggaaggaaccggtgttcttgccgtactccacgttggaggtgatggtcagaatggactgggtcgggacggcgccacggtagacgggcaggcgcttgacctggcccatcacggtggagacgacccacttggcgatgtcgtcggcgcggtcgtcgtcgttgccgtagaccgggaactcgccctcggtgcggtagccgacgaccagatcgtcgtcggcgccttcgacgtactcgtactcgtggccttcgaggttcttggcttccttgttggtgatcgggtacaccttggcgtacttgatggcggacagggagtcggcggcgatggacagaccggacatgccgcaaccgagggtgcggtacacctccttgtcgtgtagggccatctcgatggactcgtaggcgtacttatcgtgcatgtagtggatgatgttcagcgcttcgacgtaggtttcggacagccactcgagcgccttctcgtagttgttcttgaccttctcgtagtccaaggtgccgtcggcctccggggcgatcgggtcgatgacgcccttgtcgatgacctgcatgccggtcatctcatcgcggccgccgttgatggcgtacagcagggccttggcggagttcacgcgagcggcgaagaactgcatctgcttgcccacgcgcatcggggagacgcagcatgcgatggcggcgtcgtcgccccagtgggaacggatttccttgtcggactcgtactggatggccgaggtgtcgatggagatcttggcgcagaagcgcttgtagccttccggcagcttcggatcccagaagatggtgatgttcggctcagggccaggtccgaggtgctcaagggtcagggtgttgagcagacggaaggaggtcttggtgaccatcggacggccatcgtcgccgaagccggcgtcggaccaggtcgcccagtacgggtcgccggagaagatgttgtcgtagtccttggtgcgcaggaagcggacgatacgcagcttcatgacgatgttgtcgatgagctcctgggcgtcggtctcggtgatcttgccggcctcgaggtcgcgctcgatgaagcagtcgaggaaggcggagttacggccgaaggacatggcggcgccgtcctgggacttgatggaggccaggtagcccatgtaggtccactgcacggcttcctgggcggtctgagcagggcgggacaggtccaggccgtactcgttgccgaggttgatgagctgcttcagagccttgatctgctcgtcgtgctcctcgcggaagcggatccagtgctcgatctccggctcggtgaagtcgttgcggtacgggatggagtccttgtcgcgcttcttgaaggcgatcagcttgttgacaccgtacagggcaacacgacggtagtcgccgatgatgcggccacggccgtaggcatccggcagaccggtgaggatcttgttgtggcgggcgaccttgatgttcttggtgtagacgccgaacacgccgtcattgtgggtcttgcggtacttggtgaagatcttcttgatctccggatccggctccttgccggcttccttgatggcctgctcgaccatacgccagccgccgttcggcatcatggcgcgcttgcagggcacgtcggtctgcaagccgacgatcacgttgtcgacttccggggagtcgatgtagccggccgggaaggcatcgatgccagccggggtgtgggtgtccacgtcgtagacgcgctgcttgcgctccacggccaggtagttgtcgtcgaggtacttccacaggtgcttggtcttctcggtggcaggagccaggaatgtctcgtcgccctcgtacggggtgtagttcttctggatgaagtcgcggacgtcaatatccttctgccagttgccctcggtgaagccggcccatgccttggcgtcgagctcctcttgggagacagctgcattttctactgcggtcatgtcactccttaaatggggttgtaggtttcgcatcttcacggaacccttggttcaacagtgtagttggcacttgcttgggaaaagccgaaattgggagtgagctatctcacattgttttttgtgaacgctaccattccaatggtttctaggtattgatggggctattgcacgtctccagatatgggaaaccgctcatactgtgatgttcgtatgagcggcttggtgagcggttcggtcttgagattgacagcagaaccgtatccgtctgttttggccgtcagtcttcatcgttcgcttgcgcggatttcacaccgtagttcttccagcgccagttctcctcctcccatctggcgttgcggtccaccacgatgtcccaggcgtgttcggcatcttccttggtcttgtacggacccatgcgctgttcaatcggtgagaccatgcccagctcggcctgcttcttgacggtgttgaaataccactgcttcttgttatcgtctgtcattggtacctcctcaacggtattacttgctcccgctggcgggagcaatatatgtttattccctgaacgcgttggtgacgggcagtcggcggtcgcggccgaacgcgagggccgtgaccttcggtcccaacgggtattggcggcgcttccattcggcgcggtccaccaatcgcatcacagtgtccacggtgtcctggtcgaagccgtcggccaacaggtcggcgcggccgtgcgcgtgctcgatgtatgcagcgagcaccttgtcgagcagcgcgtattcgggcagggagtcggagtccttctgcccggggcgcaactcggccgagggagccttctcgatggatgagaccggaatcatcacgccgtccttcaacgggatgccggcgttgccgtcctcgttgcccacgatcttgagcccgccgataccgacgcctgcggccgcggccttgttacgccaacggctgatctcccagacacgggtcttgagcaggtccttgatgggtgcgtagccgccgaccgcatcgccgtagatggttgagtagccgcaggcgagctctgacttgttgccggtggccacggcgagcaggccgcgagaattggaactggccatcacgatcacaccgcggatgcgggcctgcaggttctcggcggagacgccatcaaggtcaagttgctgttggtaggcgttgaacaatggctcaataggctggacctcgtaatgggcaccgatgttggaggccaggtcagcggcgtcgtctttggaaccatcggaggagtacatggagggcatggagatgccccagacgttctcgccgccgcatgcgtcggccgccatggcggctaccagtgcggagtcgatgcctcctgagaggcccagcgtcacgccggtgaagtggttcttggccatgtagtccttgaggccgagcacgcaggcagtgtatacctcttcgtccgggtcgagttccggaacgatctcggccttgacctgatgttcggcggtggaatcgaagtcccagaacgtcaggttttccatgaacatcgggccgcgttcgataagcgtgccgtcggcatcgaccacgaagctgccaccgtcgaagaccaggtcgtcctgaccgccgacctgattcaggtagatgaccggggcgttgacttcggcggcacgacgctgggcgagctcgaaacgggtgttggtcttgccttcctcatacggcgagccgttgatggtgagcagcaggtcgatgttcttggtggccaggtcggccaccgggccaccatcctgccagatgtcctcgcagatggccacgccgatggtggcaccatccacgtcgagggtcacggaacggtcgccggcggagaagatacggaattcgtcgaacacgccgtagttgggcaggaagtgcttgtcgtagccggcccagaccacgccctgatgcaataccaccagtcggttgcgcggcttggaggtcttacgatcagtgcccacggtgccaaccaccacgaacagattgccgaggccgtcgtcgttgagctgggcggcgagttcgttggccttgtcccatgcggcttggcggaaggtgcggcgcagggccagatcttcgatggggtatccggtgagggtcatttccgggaaaacaaccacttgggcattccctgcggcggctttacgggagtagtcgagcactttggcggcgttggcatcgagcgcgccgacgcaggtgtcgatctgggcgagtgcgaagcgaagctgtgtcatagcttcttagtgtagccgcgtatggcgtcggattgcctgttcttccggcttggcgtcattcattaggtcgtttttgcgttcattaggtcactgcaatgcgatatcagtcgttgcaatggcgcgattccaacaaccagtatcgccgttcaccgacctaatggacgatgaatcgacctaatgaacaaatgccactcccctcagtcagcttcgctgatagctcgtcctgcacttatggacgggcgaggcccgcgcatatctggttcggctgtcgcctcaccttcggctgcagacagcccattgggctgtctgcctaacgcctcagcctccagaggggagccaaaaaaggatttacctcagctcgttgagcacgcgcagggcggcgttgacgtagaagttgacgaaggtgggaatggactcgtcgagacccacgaaatgcgggctatgccagtcggcgcaaccttcctggccgtttgacccgacgaacgcgaacaccggcaacgtcaccttggcgaattcgcagaagtcctcccccgccatcgactgacgtatcggttcgagctgcgcgtagtcgttgacatccgccgccacggccttggcaagacctggatcggagaccagcgggtcttggaaatcatcccagaccacatcggcgctgataccgtatgcctcggcggtgtgttccaccacttccttgaatcggcggccgaccagattgccatccgacttgtggaaatagcgcacagtcccttggaatccggcttcggcgggcaccacgttccacacatggccgccgtgcacttcggtaacggacagcaccagcgggtggaagggcgtgacgttgcggctcacgatggtctgcaggctcagaataatactggcgagcgcttcgatgggcccggtgcccttgtacgggtagccggcgtgggtgccttgggcgtggagggtcacgcggaatttcacgcagccggccatcatcggctcgacgccgatggccagctggccggacgcatagttggggttgttgtgcgtgccgataatggcttcgacgtcatccacgagtccggcgtcgatcatggcgcgagcgccttggccggtctcctcactcggctggaacagaatcttgattgagccggcgaacttgtcacggtgctcggcgagccagaaggcggcaccgagcagaccggtcatgtgcaggtcgtggccgcagccgtgcatcacgccttcattgacggagctgaactccagtccggagtcttccacgatgggcaggccgtcgatgtcggcgcgcagcccgatacgcggcccgggaccggcctcgccctgaatgagccccacaacaccagtctccagcgggttgtgcaggatctcgatgccgtgcgccttgagctggtcggtcagatagatgctggtgtcgaattcacggaaactacgctccggatgggcgtgcaggtagtggcggatggtgatgagttcgtggtcgatgtcgatatgttcactcatggttcccgattctagtagcgcgaagaatatattgcggccctcgcttcatattggcgagggccgcgatctatggggtcagtatgccttgttattgctggcgtttgagcagtcgtttggcgatggcgttggcgatgccctgcaccacctggaccagtacgatcatgatgatcacggccgtccaggtgacggtctggtcgaacttctggtagccgtaggcgatggcgaagttaccgagaccgccaccgccgatgtagccggccatggcagacatgtcaaacacgccgatgaacaggaaggcgtaggccaggatcagcggtgccagggcttcggggatgagtacggtgcggatgatggtgagcttgccggcacccatcgaacgcgcggcctcgattactcccgggtcgaccggcacgagattctgttcgaccagacgagaagtggcgaaggtgcacatgaccaccatcgggaagatggcggccacggtgccgatggacgtgccgaccacgacgatggtgagcggctgcatggctgccaagaaaatgatgaacggaatcgggcgcacgatgttgacgatgatgtcaaggatgcggtagacgaccgcgttctcgaacaggttgccggggcgggtgccatagagcaccacgccgaggatcaggccgaggaatccgccgatgacaagggtgacgagcaccatggtcagggtctggccgatggattcgaacaatagtgggcgcagcacgttccagtcgctacgcgagttggcgaggatgatcatgcgttgtctccttcatgtgcggcggcggatacagcgggcgcggtggcagtatcggccgccagtgggtcatgggcgcggtcttcggcgtaggaggcatgtccggcaactgcgtcggcgtaagccacgggctttgcggcggtgccgaagtcaatgacgtcgctattggcggcgagctcgcgcaggaattcgtccacgtgccagccgggcccgttgaattcgtaggtgatggcaccgatggcggtccccttgaccgtgtcgatgccgccgtagagcaggctggattcgacgccgtatttggcgatgagttcggagatgttctgtccggatgccttgagttcgtggccatggctgccggaaacgtccttttggcggatgagcacggtgacgatgcggcccgaccattcgtggtgcaatcgctcgacccggtcttcctcgggcaggccggacagggcggtggcgatgaatcgcttggtcaccggctgctggggcgcggcgaacacgtcgtatacgtcgccggattcgaccacgcgtccggtgctcattacggccacgcggccggcaatctgctggaccacgttcatctgatgggtgataagcacaatggtgatgccgaattcctcgttcacacgcttgagcaaggccagcacttcggtggtggtttccgggtcgagcgcgctggtggcttcgtcggcgagcagaatctccggattagtggccagtgcgcgggcgatgccgacgcgctgcttctggccgccggacagctgcgaggggtatttgtttgcgtgctcactaaggcccacgaattcgagaagttcgttgacgcgacgatcctgatagtccttgcgccagtgatcgagttgcagcgggtaggcgatgttctgcgccacggttttggtggagaacaggttgaactgctggaaaatcatgccgattttctggcggatgggccgcagcttggtctcactcaaagaggtgatatcggtgccgagcacggtcacggtgccggaggtgggtcgttcgagcgcgttgataagccggaccagtgtggatttgcctgcaccggaatagccgatgatgccgaagatgtcgccgcgatcgatggtcaggctgacgtcatccacggctcgtgcgatgttcgcgccgcgtccgcgtgttttgaattccttcacgacatggtcgaaggtgatgatggggtcgctcatagtgctccctgatgctggttgttgatgtccggtcacggaagcggagcgaatcccgattgttggctcgggtactcgctccgcttggtggtaatggctatggacaggttagtcgtgcactcgtatcagccacggctcactgctgggctttggcgtccttctcaatgtcggacaggaagccttgcagctcgctggcgctgaacttgtcggcgaacaccgcggtaccgccggagttctcctgcagggcgtcgagcacatccttctgctggtagatggaaacgagcttcttgtaggtctcgttgttcacgtccgccttgcgggccacccacacgttgatgtaggggcgagcttcttcggattcggcgtcatcctggtagatggcgtccttcgggttgagaccggcgtcggccacgtagtcgttgttgatcacaccagcggcgatggtcgggtccttcagggtggtggccacctgttcggccttgagcggggtgaccttgaccttgctcttggcttcgtcgatgtcggccggagtggagaaggcggtccagtcgcccttgagcgtcacgagaccggcggccttgagcacgccgatagcgcgggcctggttggtttcgtcgttcggaatggtgacggtgtcgccctgcttcaggtccttgatgtccttgaccttggtggagtacacgccgagcgggtagatggcggtgccgccgatgggctgcaggtccttcttgttgctcacgttgtagttggccaagtagagcaggtgctggaattcgttgaggtccagctcgccggagtcaagggccgggttttcggaggtgtagtcctggaagtcgacgatgtcgacgtagatgccggccttctcggcgtcctgcttgaacttgacccattcggggttggtagcgccgaccacgccgatcttgaccgggttgcccttgctgcccttggcggacgactcgttggcaccggcaaacgcgcggtagccgaagaacgcggccacggcgataatcgccacgaccacgatggtgatgatgacgttgcggacggtgtggttcacacgcaccggctcgttattgttaggagcggccggagttgccgactgggttgctgctgtcattggatttcctctctccaaaattgatgtcgggtaacaccataacgcgcttgaaccgcgaaagtgacggaaaatggccgattgccgtataggtgtcttttatggcgcgcatgcaatggccggaattcgtgcgtttgataacccgctataggcgtgccgaacacgccggaaagcacgtcgagaggggctttgacaatggaagctatgactaccgatactgccaatgccgatatccgagccgtattcttcgatatcgatggcacgctcaccagtttcacgacccatacggtgccggattccacaatcgaggcgattcaccggctgcaggccgcaggcgtcaaggtgctgatttgcacgggccgcgcgccttcacagatgcacgtggtgctggataccatgccggtgacgttcgatggcgtggtggcgttcaatgggcagtattgctttgatgacaccggcttctttgcctcgcaggccttggatactgctgatattgaggtgattctcgactggctggaccgtcaccccgatgtggtgtgcaatttcggcgagaaggattacgtgtacttcaaccagtccaatgatctgcttcgcgccacgtggagcaaactgggcaaaaccgcaccgacccggtattttgaggacccgcgcacccgcgcgctggatcatgagactttccagatcagtccctttgtcggacccgagttggaggccgaactggtgggactgtgcagcaatgtgcgcggggtgcgttggcatccggatttcacggatctgattccggccgatggcggcaagccgcgcggcatccagcggttcatggcgcattacggcatcacgcgcgggcagaccatggccttcggcgatggcggcaatgacacggatatgctcgcctacgccggcatcggggtcgcgatgggcaatgcgaccgccgagccaaaggccgccgccgattacatcaccgacgacgtggaccacgacggtgtgcgcaatgccctactgcatttcggggtgctacgcgattattgatgccgtagcgcctcgaccgggtcgagctttgccgcgcgcatagctggatagtagccgaaaatcacgccgacagcgatgcagatgcccactgccagtccgatggactgcacggaaactgctggcgcgatactcatgccaccggcgatgccggacaccaatccagcggcgcccaacgacagcaagtagccgatcaacgtgccgataagacctccaagcactgtgattgcaatggattcggcgaggaactgcgcggtcacgtcacgccgagtggcacccaatgcccggcgcaggccaatttcgcggatgcgttcggtaacgttggtgagcatcatgttcataatgccgatgccgcccaccagcaacgagaccccggccaccgaacccgccagcacctggaatgcgctcatgaagctggaaagctggtcgatggaggattgggcgcttacgaccgacagattctggtcgatctgttcggttgggatacgcatgatgcgagcgacaacggtcttcgtctgttccgtgagctggtcgatatcaaccccgtccttggccagtccgtagatctgcatgtatcccatgttcgaggacgcaaaccgcagcgccacagtggtggcaggcatatagatattcacgctgtcgccgcccatgccgcccatcaatccagacgactcgaccacacccacaacggttgcttcattgccgtcaagcgtgacggttctgccgatggcgtcaatgtccgcgctgccgaacagcttctgcacgccctgcccgtcgagaatcaccaccattgcaccactcgttgcttcactcgatgtgaaggcccgtccacgaccaatcgtcactccggatacatcgaagaaatgctcgtcgacaccggtgatgctcgccgacaccttgtcggtggtaccgggcgcggcgattgacgaggcggcaccatagttcgtcggcgagaagtactcgtagtcggtcagttccgcgcgcatcgcagtgatctgttcgtcgtcaagggtgccgacgtccgtgtaaatcgaaatcgtgcgcgccgcgttcatacccagttcgccgaccagagagtctcgaatgccaccgatcagtgaggtcatggtaatcaccgcggcaatgccgatgacgatgccgagaatggtcagtgcgcttttgcctttgttcgccctcagtgcggagccggtttccgccagcagatcccgtgttctcatcggtacatcccttcacgcagtacgccgtcacgcatgtgcaggcatcggtcggcgcgttcggccacttcggggctgtgggtgatgagcacgatggttttgccttgctgcttgagctgttcgaacgtgtgcatcaccgcatcgccggttttggagtccaggttgccggtcggctcgtcgccgagaatcagcggcgggtcctgtaccaacgctctggcgatggccacgcgctgcatctgaccaccggagagttcattggttttgcggtcgaacagttccggactcaacgccactgattggagtgctttgatggcacgcccttcccgttcacgcaccgggcagtcggaataggccaggggcagcatcacgttgcgcagcacgctggtgcgcggcagcagattgaaggattggaacacgaagccgatgagccacccgcgcagttcggagcgttcgtcatcactcagattctgcacgtccatgccgcacaggcggtaggtgccggatgatgggcggtcgagcaggcccagcgtgttcatcagcgtggatttgccggaaccggatggtcccatgatggcgaggaactcgccttggcgcacgttcatggtgatgcctttgagcacatgggtgtaggtgtcgcctgtctcgaagatgcggttgatgttttcaacctcgatgacgttggctgtggcggtgggcacggcaatggtctcattacgccgtttgccgcgatttgcccggctcgcgtcggaacgaaacgggaacatatcagcgtgccctttcgtccgaagccgcggtttgcgaggtggaagaagcagcatcgccagtattgtcggcagccgaagcgccatcaagcatgatgacatcgcccttgctcacattgccttccacaacggctttggtgttgttcttggctttgaccgtgactcgcacccgcttgaactcatgggtttcggcgttggtctcgagcatgaccgcgctgctctccttaccctcatccacgatggcggcgagcggcaccatcaaagcgttgtcaatgctctgcatggtgattttcacactggccgtcatgcccggcttcagtttcggatcaggggcgggaatgatgagacgcacggcgtatcccacgccgccgttgccactctgcccgcctgccgaggaatcagccaactgcgacgtggtgctggcgatggtatccaccttggcatcgagcgtcagtcccggcaccgcggagaacgtgactttggcgctctggtccttggccactttagtgatatccagctcattgatgttgacattgaccttcatctgactcaggtcggcgatctgacacaatggtttaccgtctgcgccggcggaagtggatgagccatcggaggaagctccgatggcggcaccgggcaccgcgctcatggtcagcaccgtgcccgagaccggagcagtgaccgtacgcttgttggcttgggcgaccgcctcgtcataggtggcttgtgcttgctgaacggcgacctgcgcgctctccacgccgctttgtgcagcgggcagctgtccggccgcatcatcggcagcggcttggccttcctcaccatcctgattacgtgcctgacctatggtcgcattgatttggttcacctgctgctgggcggcattaaggtttgagttcgctgctcgcagagccagatcggcctgattcacgtcgctatcgagcttgtcgttgttgatggtaaacagtacgtcgccggcgttgacggttgtgccttcctgcaccttgacttcgccgatggtgccgtcgatctgcggggcgacgacggtggagttgatgggttctatggaaccggtggagctgacttggtcgacgaaatggccacgttccaccgttgccgtggataccggagacacgcccccatctgacggggtaataatcgcgtgcaccaccataaagccgataatcagtaccgccacgacggcgacggcgatgatgcgatgcaccacgcgctttttcttgcgcgtctcacgttcgcgcattaatcggttgaattcggcgacttccgcgttctccgcctcgccttgggcaagggcgtcgacacttgattccacggtgtcggtagcgtccaacggttgtatgattgcggtctgctgctgatccttctgcatgtgctctcccccatggctggctccgagcctcgtgcccggatactggttccaagcctatggaggaatggcgtggtttccatcatgcgcaggattgaattgatggggagttgtcatccttaaggattagttggggtggggaatttatgggctgttttcagtcttggctctcgccttcgcttccgcttttctctcccccagtcatgcttcgcatgacagcctcctcgtcagagggggcttatgaataagcaaagggctcgggacgaatcccgagccctttggcgttagcgaactaacaacaccgtggaggtgttatcactcgttgtcgccagcggtagcggcggtagcggtgacggcacccttcttgtcggtgttcacgccggagtacacccagtcggtgtagtccgggtggtcgtagcccttgtcgacggcgaactggaaggcctcatcacggaacttctcgagctcgtcgatcttgtcggcgtacttgtcggcgtcgatcatgcgcagggcctcagcggtcagctcgtagcggtcgatgcggttgacacgaaccatgtcgtacggggtggtggtggagccctcctcctcgtagccgtggacgttgaagttgtcgtggttcggacggtcgtagatcaggccgcgcacgtcgtgagcgtaggagtggtacgcgaacagcaccggcttgtcggcggtgaagatgtcggcgaactcctcgtcggtcagagcctcgtcgttctccttggcggactgcagggagagcaggtcggcaacgttcacaaccttgaacttgacgcccagttccttcagcttgtcagaagcggccatgatctcctgggtcgggacgtcgccagcggcggcgagcacgacctcggcctcatcgttgttcttggcggtggaagcccaatcccaagcggcggcacccttctcgagctcggcacgagcctcgtccagggtcagccaggtggcagcaggctgcttgccggcgatgatggcgttgatcttgttggtggacttgtagcacttctcggcgatggccagcagcatgttcgcatcggtggcgaagtagatgccgatgacgtggtcgttgtggaagcacttgttcagcaggacggaggtgacac

SEQ ID NO: 2278 - DNA, 2501 bp, Unknown
  R119_18m  MAG No. k141_12268
cgcctgcggacgcagctatcgtctcgtccggcacgggaaccaagggtcccgaagagcgcgatcttcccgcatccctcaaagaagaaatggatctgtgtctgcagattcttcgcgaggtcctcggcgaattcgacgaaaagctgctggcgacattcgatgaggtgcgcgaatacgcactgaatgccagcgccgaacgcttcgccggcattctgactgataccaattccgagcaggacgacctgcagaacgcggtcaacaccatcgacaagatgaatgttgaagactcacagctgctggcccgcgcattcacgacctacttccatctcgccaatctgtgcgaggaaaactatcgcgtttccgtgctgcatcagcgcgaatccaaggttgaggacaccgcgcccgtcgatccagtcaacgaaatgacctgcgcctaccaccagctcatcaacgagctcggtccggccaaggcaaaggaactgctcgaccagctcgagttccacccggtgttcaccgcgcatccgaccgaagcccgccgtaaggccgtggaaggcaagattcgccgtatctcccagctgctcgaagcgcataagctgcttggcggctcggacaagaaggaaaactcccgtcgcctcttcaacgagatcgacgcgctgttccgcacctccccgatcgcactgaagaagccgacaccggttgaggaagcggataccatcctcgacattttcgacaacacgttgttctacaccattccgcaggtctatcgccgtttcgatgattggatcctcggagacaaggccggcctggtgccgccggtgtgccccgcgttcttccatccgggtagctggatcggttccgaccgcgacggaaacccgaacgtcaccgccaaggtgagccgtcaggtggctcgcaagttcagcgatcatgtgctgggagcgctcgagatcgagacccgccatatcggcaagaacctgaccatggaatccaccacgacgccaccgagcgccgagctcaagagcctgtggaaccgtcagaaggagatgagcgaacgccttaccgacaaggcagctctgatctccaccaaggaactgcaccgcgcagtcatgctggttatggccgatcgtcttcgcgccaccatcgaccgcgatgtcgacctgatgtaccattcctgcgaggatttcatcgccgatctgaagatcgtgcagcgttccctcgccgacgccaacgccaagcgttccgcgtacggcccgttgcaggatctgatctggcagaccgaaaccttcggcttccatatggtcgagatggagttccgtcagcattccgtggtgcattcccgcgctttggaagacatccgcgagcatggtctgcacggcgaacgcggcgaactgcagccgatgacccacgaagtgctcgacaccttccgcgcgctcggcgcaatccagaagcgcaatggcgtcaaggccgcccgccgttacatcatctcgttcaccaagagcgcccagaacatcaaggacgtgtacgagctgaaccgtctgtcgttcgcacgccccgaggatgtgccgaccatcgacgtaatcccgctgttcgaacagcttgaggatttgcagaattcggtggacgtgcttgaggaaatgatcaagattcctgaagtgcaggctcgtctgaaggccaccggcggcaagcttgaggtcatgctcggctactccgattcctcgaaggatgccggcccgacgtccgcaactctggcactgcattccgcacaggagcgcatcgccaagtgggccgaatcgcacgatatcgacttgaccctgttccatggccgcggcggcgccgttggccgtggcggcggcccggccaaccgtgccgtgctcgcacagccggtcggctccgtgaagtgccgtttcaagctcaccgaacagggcgaagtcatcttcgcacgttacggcaacccggttctggccatccgccacgtagaatccgtggcggccgcaacgctgctgcaatccgctccaagcgtggagaagcgcaacaccgacatgaccgagaagtatgccgacatggcaagcaagctcgacgaagtcgcgcataatcgcttcctggatctgctgaatactccggatttcgcaccgtggttctccaccgtcacgccgctgaccgaaatcggcctgttgccgatcggctcccgtccggccaaacgtggccttggagccaagtccctcgacgatctgcgtaccattccgtggatcttctcctgggcgcaggcacgcatcaatctggccgcatggtacggcctgggcaccgcgtgcgagcagttcggcgatttggacaccttgcgtcaagcatatgaggaatggcctctgttctccacgttcatcgacaacatcgaaatgtcgctggccaagactgacgagcgcatcgccaagatgtaccttgctctcggagaccgtgaggacctcaacaagaaggtcctcgacgagatggagctcacccgcaagtgggtgctc

SEQ ID NO: 2279 - DNA, 10625 bp, Unknown
  R119_18m  MAG No. k141_12447
atacgactcggcttctgcggatcgccgatgaatcgtgccggaggcagcagcgggtcgttgttccccccattggacgccgcagccactgccgcgagatcaaaaacggatgattgaccctgacccattgttcctcctttactgtgcgaaccattcatacaatcgcttattggatattcgtttacgcattggtaacatgcgtaacttcctccatcctagcgacggcccattccaacaccccgttcatctcacaatatgccagcacacgtagcgcttcccggcgcagtactactagacttgcaactatgcgtggaggcgcatgggcttccacggcgagagaagaggtccattatgacaaatccaagtatgcctccaatgccgcaaatccctcagccgaacggtcagcggcccgcagctccgcaatttacagcaccgcagccggtcttccagcagcctgcagcaccacgccccgcgcagcccgcagcgccgcagttcgcggcgccacaatctgctcagcctgccgcgccgcagttcccggcgcaggctccggctgccgtacagccgacattcccacagcagcccgcagcacagcaagccgcctataacccgcgcccggtcaaccaactgcgcaccaagcgcagcctgctgaagtacatcctgctcggcattattactttcggcatttacgatatctggcaaatgagcgaagtgggcgagaccctgaacctcatcgcttcgcgccgtgacggcaagcgcacgatgcactactgcctgatgttcttcctgatcggtggcctgacgctgggcatcggctggctggtgtggtaccaccgcctcagcgcccgtattggcgatgagcagcaggcccgcggcatgactcccaccgttaccgcagccaccttctgactgtgggacgtcttgggaattttcatcatcgtgggaccgctggtctacttctacaagctgctgcatgcgatgaacgatctgtccgccgactacaacgcgcgcggctgaaacaatcccgtccttctacacttgccgacatatttgccggggcagtgtttttactgcgtttgccgatggccgcaccagtcagaccattagttcggctccgcagtctcgttgattcataggagattccatttatgctttgccccaattgccataccgacaacgcggaaggtagcaagttctgcgaaacatgcggcacgccgctcaccgccaccgaagcgaatactgcagcgtcgagtgcttccatgacaccgcaggacgcgccggttgcgcccacgccagcgggagcgactcccgctccggctgccgcttcagtccccggccccggcggtgcggcagtgccgccgattcctatgccgcagggtgctgctggcatgtcggctccggcggtcgtctccgcaccggcggctacgcagcccactgcgaccgttgccacggccacgcagacggccccggcaacggcaaccacaaccgccgcgaccaagcccggcccaaacaaactcatcatcatgctggtggcggtgctggcggccctgatcatcgcgggtgtcgctttgttcctgacatatcgttccgaggtgtggggcggcaagtcgctgcctgacccggcatccatcgcctccagcgtcaccgataagaacggcaagaaggcgtcggccgtcaaggccaaggatgtcacggccgcgctgaaggccaagggactcaacgcgaaaacggagaaggtgttctccggcaaggattcgggtgagttcatcggctataagaacgccgctccgggcgctcgtgtcaaggccggctccacggtcgtggtgcaggaatccgccggccccggcgtgccgaaagacactctgggcgcacaggtcaataaggtgactgagacgttcgccgatatgggcgttccggtccactataagaaggtgtttgtctctgacgccaagaagaaccccgaaggttcggttgtggccacctatcctgccgccggcactggggtcaaggacgacgagaaagacaagggcatctacattggcgtggccgccaagggtgacgacaccgctctgcccatcgacgtgatgggtcaggatgtggataccgtcaaatcccagctcgagtctgagggccacacagttaccgttgaacagcgtttctcttccaaggattacgtgggtaaggtttccggcgccagccccgctccgggatcgtccctgtcttccggcgaagacgtgaccctgtatcagggcatcgatgccagcgacaccaaagaagcctttacaggccatgatttggccgaaacaggcggtgacgcgctgctcggtaccacacgcgcagccgacggccagtggtgcactaatgatgggaagtgcatcaccatcgacaattacaaggtgactgaaggcggcagtgataatgctgactataccagcgattacgacggtactctgattgcctgcaacgccattcagcaggcgtactgcaacagtccgaaagccgactacctagtcacacaagattatggcgccttcgagctcatgccgcatatcagcctgaccaacttttgggccaacggcaaaatgtatgacggcaatggcgtgcatatgggtgattcttggcccacatccggcgaataccacatgcaggatctgttcctcgtagtgcctaccggctccgacttgcaggggttggaagataagggctacttcgacaaagacgcgcttgccgcagccaagaagcagaaggcggtggacaccaatcgaccgttcattctgtaccgcgatccgaagctctacgacactaccaccgctccatacaacggtgccgggaacggcgccaatccgttcctgccctacaacggatacaacggcagtaagtccgacatcgtcaagatgaagccggccccaagcgacgccgacgcctactatctggtcgaagcgtccgaacccgattgggattccctgccggacgcggacgtgaaggcgcccagcaccaaggacaagggcaactccaaggattccaaggattccaacaagagcagtaagaaatccggcacaccggatgcggcctcactgaaggtgttttctgatttggccggtgcccaatacgcttacacgattgctggcgatggcagcgccttcaccaccatttcgttggatgatcggggcaacttctccggcactgtggacgaggcagatatgagcagtggcgattccgcagcgaatgcgccacgtatccagaccaagttcagcggtaagtttgcatccgccacatccaattcagatggcacggtaacgctgaagtgtgatgcgtcggctttcaaaattgacgacaagtccaaatccgacaagtcaggattcagcccgtgtggcaccttcaccggatatccatctggaacctccagcgatgcgttgccatctgaagcacaggccatgctcgtcaagcgtggaacgccggatggaccatccgattggatgctgattaacaccgaaggctctggtgtttttatccgcacccagaaataaataacagttaagcagggttcaggcggatccaacgcttaatactcagtgaggccagttcataccggcctcacgtgtttttatcgcttcttcaccaacgagcggatgacggccataaaaccgaggctcatggcaccggccagcactgcgaatacctgcgggcggcgcaattcgttacgcatgctgatggcaccggtcacgcagtggtcctcgaaccagacgcgcacctcgttgctggagtatcggcccaccagatcaccccaggtgagcatgcgggtcacgtagccggccgggttgctttcatggaattcaaacaggcggatgcctcgatagcgcgacttggggccatagcattcgaatccgcaggtgggtgcgtagcccaaatcaatgccatgcgcgtggcccacgaaggcgttcttgtgatcgtgaccacagaacagcgcgaagtagccgcctgcctcacgcaaggcgtccacttcaccgacgttctcgtctgcacagccaatcgcctcacccagccgcgatcccggccggcagatctcatggttgagcacgtagcaatgaccggcgtgggtacgtgcgccttccaccgcgttcggcgtccatgcgggaacctctttgaggcaatcgtagaattcctgcggcggaatgtgctggaaggcgatggcaggcaccggcttaccgtcgccgttgcgttcgccaagttcggactgtacggctcccagccaatcgatcgcctcggggcttggcgtgccatacccatcggaatcagccaaatcaagaccacgcggattgaccacataggccgggtattgggcgtcgttctcttcgggcttgccggcgtaatcgccggaattcaccatcatgacggacatagctacgcgcccggatccgtcggaagcctcaatgggcagggcaaaagtgcctggctcaaggctgtcgactgggttcaggcagccggggaattcgcggtagatgccgtcctgctcgtcggccaggatgccgcactggaaatcgtgattgccgtaggtggcagcgaacggcacttccgcttcgatgaccgggccaaggaagccggcaaacgtgcggcggactttgtcacgggtctcgtccatgagctcgtccaaagtcgtcggcacatcctgtggatcggatgttgtggagtagaccagcgtggacgcggtggacgcggtttgttgggcgtcggacttcatggccagcagacgattgttcacgcggtctctggcccgccgcttgattccgcgcagcttggcctcgacctcggtgaccgcacgcacgcgagcgcccggttcctcgccacggcggcgcaggaaagtgtcgatgtaggcaggatcgtaaccgcggatctggtcgccggtgaacaccaccagatccgggtcggctttgcgaatggcttcacggataaggcggatggtatcggggagcacgttggggccgtcttggatgtcggccatttgcagcacgcggaagctgccgtcttcgcggaatcgcaggttcgtcatgcctcaccagtctagggacgtaatgctgtttcgcacagcatacgcgccggtccttcacgttccccgccgctccgcacggcagctgaatcactacgagaaatcgtagaacgtgtatcccttatccgctccgctcgtcacgttgagcaatgccttgccgttcagcgtatcgacgtcgtttcctatgagatagccgtctcccgtggcccacatatccgagtcatggtaggagcctgagaaggtgccatcctcattgactttcattacggttccccatgcgccgacaccggaaccgaaactatagttacctgccgcctgtttcatggcctctttgaatgtggcgtctcgtttgccgctgtccttggacttgtcaccggtcgtctcaccggaagcggccttatcgccagtgcccttgacctcggcgtccggcagggaatcccagtcgagatcgccgttctgctccaccagatagtagacggtcgaatcgctgggagccggcttcatcggctccatcttgttctggtagttattgatactgctgttggtcggcacaaacgggtccacgtccttgccccagctggcgctcacgctggtctcactgtacaggctcttgtcgcgaaccagaatgtacgggcggctggtatccacggccttctgcttcttggccttcgccagttcggcggcgtcgaagtatccggaatcatccaacgacttggcatcggaacccgccgggaagtagaccaggaagtccttcatgtcgtaggtcatgccggtcgacccgttctccgcaccggccggtggcgtcatttcgccatcgtcgaacgacgcccgttcatagttgccgttcacgcagtactcgcctatcgaagcggacatcacctttgagccgcagttcggcaaattcatgcccgcgtacagctcgaacataccccagtctttcaacagcagatggttcttcatcggcaatttgtccgcggccatgccgtgttccgaatccgcttccagcatcgcgccgctgatatcctgggagaagttggtcaggcccagcacatcggccttgtcttcaggctcatggcctttgatttgcagatactgataatcctcggatgaggtggagccaaagggattcatcgaagattgctccaacgtgatgcaatccttgttggcgtccgtcacctcgctcttgcagtacatgccaatcattgcggatgcatggatgctggccatcttgaaattgtcatacgagttggttttgctcaacacgtccatgttgctggacttatcgatgccgtaatacaaggtcaccgattgaccggaactcaacgtggaacccggagccgggtacgaaccggaaatcttgcccacgtatttctctgacgagtaatgcggttccaaatccacactgtagccctgcgattccagatcgctgacggccttgttcttatccgcgccaagaatatccaccgggataccatcgcccttggaggccacgccgatgtaaatgccgttgcccttctcgtcatcggtgagccctacaccgggagccgggtacgtgacgctgacctggccttccggagtcttgctgtctgaagagatgacgactttcttgtagtggattggcacgcccatatccgcgaacgtgttcgtcaccttgttcacatccttgccgaccgtacccttcggtacaccagggccggccgactcctgcaccaccaccgtggaaccggccttgactcgagcaccaggattcgtgccctcgtaaccgaggaacacaccgcgatcctcgccggagaacaccggaaccgtcttcgcgttcaggcccttggccttcaacgcctcggtcacatccttggccttgaccaccgatgccttcttgccgttcttatcggtgacgctgacggcgatggacgccggatcaggcagcgacttaccaccccacacctcggcacgatacgtcaggaataaagccacaccggctacgatcaacgccagcagcaccgccaccagcgcgataatcagcgtattcgggccacgcttgcccgaaggattcggcaatgttgcggttgtggtcgttgtgccgctcggcggcgtggctgcgcccggagcgacaggagcacccggagcggcctgcggcactgctcccggtgcgatcgacccagtatgacttgctcccggtgcggtcggcgctcctgccacaccgctcgatgtcggcacgccgggctgcccataggcgttcccatcgtttgggccgggcagcggcgggtgatcaagcaccgtcatagtattgtccggcagcggcactggaatcgggccggccgccgcctgaggagcaggagcactcacgtcggttagcggcgcaccacagtgcatgcagaaccggcttcccccatcattgtcagcaccacaattcttacagatcatcattgctcttctctctggtcgaatgacgcactatagcctcattctactgggaaatgaacgcgatggaatagtccccactcagccgccaaccaaaaggcgtggtccgtatacacagttgcatgtgcaaatactgcttgtactatttgcgcaacgtgctatccaccgaggcaagcacttggctcatcagctgagcggcacgatcctgaccttggttttgcgtgaccacagagaccgcggccttgttgccattcacctccacgatggcgaagtaattccacgtgttctggatgcccatgccacgatgtgcatgcacggtcatgccgctcggaatcaccacgccctccgaagcaatatcagtgttcatcagaccagtgccaccgaccgcatcaacggcaaccagcatgcgggccgcgtcacgagcggtactgtaattctcatatccagcattgctggcctgtacatcaccgaaatcacggttgaagctggtgccgctgtacccatgggaactcagccatgaattgacagcactccatccgccaagggccccgacagcctgattgccggcactgttatccatgccggtcatcatcgtatttgccaatccttccgcattgccgttgccttgagaggcaagatacaccggcagatacaggcctgcggcaacgaacttcttactcgactgcgacgtattggcaatggccgagtcttcagacgacgcatcggcgctgggagccacatccatcttcactagcgggttgtatccaccgctcatcggtataccgggtacaaacggattggtggtttgctcgccgttcttgtatgcttcgacgcttgtggtcttgtatcccttggggtcgcgcatgatgaagaacggccggtcggtgtctggcttccccgccttgttcgccgcagccagcgccttgttggagaaatagtcggaatcctcgagtttgctgatcttcgatcccaccgggaagtaaacgtagaagtcatccatttcgtaggtggcaccggattgccgaccatcagggatatcatcagtcctcacatattgaccatggtcacacccttccgtctccccatagcctcggtagaccatgccgtcgcataccggccatccgtagccacggtacatctcgaacatgccccactgtttggccaacaagtggttgcgcatattggtttcattatcgggaatcgaaccatccttgtagtgcagaatgcacccgccaatgtctccggtgggcgtgcacagtgtgacccgatcgttccatatgccattggactcatcgcctttgcgcaccaaatacgggtaaccggacccgtatttcgttccgtcttgacccttcgaaatcagcgagatgcatccacccgagccaggtaagaaaccatccttgcaataggtgcccgtaacacgccattcgcccgcagccgagatatacggcaaactcctgtcactcttgctagtgctggcataatccgcgtgcgggtcgaaatcataatcactacctgaaccggtggtcaccacatcttcagtgttgtcggctcccacaccgtagtacagacgtatcggttgcaatattttataatcattttcctcattgctcgcctcaaacggcgcaccaaaaatgtaattggaagctacgattttgccaaaatccttcttggcggaaaatcgcggctcgagaataacctcgatcttgttgttcgatgcgttttctactgcggttttcgcctcatccttatccataccgataacgtcggccggcatgccctcgactgagggatccgggataccaagataaatcgcaccattatcgtccactggctgcccccagccgggtaggtatacacgactttcttcgtatcggccttggatgttgcggctactcgcttggcataaatcggcacacccatatctttaacggccgcagcggccttggcgacgcttatggcccggtaccggcgtctgcggtaccgcgatagtggcgggcgcagacgacgctgggccgaggctagagctgagaccggggccgggaatgggaccggcgggtggcatcggcacaggcggaacatcagtgaccgtattgtgtcccacggcaagtttcggtgccagcggagcaccgcattccgtgcagaaacgggacctatcgtcattggcagcaccgcacctatcacagttcatcgcgtcatctctctgatgaaatgatgcaatatgcctttcattgtacagagaaaacgcacactggcggagtcaacggaacagactcaccccgcgacgggccgtgcaatacgcgttgcccagccaggtatggcgggaattgggccagacagctcccagtcgcggtgcgttctggctcatccagatgctcggcacgcggccgtctgcggagcgtgagccgagcagattgaagccgttcttttccagcagccactccgggtgctgggtggcgatggccaagccttcctcgagggtgagcggcaggcgttcatcggagtcgataagcttgcgggccacgtccggctcgcgattgatatagcacgtgccggtgtgcggattgacgaccagatagaacgggccttccggcggcatgaagccgtcttgaggcaggaagctggcgatgtcacgcggcggcatggtggtgaagccggccatgcgattgatggaggttcgtgcgatcagtgactcaggcgaaaccagttcgcgcgtgggcaccagcaggatgttcgatcccaaatcggaatgctcgagcgccccgatcaggggtcgggccagcgagcggaatgcggcggcggaaatatccgccacatccggatagccgagagccacgatacggtcgagctgtttttgggcctctactgatgcgatagacatggctaccagtgtagaacaccgccgtctcttcgttagtcaccccgttgtctatttagaagtgcaacatccttgttgttcggttaatgatagtggttcgtcggcgaatgcctcggccggggtgcggtagccgagcacgcgcatgggacggtcgtcggtctcgtccacgatggcctgtatctcgtcggccatggacgggtcgacgcgcgtgcgcttgggcaggtagcggcggatcgcgccgttgcagttctcgttgccgccgcgccggcacgacgggtacggggcggtgaagta

SEQ ID NO: 2280 - DNA, 28684 bp, Unknown
  R119_18m  MAG No. k141_12582
ccggcaggccctgcttgtcaaggatggcaaaacccggctgctgcgatgatgcgggtcgtcggcccgtcgcccattcggcatcaccgtggtgtgtccggcctgacatgcctatcgagcggcatcaatcacacagcaatgtggctgggaacctcgccgaacgtcaacacctgcatacatcagcacggcaaaatctgccgaaatcgcccggcgcacgagatgccagccggccccatccgtcacctcagtgccgtaccgggccaggcatggccttgagcaacgggatgaatccggcgcacagtaccagggccacgacggcgagtatctgccagtgggcggagccgagccagccgccccacgtgccgacggcaccgccgatcgcatacgcgaacctggcacggccgctgaatttggccaggtcaccaccgctcagcagcagttgtcgcgatacgatcacgccatgcgccagcaggccatagccgaggttgttgatgagccatccgacgcacaccgcggcaaactcgggaaccagtacggcggcaagggaaatcgccgtggcgattgccccgatggcggacacggcgcgcatgccgagttttgcggagagccgcatgtagacaaacgatccgacgatgctgcccacgccgccgaatgcgtagaccacggtcagcatatcgctgccgtaccgggagccgatgcccagcaacgcatagcttgcccacagcgacggaatcagcgcaagcagcagcgatgcgatcagcagtctgacccgggtcaagcgggtgaccggagtgcgctgcggcgcgtgtgacgtgtcggccgccgtggattcgtcggcggagccgtcgccgtcatcgccgcccgcaccatcgttgccgaatcccggcatgaactcgcgggtgcggaatcgcgtcagcgcgcaggcaaatgacagtgccgacgaggtgagcagcatggccatgatggaggcgttggccaaggccgatccggcaacctggcccagcaacgtaccggccacgctggcaatcacggcgacgtagccgctgtacttgacgagcatgtcatcgtcgtcgccggccgcatccacctcgaacacttcggaggccacgtcgatgacctgcccggtcatcagcagcaggcatgacagggccagcagcagccacttccaatacgtccaaccgttgggcaccagcgcgaccgccaagcacagtacgccttccacgccctccgtggtcgcaagcgaacggaacgagccgaaccgctgcacgatccatgcggataccggagaagcgaagtcgatgaccagattgaacgtcttgcggaacgcgatcacccatgccggcagtccgacgatcagaatcgaaggaatcaccgacccctcgaaaatcgcgttggacagcatcgaaaacgtcatacccaccaacgcccatcgcaacgccctgctcaataccgacaatccgcgcataccttagttcctcgtccttgccagtgtaacggaattatgacttctcaatcgtccccccgctgtctaaatgaaagtgcaacaccctttcactggttatctggacaatctccaatctaaagggtgttgcactttcatttagacagcgccccccatatccgcatgtcactgctgccatcataatgagccagtagacgcctttaagcgttctgacaaccatggaatcgaaaatcgctatgcacatcatagaacaacactgccaaggcaagaggtctgaccagtcgctcaatgaggacgggctgatcatcaccgatggtttcgcggcagtggtggatggagtgaccagcaaaagtgtgcaccaccctgccggccttgttcttggccgcgtccagcaccggggtgatgtcagcggcccattcgcgcaccgaacggccggcgagcatgtcgttgccgcccacgcacacgatcagcacatccggccggtcattgatatcgccgatcatccggtagcgcacacgtcgagcggtcgcgccgagcttgccgaccgtacgccaggccaccggccgaccggtacgcttgcgacgcgcgcggcaagcagcggcataatgcctttcgactggtcgtccacgccacatccggccaccaatgaatcgccgaccatgacggcaagaatcggcttcacgccgttcgcgcctttccaatcggggccgatcggcgccttgatatccaccacgcgacccttggcatcgaacaaaccgaaccgtttgcccttcggctcggacgccaacttcacccggcccttggcccacataccctcaatcggagcaacggcagcatcaaatcacacgcaagattcccacgccacccaacatagtccgccctcctcgacctcgttagcggccagtagcaacccctattcgaaaactcgataaccatcgtcaattcgcataatttgaacgttttaggtgttttggtcgctttggacgttttatactgtgatagataaaaaggaggtcaccatggcagaatccgacaaactcaccattccacgaacaatccttccatccatcaacattgacgacatgacgacattggaggcattcaccgcacgatttcttgatgagcggatcttcatcaaagatgccagcggcgtggagactcccctaccttcgcagctttgcgacgccgtcaggcagacggccatccttctcgccgaaggcaaaagtgtaacgatcagtgccaccgaacaagatctgactaccgaacaggcggcggcaatgctcggcatttcgcggcaaacactgataagactgcttgataaaggacttattcctttttcacgtccgtccaatcaccgtcgcatccggctggaagacctgcttgaatacaagcgagcctcgaaacacaccaaggattgcgccctgagccaaatgatcggcgtcggggaagacgccgaattgtacgacctgcccgagccgaccccgcaggaagccatgcatgcggtatcggaggtaaggagagtacgggccgatgctgtcggtgtttcttgatgccaatgtcatctattccatcaccttgaccgatgttctgctcaccttggccgagcatgacctttttcttcccctgtggtcgcctaacgtattacaagaagcacaggaagccgcctcccgaacactgcctgacgccgcacaacaagccttccgaaaaagactgataatgatggaccaggcattccccgaatcctccatacatgttgaggaatcggaatggagccaattcgatctgcctgacccggatgatcgtcacgtacttgcggctgcggcacagggacaagcagacgcactggccacgcgcaatatcaaggattttccccagaaactgcttgactctttctccattcaggtcatcacgccagatgatttgctctgtgtattacttagacgaaatccggaagccacagctagcgccatacgtgagcttatcgattctcgacatcggccaccgataaacattcccgactttgctaaaagacttgaacgctctggcgcaacacagtttgcagccgctattgcgcatatacgacagcctctcggcaatcattcgtactttgaccagtaacccatgaattctggatgaattggggtgaaccggcggggctggaggcgagcgggcggcggattatggggcacaatggtgtcaaggaggccgccatggtcgatgactatactgccaaaatgactgagctgatcgaactcatgcgtctgatcggcaacgatacgcagcagtgcgaggtcaaggaatgcaagcgcaagatctcctcgaccatcaccgatacgctgtccgcgttctccaacggctccggcggctggatcatccttggcctgtccgaaaagaacgggttcacgccggtcgagggattcgacgcgcgcgccatgcaggaggcgctgagccaggcgtgcgagaagatgacgccggtggtgcggcccgtgatcgtcacctgcccgttcgaaggcgcgaatctggtgttcgcgcgcatcgacgaaatgctgccgcgcgacaagccctgcttcaccaccgcgctcggaccgcacggcggctcgttcatccgcaccggcgacggcgaccggcgcatgacctcctatgaggtcgaccgtctcatcgaggagcatctgcagcccacatacgatctggatatcgtgcccggcgccacgaccgatgacctcgacccgcagcttgttgccggattgttggcgcgcgtgcgcgagcagcatccgcgcgtgttcgccgaccgggacggcatcgatgtgctgctggatctgcaggtgctgcgccatgatgattccgacgagtcggaggtcggcggaatactgcgtcccaccttggccggactgctggcgttgggccgttatccgcagaagttctatccgcggctcggcatttcgatagccgtgtttccggggacgagccgggacgatgtgttccggggcgacgaacgattggtcgcctcgaagtcggtggtcggttcgattccggtgatgatcgacgatgcggtcgactcgttgatgcgttggattggcgcgaagaagcccgattatccgccactcgtgttgcgcgaggcgattgcgaacgcgctcacccaccgtgattattcgcccgatgcgcgcggcacgcaggtgcatatcagcgtgttcaccgatcgcatcgagatcaccaatccgggtggcctgtacggcatggtgacacatgatgtgctggcgagcccgcatccggtgacgggcgcgccgttcgtctccacccgaaaccagttcctgttcacgctgctggagtccacgccgtatccgggcggcgggtttgtgaacccagaaggcggcgacggctaccagcgcatcgccgccgcgttgcgcgaggccggcatcgagccggcgaccacgcgcaacgacatcaacacgttcacgatgaccatcaccaagcaacgcacgatggcgaacagttcgccgggcgacgtggtcaaggcgattatgaccgtactggagcggcattcggcgatgagcgtcaaggagatcatgcgcgaactgcagttgactccgctggccgccacgtccggcatgcgcgagctgatgaaggaagggcgggttgcccgagtcaagttcgccgacgactcggtacagcggtatcggttgaaaggctgatttctcactcggccagctgcgtggtggcgggcgcggccagggtgggacgggatcggcggaagcggccggcggccaggccaatgcagatgaacatcacaccgaacagtgcgaccaatcccagcgagccggcccagccggcgacgctcacgccgctctccgcagccgtgccggagccgagcgcgttgtcgatcgcggtgcaataccaccagccgggcaggaacttggctatggtcaccatcacggcgggcatcatgtcaaccggcaatgcaactcccgacgtgaacatgatgagcaggccgaagatattggcgaatccgttggcagccgcctccgaaaacccgaattcgctgagcatgaatccacaggcgacggtcatcagcgcatatacgcaggttgcgcagaacgtcatcagcactccttcggcgctcaatgtcaacggatcaagtcctgccgcgaccatcagaccgaccgccagcaccagataaccgacgcatacgacgagcgcgaatccgctgagcgtcagcaaccgctggagtcccatcgacgacatgcgttgtggggatgcggtgagacgacggcgaacttccccggtggtgaatatgcccagaatcattgacccgcagacggtcatcgccaaaaacagcggatacagcgcggttttcatggtgttgccaaatctgctggccgccatgtccgaagcactttccgcgtccgcgcttgccgtgtcgatcacagcgaccttatggttcgcgtccatgtcactcgccgatgcggcagccgctttcgatgcctcgaacagatcgccgacgctgggtttctcaatctgaccggccggcagcatatcaagcatgtcctgattcgagaattcaccaaacccgcccatgccatcttcagacgaatcacccgcagtgtctccaatgtcgataccggccatagctgcgagcgccgcactatcgaccgtcgtatgcgagccaatcagtgccgtacgcgtgagtgaaaggaacccgatgacgttcatccgggccatcgagcctgcgccggacgtatagctggtgaccgtgtccacgcttggtggattctcgcctgtcgccgcggcatcaatgaaatcgtcggcgaaaccatcggggatgatgacgatcagatccacccagttcgaggcgacggcttgttgcagagtttcactagcatcgtcaacgttcaccagttcgctggaatccgacaggtatgtgcgcatcgatgacgcgatgccgcccctgtccgagtctcgatcgatgacggcgacacgcattttggccggctcgaatgccgcggctgcggaatcggatgtgccagacagcatcgaccagctgatagacagcatcatgatgcccacgaacacaaggtaaatcaacaggtaggccctgtgcgagaacagcacgcgcagcgtggctttacaggtgttcatagcgttgcctcctcagcattgcgatgccggccaagaggaataccgcgctcatcgccagcaaaatggcacaagtggtgatgaacggctggtagctgtcgtagtacaaaatgtcgtaaaacaggttcgtcacctgttgcgcggggttgatggtgccgaggatgggcgcgttgcgtgctatccagtcactgatctgcatggcgaagccgccgtacagtccggtgaacagcgacaatgtgcaggcgattccgctcgacaaaccgtatttcgtgtcgtaggaaagcttcggtaccgcgccgagcaaagtaccggctgaactggtcatgaatgcggcgatgattaccgcgaccaccgtcaccggttctcgccctccaaacgaaatgtcgcagatgaagcgaatataggccaatgcgataagcaatgcgaccgatgcgcacaaccagcaggcaaggaaaccggcaataagctgtctggcatggctcaatggcgccacggtgcggcgaatgcccaatgcggacaggttggcttgtgctgtggagaccgtgctgattgagtaccccatggcaatcatgcaggacatggccagcaacgcgtaatagtatctggcgatggcattgggctggaaatgcgtgagcgttgtttcgtgagtcacatcgacgctttgcccgatgctattccagaagttgcggctgagcgcagcctgtggattgtcggcgatggtttgtcgggtgacggcgtcggtgcggttgtacaggtcgatggcgctgcgcaatgccgataggctgatatccagtccgacgcttcctgtggtgtcattggccgcggtcaccgtttcccgactgatggttatcgccaaacgcccgttgccgtcagcagccaggtagccgcggactgtgccatcggcgagcagctgttcggctttccgcacggtgtcggctgcggtgatggtcagcaattgctgattgatatcggcgtatgccgtgccgtccaaagactccgacgatgaggccgtctctccagacaaggcatccacaaacgtacgcgctccgtccgcctgctgccagcggctatcttcgacgacggccattggtatcggtctgagctcgtatccctcggacagtccgccgaagaacccgttgaacatggttgccagcacgatcggaaacacaatcatccagaacagtgcctgacgattgcgcaggttcgctttcaatgcgaccaaaaatgtggtccacatgatgtctccttacctgctcccgctggcgggagctgtcggcgaagccgactgagggtggttgttgcaaggccacccccactcgcttcgcgggagccccgccagcaggggcaagatggtcagtccctcagtgccttgccggtgagttcgaggaacacgtcgttgagggtgggcgggcgactggtcaggtggccgatgttggcgccggagcgtttcaccgcgtcgagcacgtcggtcaggttgtgttcgccgcgccggcatcgcacgtcgagttccttgccgtcgtaggtggcttcgatcacgcacggcagcgcacggacctcggccatcgccgaatccgccagatcgagcgtttcgatggtgatgcgctcgcccgtgtcgatcatgttcttgagctcgtcggcggttccgagcgccaggtgccggccgtggtccatgatgaggatgcggtcgcagatctgctcgacctcctccatgtagtggctggtgtagatcaccgtgacgccggcctggttgagccgctggatgccttccagaatcgaattgcggctttgcgggtcgacggcgaccgtgggttcgtcgaagaagatcagttcaggcttgtgcgcgatgccgcaggcgatgttcaggcgtcgcagcagaccgccggacagtttgccgggccggaacttgcggaagtcctggagaccgacgaattcgatggcctcctcgaccagcggcgcacggtcagttttcttcagcacgtacagcgagcagaagtagtcgatgttttcggtgacggtcagttcattgaacacggccacgttctgcggcacgatgccgatacggcgcttcagcgcgtaggaggtcggcgtcatcggctggccgaacacgcgaatcgtgcccgaatcgtaggtgagcagcgcgaggatgcagttgatcgcggtggttttgccggacccgttcggtccaagcagcccgaaaatctcgccctggttcacgtcaaggtcaaagtagtcgagcgccaccatgtcgccgtagcgtttgaccagttggctgacgtgcacggccagggccgggttggttgtcgagtcgtgttcggaagctctgttgtcggttgccatagccactcccttccttggtgattccatcatcccaagaaggggccggacgccgccacaggcaaacgtcacgacttggccgtacaggcgtgacatttgtcattacagtccttcggcgtcggtctgcatggccttgtacaccttatcgaccggcatcaggctgatctcgtccatcgaatagttggacgccctgtggctttgcgcaatcatcggtatcatccctttacggttgtgtcgacaacatccgacgcttgtgcctcatctattcgggaagtgtagacccgttgtcttggaccgtcatgcgaataattccgcacgcccgtcaagttcgtcgtgttccgcacaccgctagactggtggtggaagagcgtcgagccggggaggtgccatgcgcgtgttggccgagaagggcttgctgctcgtgttgggcctggctttggcctggcttgtcggggtgcggctcgatggcgtgttcatcgccggcctgctgttggccgtttccgtcgccggattggtggaatggctgcgtaccgcgcaatggtcttgggtcttgtgtacggcgtatctcgtcatcgccgtggcggtgccttcatggtgcgcgttcatgccgctcatcgcctacgatactgcacagctgccggccctcgcctcgaccggagcccgggctggggcacggactgcggcaagcggccgctcccccagtgtctcgcggaccgcggcctctcgccgttcccttgccgatgcaatacgttcggccccgtggctttcggtcgccgcgcgctggatatgggtgttgccgctgatcgcgctctggttcgcccgtggcaccgaccgtctccagacgctggtgatgacgctggtcgccctgcttggattcgttctgggccgggcccgcgcctcctcggacgaggcgcggcgcgcgttgctgcacgcgcaggacagggcgcgcgaatcctcgcgggccactcgttcgcgcatcgccgacatcgatgaggaacgcgcccagtcgattcgcatggcgaccctcggcgagcgcacgcgtatcgcccgggagatccacgacaatgtgggccatctgctgacccgcgcgatcatgcaggcgcaggccggcaggacggtggccgaggcgacgaacgatacggtcgctgcgcaagggttcgccacgttgggtgcgacgttggatgatgcgatgacgatggtgcgccgttcggtgcatgatcttgaggatgacggcactgatttcgccgcgcagatcgatgatgccgtcacgtcgttcgacggcatctcccccggtttcgccgtgacgctggccaacgatatcgccaaggcgcccgcgccggtctcgcgctgtttcacgaccgtgattcgcgaggcattgtcgaacgtggtgcatcatagtgcggcgcacgaggcgagcgtgacgttgcgcgacttccccgcgttctggcagttggtcattcaggatccggggccggccgtgtccgagtccgatgggtcccggacggccgctgtccgcccgcgtgcgatgcgtgccacgcgcgtcggctcgcgactcgccgccgacagtgttgccgatatgcgtggttcggccgatgagctgatgcgcggcatgggtttggcggatatcgaatcgcgcgtgcgcgcccttggcggcaccgcggtctgcgggccgtatgaggacggctggcgtgtgttcgtatccgtgccgaagaagcgttggaccatggaatcgagggattgatgagaatcgcaatcgtggatgatgatccgatcgtctgccagtcgttggagacgattctgacggccaccggcacggccgaggtgctatggacggcaaatgacggcgacgccgccgtgcgccgttatttcgagacgccggcgagccgaccggacgtgctgctgatcgatattcagatgcccggcaccagcggtttggatgccgcgcgcgaggttctggccacggacccggccgcgcgcatactgttcctgaccacgtttgcggaccagtcgtatatcgcgcaggcgatggggcttggcgccaagggctatctcatcaaacaggatgtggcggcggtcgggcctgcgctgcaggcggtgatggccggtcaggtggtgctcggcgcggaagtgctcggcaagctcaccgaacggactccgaatcctgccgattccgacgattccggagataccgccgattccatcgagggcctgcttggcgagcgcgaacgtgagatcaccgcgctggtcgccgagggcctcgataaccgcgacatcgccgccagactgttcctgagcgaaggcacggtccgcaatcgcatcagcgcgatactggacaagctcggcctgaccaatcgcacccaactcgccatcctctggctcaacacccatcggtgaggggcctttggtcaagtaggtctctccctccgtcatcgcttcgcgatgccacctcgaacgcgattcaggacagcttgcagctgacctcttattcgctcgttgtcactcaccctcgcctaaaaacacctccggcgttttcttcacggctcggctcatcagagggaggttgtgaaaaaccaacctcagctgtttttcatgacgatactgtcgatggtgttggccacgcgctcgcagtcgtcggagcactgttcgaggtgacggtacacgtcatgccaggcgaacacctgcagcggatcggtgcaggtggtgtgcagcgtgcgcatcgactcgatgaacaggtggtcggcgtccgtttcgatcgtgttgatggcgaacaccagttcgcgcaacgtcttggaatgccggaatcgcggcagttcgttgaccagctcgcagatgctttccgtggcgcgcaccaccatatccgacatctggaccgcatcgtcgcgcatgtcggtcacattgtcgtagtacatgcggttgagtacgccttcgatactatctgtcacatcgtcgagcacgtggccgagctcgacgatgtcctcacggtcgaacggcgtgatgaacgcggtcaccagttcgtccatcatgtcgtggcgcacctcgtccgccgacttctcgatcgcatgcatgccgtccatgcgttcgcgcagctggcctggattgaagtcgtgcatgacctcggacagcagcttcgcggcctggcatgcgtagtccgcgctgcggcggaatccgtcgaagtagaacacgtctttttgtctcgccatgatgggtggattcctttctagaacacgaccatgaacagtttggccattacgaagctgatgagaccgcaaccggggaaggtgaacacccaggtgagcatcatgtcgcgcaccacgccgaagttgatggcggagaggcggcgtaccgcgcccacgcccatgatggcgctggttttggtgtgcgttgtggagacggggatgccgagcacggtcatgacgagcaggcacagcgcgcttgacagatcggccgagaagccttggtatttctcgagtttcaccatgtcctggcccacggatttgatgatgcgttcaccgccgacggacgtgcctacgcccatgatggtgctgcacagaatcatgagccagaccggaatcatcacaccggtcacgctgggttggccgttgcagaacgccatgccgaggaacagcacgccgatgaacttctggccgtcctgcgcgccatgcatgaagctcatggccgccgcgcccacgatctgcgcgtaggtgaagaacccgttggtgcggcggcggtccatgccagcgcaaatcagggtcacggccttgcataccaaccagccgacggcgaagccgaacaggaggcttgcgaccagaccgtagagcaccttgacccattcgcccatgttgatgccgccgatgccgccttggatggcgatggccgctccggacaggccggcgatcaggctgtggctttcggaggtgggtatgccgagcagcgaggcgcccacgctgtatacgacgatggagaacagcgccgcgcatagggcgatgagcgccgcgttcgtgtcgccgccgaaatcgaccatgttgctgatggtggaggccacggaagcgttgagctgcgtcatgatgaagacgccgaggaagttgaagatggccgccatgatgacggcggagcgtacgcgcatgcatcgcgtggtcacgcaggtggcgatggcgttgggtgcgtcggtccagccgttgacgaagatgactcccagcgtcagcaacgttgtgacggtcagagccgggttggaaagcacttgttggaggaaatgcgccagtgagacgtccaaggggaatcaacaccttcttcttcgggggcggaagccgtcacactgattgtaacggaagaatggctacgtagttcccatggcgcgcggattatatggtgttgttatgttgcgcgccgcgcatcctttcgtgaaaacagagcgggacagtcgtatgcttcgattcggcgcctgcatcgacaactctcgtcatctaccgaggattcggtcatgcgtgtgcgaaaatggacacggtgtcaatcaggaggtgcacagtggttgtaagcacggattcgagccgcacaatgcccgattgggtgaagtacggggtgttctggcacgtgtatccgctgggcttctgcggtgccgatatcaggcccgtcggcccgcgccagttccatggccgcggccttgacgcgatgatcccttggctggagtacgtgcgcgatctaggcgcgtccggcctgctgctgggtccggtgttcgagtcggcgacgcatggatacgacacgctcgaccatatgcacatcgatgtgcgattgggcggggatgccgcgttcgaccagctgattgcggcctgccgggacatgggattgcaggtggtgctggatggcgtgttcaatcatgtgagccgcgatcatccggccgtccgggcggcgcttgacgagaccgccggacgcttgaatccggccgacaacccgtggcatggtctggtccgcgcgcatgtcggtgataatgacgaacccgctttggatgtgttcgagggacacggggatctggtggcgctggaccattcggctgacgagaccgttgactatgtggtccatgtgatgagccattggctggatcgcggagccgccggctggcgcctcgacgccgcgtatgccgtgccgagcccgttctgggcgcgcgtgttgccgcaggtcaaagccgcacacccgtattcgtggattttcggtgaggtgatccatggcgattacccgcgcatcatcgaggaatccacgatggattcgatcacgcaatacgagctatggaagtcgatccagcatgcgctggagacggagaacttcttcgagctggattggaatctcaagcggcacaacgcgttcctggattccttcgtgccgcagacgttcatcggcaaccatgacgtgacgcgtatcgcatcgcagattggcccggccaaggcggcgttggcattggcggtgctcatgacggtcggcggcgtgccaagcatctattacggcgacgagcagggctatgtgggcgtcaagcaagagcgtttcggcggcgatgacgacgtacgtccgaagttccccgactcccctgccgaactgtccacgctgggagagccgacataccggctgcatcaggcgctgatcgcgctgcgccgtcgcaacccatggctgatggatgcgcgtaccgaggccgtgaagctggaaaacaagcacttcgtctatcgttcgacgagcgccgacgcccagcattccctgaccgtggacctcaacatcgagcaatcccccaccttcaccatccacaacgccgacggcagtacagcgtatcaatactgagctacctcatcagagggagctcaccatttaccgccgaatgcctcggatcagcaggtcgagcaggtacccgtacgaccggtcgacccgttcgcggccacgtgtgcggggttgtgcggaacgcagttcgaattggatgaacccgtgtatggacacccagatggaggatgcaatcaggtgggggtcatcgtcacggaacacggtcgccgcctggccgtatcgaatgatctgcgtgatggcgtccaggcaatgctgggccgagtccgacgcctgccccatccagaccagcgtgtaaataccgggggcgtccagcgcgtgttcgcggtagatcatgcccgccctgcgaaggcgcagcacggggtcggattcgtcaatggcgatgagctgttcgcgcagatcggtgaagtatgcgtcgatgagcgcatcggacaccgcctgcttgccgccgatgtgctggtagatgctggtgggcgacacgtcggcctgcgcggacagcgtacggatggttagaccgtccacgccgtcccgttccacgatctgcctcgccgcgtcaagaattcttccgcggatttcaagggttggcgtgcgtctggatcggggctgcgattgcgtcatatccgttattctagggtgcgtacaggccattaccgccgttttggcatggccacgatcgcaacgaccgcggcgataagtgcaatcgtcatggccgccaggcagacgctgtgcagcccgtccatgaacgcggatgcgaccgagtcatccagcaatctgcgcggggtgcccggcagggagctggagatggattcggcagccatcacggattccttggatacgccaaggatgccctggggcaggtgggatccccgcagcgcgtccgtcaggccggtggtgtacgcaccggcctgcagcgaccccatgatgccgacgccgagcgttccaccgagttcgcggatcgtgtcgttgacggcactgcccataccctcctcgccaaccggcacggccgtcatcagcgcgtcggtggcgggaccctggacgagggcgatgcctgcggccatcactgccatgacgaccgcgaacggcagtgtggcaatcgccgtctcgagcgccgaacacccacgcagcgcctggaaccattgggttgtgaggaagatgaaaccgaacaggcacaggaaggcggcgcaaatggccagcatgccgatgacggcgcacacccagaacacgctatcccatgcgaaccgttgcagcaggatgccgccgatgaccgggccgagcactatgcccaccccggatatgccggcccacagtccgacggccagcccacgcataggcgatccgtcgaacaacccgatgatggatggcagcgtggctcccatcaagttgtgtattaatataacatatttatgaaacaatgatacacatcatgtcgggaacaggcatccgcatcgaaaacaccgacctacaacacaatcaggcccggcgaccatcaaaggtcgtcgggcctgattcatacgcgctgtcggactaacggcgtccggacttcatacggaatggcgcattgttgcgattcttcttggaatggcggcggttcgggccttccgtgttgccgtatttggcgatcatgcggcgttcgtgacgcttggcaccttctgaacgctcgtcgcgtacgatgcggttctcgttcttgcgatggatgcgcttgtcgaattttccgcccttgccgtaccgatcattgcgacggttcttgccgtactcgttgcggccatcgtcctggcgctcgtcgtaacggtttttgccgtatccgccgcgacggccgcccttacggcggtcatcgccatgctcgaacagatagtcgcggcgctcggcctcggggttgctcatgccggcgcggcgttccgcacggttgcggttcttcttcacggccttcttgctggccttgtcgccgtgcttgcgctgcggctcgccttcggcaacaaactcgccgcctgcgttctcgtgctggaatccggtctcggcaacgttctgctcggcgcggtcgcgattgcgattgtgcttgcgcctgccgctgcggccggactcatcgcccgccgcgttcttggcgcccctgttcttgcccttgcgcgggttgcccacgggctgcgacttgtcgaggctccaaccatccacgcgctcggcgcggtcgcccacaagctcaagcacttcgggcgaatcgtgggtcacttcgatcatcttggttttgatgccagcctggttcagcaagcggcgcgcctcgcggcgctgttcgggtagcacgagggtgaccacgtcgcccgccttgccggcgcgggcggtacggccggagcggtgcacaaaggacttcgggtcagccggcggctcgacctgcaccacaagctccacgccgccgacgtctatgccacgggcggccacgtcagtagccaccatgacgcgcacgtcgccggaatcgaatgcggcgaggttgcgatcacgctggttctggttcaggttgccgtgcagctcggcggccggaatgccgttctgcgtcaggttcttggcgagcttcttggcctggaacttggtgcgggtgaacaggatgcggcgaccttcgcccgaggcgagtgtacgcacgagttcgtgcttgtcgccgcgcgtggtctcgaacacgtggtgggtcatcaggtcaggttcggtggtggccgaatcgacctcgtgcaccttgggatcatgcaggaaggtgttcaccacttcatccacgccgtgatcgagcgtggcggagaacagcatgtgctgggcgtcgggcgagatctgctcaagcagtcgcttgaccggcggcaggaagcccatatcggccatttcatcggcctcatcgatgaccacgacttcgacggacgagagcgtgagcgcctgctggcgcagcaggtcctcaaggcggcccgggcaggcgaccacgatatcggcgccggccttcagatcgcggatctggtggatgtacttgacgccgccgtacaccgtggtggtgttcatgccgaacgtgtgggccagcggcatcagcacgtcgttgatctggttcgcgagctcgcgggtgggggccagcaccaggccgcgcgggtgcggcaggaaatcgtcagcgcggcgctcttccaagctggccttcttgcgacgcttgatttccttgcggaactcctccatcgcgatttcgccaagcgaatcataggagccaagccgggtgaccagcggaatggagaaagcgagggttttgccggagccggtgcgccctcggccgagaatgtcgcggccggccagtgaatcgggcagggtgtcggcctgaatggggaatgcggtcttcttgtcatctgccgcaagtacgcgcaccagcggtccgggtacgccaagttcgccaaaggtaagggggcgggattccgcgctgtcgttcatctggaaatcagcggaatcgtcacgatcatcgaaattattacggggcacagtggcctttcatgtcaaaggttacgcaaattacgcaagctttccgagcttagcgtaagccccctactttgcttgatgctcgccacgctgtcattccactctttacttatgaccccatggggcggtaactcgcccatgaggcggtaacttgcccatgaggcggtttgaagaaattgtgaaaccgcagaataaagccattttcacctaccgccccatgagggttttaccgccccatgggatgtttgccgccccatgggccaattaccgccccatgggttctaccaccacgtaaggcgagcaccgccccatggaacacgcaaatggcccctacccgtgaaggtaggagccattgtgcaaaagggctgagccacaagccctaaaacacactacaaaatatccggatcgtctttggcgatagtgccggttgccttgccaatggccttcaggccgtggtaggccacaagaatcacgatcgtgccaatggcaatgccgttgaaggaaatgccaccaacagtgaacgcgaattggccgatggcaataatcatggtgatggctgccaccatgatgttcagcggcttgtcgaagttgaccttgttctcaacccagatgcggatgccgatcatgccgatcatgccgtacagcagcgtggtcacgccgccgagcactccggcggggatcgtgttgatcacggcgccgaacttcgggcacaggctcaggatcagggcgaaggcggctgcacaccagtaggcggcggtggagtacaccttggtggcggccatcacgccgatgttctcgccgtaggtggtggtgccggagccgccgccgaagccggcgagcgtggtgcccaggccgtcggccatgagggcggtgccgatctggttgtcgtagtcgcggccggtcatctgggccacggacttgacatggccgacgttctcagccacaagcacgagcacaacagggacgaacatgggaaggatggaaaaatcggcctgcggcaggtggaacttcgggaagccgatccatgcggcgtcaccgatggcggagaagtcgacctggccgcggatgcaggcatatacatagccgatgattacgccgaccaaaatgttgaggcgacccagcaagcccttgaacagcacggccacgagcagcacggccagcagggtaaccagtgcggtgtccggcgcggcttggaagttggtccacacggaaggtgccagattgaaaccgatgatggccacaatcgcgccgttgaccacgggcggcatgatgatgtcgatccatttggagccggcgtaatgcacgagcacgccaatcagggccagcagaataccggtgaccatgatgccgaagctggcgaccgcaatgcccttgttggcggtggtgaccgcggtgatcggtgcgatgaagccgaaggacgagcccaaatagctcggcagcacgttcctgttgataagcaggaacagtgcggtggacatagccgtgaagaacagggtggtggacgggtcgaagcccgtcagaatcggcaccaggaaggtggcaccgaacatggcgatgacgtgctgtgcgccgataccggcggtgcgcacccaagtcagacgttcatcgggctcgacgacctcgccgggcgccagcgtcttgccgtcgccatgcaattgccattggaagatattggacattactactctcctcgctctcgcttggggcacggcattcacaaccagccgcactacgcgccattctagctcacgaagattttgtgaagtctctcttccgggaaaggctatttgccgtaatactccagcaggtgcggatcgacggcctgcaccacatccaccaaatcgccattggacaggtacgggcgcttgaattcgcgccacggctccaccttgacctcccagcggccggtcgtctcgtcgagcacgggccgggcggtctgctcccagcgcacacgcttggaggtgcggccggtttccgggtcgcggcgcgtgtagtgcaggcaggtgcagttggtgatcttccagtcgtccgagtcggcgcgatgcaggaattcctcgtcggccagatcctcgatggtgagcatcagggcgagcatgaagtcgccgtgggtgaccatgaccacggattccgaatcggatttgcggctcagcgaggtcaggatgttgtgcacacggtcctcggccacatcggcaatcgactcgcctgccggcggacgccagtacagcggatcggtattcttgaagttccagttgcgtgcgtagttgtttttgaattcgtccttggtgatggtgttgatttcaccccaagaacgttcgcgcagcacacggttctcctcccatttggccttgggcagggccatggtggctgcggtttcgcgggtgcgcacgtatggcgagaccatgtaacggtcgaacagctgctgctggctgaccagccaacgaccgatgcagtcggcctgcttgcgtccggtggcggtgagtctccaggagcggtcgggtacggtgacgttgtcctgcgtatacagggagttgtcgccctgttcgcccgcctggacgatgacgttcgcttcggattcgccatgccggattacgtatagatcgagcggcatgctcatatggattcctctttcgttattggttacgttgtgttgttttctgctgtttcctacttgacctgcgtaatggtgttccccttgaccatgaacgcatgccgggccatgtcgatcatcggctgatcgaacttggagtcggtgtagaactcgtcgatgacggcgtccggaccgtacagttcgcggaaccgtttggtcttgttggtgttgaagttgaggtacgtgaccttcatcgtctccacatccacctcgctggccacgagattcctcacgccgagtctgcggcaggcctcccccaccgtcagaccgaaggatgcggtgaggatcacatcgtccgactcaggctggtaccaaggcttgatatgtgcgtaatatcggtcccagaaatcgtccacgagctgttcgacgctcgccacccgtttggatcggctcagttccgtgagatagccttcggtcatcttgcccacgccgtattccatttgttcaagcgtggcccggccaagcttgtatttgaccgcgtaccgcagcacgggggcgatatagcggaacactttcgggtcgtggcgggcggaatacaggtacaagtcgaacaggctttcgccatcatagatggttccgtcgaaatcgaatacgcgcataccttctgcttctactctgttattccttgtctaaggctaatctcggtaagccggcgaaagcgcaaatacgcagtgaatttcacatgaacactgttttttggattgatttcggtacaggtaacgtacactggtgacagcgtggaaggaggtgcgtaatggcggcgtctgaaatcgaacaatggtggattgataagtttcaggagaacctgggtccgattcgcaaggtagccggatggacgactcagcaactggccgacgagctgggagtcgcgcgacagacggtgtctaacttggagaccggcaaaagcccgatgaccaaactgcagtatctcgctttacgtacggtgttcagcgccgagatcgcacgtcgtgaagaccgcgatctggcacgcatcatcaagactttggtcgacgatcccattgagcaacgcattcgcgaacggcgcgcccaagagcaggacggcgaggccgttgccgacaatgccccaatcaatacggacggtggcaacgttgccgacaacgccgccaccgagaaatgcaagcccagtgccgccacattgaaggcttcaaagactgccgcaacgggcaagcccacgctcagcacggcgatgcaggctctcgccgtcatcaccggcgcattggccagtggaaccgccgccggcatcatcacctacttgatgttcccggacggcggcccgaacaagcgctgagtcgccgaaatatcgaatccgttactcgcaggccacgccatcgtgatcgcggtccaacttgccgttgtatccaggctgcccttgatacaacggagcagcaccagccgcacggacttcagagcaattcgcataatgcacattttgctgcgcttgctgttgctgttgtgcctgtcgagcggcctcctcagcttgccgctgggcctcggcctgcgcggcagcctgttcttcagcggcctttcttgcagcctcttcttcagctgccttcttggcggctgcctcttcagctgccttcttggcggctgcctcttcagctgctttcttctcctcagctaccttcttcgcttcttcctcctgcgctatatcgctggctttacgaacattgataacaggcttgtccccatcttccacggattggacaacccagttcgaagctctgagcaccattttgtccgtgtcgcttttcacctcataatcagaggaggaaaaaccggcatccttgagctcgtctttcacatcggccagcgaacgccctttcttggcgatggcgacaattttcgaatatgtggattcctccttgccgtccgcaccgtcagaagaccccgagcatccagcaagcacaagacccagaaccatcataagaatcacggtcaacgcccaaaccgcacgattgacacgcttcatgttcccgaaacgaaccctgttgttcaacattattctctcccttgtagtcgcagatctgcggatggtcggaaccacgtcaatgtgaatccaaccatcctgataattactgcttattcaatgatatattcatccattgttttcgccgatatatcgcaccagcgtttccctcattatcaactatttcgagttgcatgaatgcgccgtttataggccaagaatttcgtgcttttttgcatcaaattcttcttgggagagaatgccgatatcaaccaattccttcaattttttcatcgcctcgacttgttcttccacagacatggatgccgtgtgagcggcgggagcagcggcttccggtgccggcgcaggcgccggcgcttgaaccggggcggccgtcataggattaatggcttgtgccatattcatgcccagcaacatgccaccatcgccaaagccgttgtcttggatgccttgcgcaatgcgctgctgggcagccatattgccagcttgctgggaaacgccctcgtatgcggcaacattcatcttattcgaggcgaactgctgcacgagttgacgtgattgctcggtgaactcgatactttcgatgcccacactggacacttcaaagccaaaacgatcattccacgtacccgcattggcccgatcgccacgcacgcatgccgcgatgtcattcgtcttgccgggcaattgcgaaatacgatattcattggacaacgaattgatggccacaataaacgactgtacgaattcagacagaatctgcctacgtggcccttcatcatcgaatgaatacgacacggtagtggcaggcacaaagttacgaacgaatcgaactggatcagtgacctttagcgacatggatccgcgtgcgcgaatttccaaatcgacgccatagaaccggtcgttatacaccagcggcgcagaagtgccgaatttgatgccacgaatctcacgcaggttgacgaaggccacatatttggtgcggccaggctgacctccgaaggtgaatcgatcggcaacctgattgaagaacgatccgatgccgtctccggcgagcacgctctgctccccgttgcgatattcataaccgcccgactcggtgatgacgttttcgatacctgtttcagagaaaatgaacgccgcagtattctctggcacatagatacgcgaaccattggtgattattccctcggaaccgtattcattcgaaccgcgatcgttgttgcttccgcggggaatgcccggcacaacgacggtgtgttccgtgaacggaccagcggtgatgatatcacgccacaggtccgcgaatgtaccgccgagcgcgccggcgaacgccttaataactgccatctgttttttcctcgatatctcatgcatatggccgatcttgcgactatgcaatcgcaagaccggccgttatgctggcatgttggttatagctgcgtttcgcgatcgcagtattcgcatcgaacgacttctttgcgatgaccggaaagcggagcgccacaaccttcgcaattcaccgaaaccacgggttcggtaatcccaagcccactacggaatgcgccaaaagtgtccttcagcgccccggccagagcctccgttccggggatggccttgttgaagaccggctcatccattggcgtgtactgtctgccgcgtatacccatgtatcgtcatcgttcctttcttggaaaaccgttacctcgatacgccagtctgatcactggcccaccgatgcgagcttctgcatgcatcgagtcatgacctcggtgtagtaggccgaatcctcactgctgagggagttttcgtcaatggcgtctaccttctgggagaactcagagtaacgcttcatcatgctggcatagtcggtagccatgctgaccacgttgtcggatttctgatatttgttcatgaaggcaacatactcatcgataaaggcctcgtagctgtccatcgtggccttgaagtcagcactgtcattggtgttccgctgcgccttctgatccgaagactggtcgctctgcttgttggcatcgctggaatcagtgcccgtatcagtgctcttatcatcctgcttcgcggcgtcgccgtccgtagacgtatcttccttcttttccggaacctggatagtgatggacatgatggtctcgtcgtcagtgttacgagaaacgctcacactgtatccatcggcgttcttggcattgaaactgtcagcggacttgctatagtccacggtgaaaccgttgtcttgcacggacttgacgtagtcggcatactgcttggcgtcggtaccgcacacctcgatggagaaatagtccgaagactcgcttctaatttcaccctttgtggatttcggctgcggcagcagcgccgcgatatccgactccggccatgaatatgcttcgcacttggtggcgagcgatgcttccaattccgcccgatcagccttggccttcgcaccgtcacgaattacgaacacgccaccgattaccagacccacaacggtgataccgactgccacccaggccagcactcggccttgcaccttgccactcgggcgggtcacgtatacggcgaagcctgagagcagtgccggaatcaccgtggcgaacagcagtccgccccaggatcggccagaaacatccacaaattgggcgagtacgaacaacactccccaaataatggcgaacacagccagcttggaagtcttcttcaccccttgtgcattcggagcaagcacggcaggcgcagcggcaccagcaaaaccagtggcagcaccggcaccatgtgtggcgggtgcaggagccacaccaatacgcttgtccagagcggcgaggaactcatcaacgcgcttggcgctttcgtttccagtcgcctccagacgaatggcggcccctgccgcaccctgcgggactacggttagcgtgcagttcaccccatcataggagtggaaggaaaacgctccggtctgggtgttttcgttatccaaggtaaacgtggcgccagtagtcagctggtcgtgaataacttggaacagctgttgcggactgaccgcatatacacgatcaaatggcgcgccggcgggccgctgcgatgccgtagccggagtcatcggagtggtggtagcaccatcagacgctacgttcggttggccagccggtacagtattcggcacggtaggcgcattcgcgcgatcttccggtgcgtcattcgtgccttcggacggtggaaccggctgaggttgttgatcaaatggcgttgtcatgatgcccttctttccttaagcagcagcattaccagcacagaggaggcaagcccggcaaccgttacggtcaatccgactgccatggcaagccggtatcgttcgctcatcattgcgtcccttcttattgctcgctttgctctgcgatacatcgaaaccagtgtatggcgttgttattatgtacgcaaattagcattttgtatgcctgttagctttattgtcgatgcttgataccgcgcatgaacatcctttccgccaccgcacctacacggatggcatcgaccattgtcggcgacacgcgcgggccatacatcagctgacaactgaatttttcggcgtgtttccgaaaagtcggcgtcctgtacgctgggaatcgagcaaccgcgtacgatggcgcagcacagcacccgcaacacagcgacaaggagcatgggcaatggcagacatccccgaagaacatttgaccgaggaactgttggatcggctgctcgccagcgccagcattgagcagtatctcgatgagggactcgtcagcgcacgcacgctgaccgactatctgttcgaccgtatggaagcccatgacctgagacgagccgacgtggtgcgggcatccggcctcaacgccacagtggtttatgacattttctccggcaaaagccgccccggccgagatcacgccattatgctggcttttggtctcaagtgcacattacgtgaaacccaacggctacttcgtcttgcaggcgtttccgaactgtggtgcaaacagcgacgcgacgcgattatcatctggtgtatacgcaatggattcgaccgcatcgccacggacgacgagttgtatcgtatgggagagacgacgttgctaccggccgattgacgacattcggcccaacaacactcaccagtgagacgcaagtaagagggcatcaaggagagacatggacgataagcaggcgatgcatgcgatgagcatcgacgatgcgtaccatgtcgagcgtacgctcgctcgcggaccttccggcgtcaccgaactggtgagcattgacggcaacggcccgttcgtacgcaagaagattccctctcccctagcgcaacgcaatgtgtgggcggcgctcagcgcctgccagagtaatcgtctgccgcgtgtggaagcgacgtacgagctgcccgaccggttcgtcatcgtctacgattacgtgccgggcagcacgcttgcgcaaattgcggaggaaaacgggcggcttgcaccgaatgtggccgtgcagcttatcgaccaaatttgcgaagccgtgcaggagcttcaccagcacggcgttatccaccgcgacatcacgccggccaacgtcatcgtggcccaggatggcgcgcatctcatcgatttcggcatcgcgcgcatccggtcagaggcaagcaaccgttcacgggataccacggcacttggcacctacggattcgcctcgcctgagcaatatggctttgccaaaaccgacgcgcgttccgacgtattctcgctgggccggctactcggattcatgctgaccggcgtatatcccgatgccagcgactacgagcagcgacttgccgatgatgccgcagtaccggctcgactacgcgccgtcatcggctatgcgtgcgcattcgagcccagcaaacggccacagagcgtccaagagtttcgccaggcgctgttctcccagtccaatccgcccataccgaacgcatcatcggcaaatccgccatcaacgaggacaacgaacggcagcgcgtcggcgtctcgactattccggcgtctgcacttgagcaaacgcgccatcgtgctgtggtccattgccggagcggcactgataatcgccgccattgcgggaggcattgtgttggcaggccaacttggcattatcgggtcggcaacatcacccgattcctcgacacaatccagcagccaatcaaccgataaggccgatggcgggcactcctcgaacgggtcaggaaccgacaatgccaatggcacgggcggagtaggcggcactgacggcgctgatggagacaatcaagacaccgtcaccgacaatcctctgaaaatagtggaatccggctggtcggcggaccagcaagggtatgtccactacgctttcgccctgcgcaacaccagcaagacccagcaggtgcagtatccgcagattaccattacggggcgggccaaagacggttccatcgtgttctcgcagacgcaagcactgaatatggcattcccgaatcagactgtatatgacgccggtcaagcaggcgaaggcaccgccccagaaacggttgattttactgtgctcaatccggatacatacaacgtcgccaaggctcagggaaccgccgccttccccatcagtggaatatccaaaatagacaacagggacggcggcacgacgttcaatggcgaggtccgcgccgtggcagatggattcaagccatctgatggacagcaaatcaagatttccctagtactgcgtaacgcacagaacgcaatcatctatggagatatcgcattcgtggattggccgg

SEQ ID NO: 2281 - DNA, 19882 bp, Unknown
  R119_18m  MAG No. k141_12620
gcacgatcggcggcaccgtcctcctcttcgatgttatgccagatatacgccgcacccagctcatccaacgtgttcttcgcctgacggcaatcaccacaccatgtggcgccgtacacatcaatggccatgccatgtcctttccgcatgccgcgcttcgtccgcggccgtctcatcgcgtccatcgtaacggcacatacggccatatcgcatcaggcgaacaccttcggagtcaacgcgccgaatacatcggagtcggtgtgacgttccctgtaccgggcataggcgatatcgaaagcctgtccgaggtcttcgatcagatcgttcgcatcctcgatgccgacggcgagacgcaccagctcatcggtgatgccgaccttcagacgctcctcccggggcagttcgaaatgtgtcatgcggcaaggcagttccgcaagcgattccacggcaccaagggacacagccaatcggaagatgtgcaggttgttgagcacatccgcagggtccacgccaggcactacttcaaagctcagcacgccgccggcgcccttcagtcccttggcggcgagtcgctggtcaccggcccccggcaggcccgggtaatgaacggacttgaccagcggatgcgcgagcaggtaccgcgcgatggcattcgcattctcctgctgccggtccatgcgcagggccaatgtctggatgccgcggcgcaccgaatcgcattcagtgggcgccagtacccctccaagacggttctgggcgaagtacacgcgattggccaaatcctcaccggagacgaccacgagaccggcattgacgtcggagtgaccggccaggtacttggtggcggagtggatgaccacgtccgcgcccaaggtgagcggctgctgcaggtacggggtcacgaaggtgttgtccacgatcgacagcgccccgtaacggtgggccaccgtggagatggcgcgcacgtcgttgaccttgagcagcggattggtcagggtttcaaagtagacggcttgcgcaggcgcgatgccgttcgcgcggtcgcccttgacggcggcctccaacgctgcaatgtcctgggtattgactgactcgaccacgacgccccaacgggtaaagaactcattgagctgcgaatacgacccaccgtaaatgttgtcccctacaataatacggtcgccgggcttgaaaatgctgagcacggcatgaatcgccgccaagccggaggcgaacgcaaaaccgcgcgttccctgctcaagctgggcgatctgctgttccaggaagtcacgtgtgggattgccgctgcgcgcatagtcataacggggcatcgcgtcgaccttctcgaaggcatatgtcgttgagttgtagatcggcgggttcacggctccggtgttgttgtctccaaccggcagtccgtggacgagctgagtattgaacctggtcattgcgcaccccctttatggtgttctctatggctgctgtgcacgaggccgttccccgtgcggcacgtctacgacgataacgtatcggacacttgaatggaacggcgttgctatatgggttgcttatggaccgttcaaatgcggtcgcggcggtcacgtggctacactgggagccatgaagattgccaaggccttgacccgtttgaccggtcctgaaaccgccccggtgttcgtgctgctgcacggctggggatccaatgaatacgatctgcccgatctgctgaactattgcggtgccggttcggctgattatgccagtttgcaggcacccatcgcctatggcatgggatatacatggttcggtgcgtgggcgcatgaaggtgtgccggagggcgaatcattggacaagcaggcggctgaggccgcccaagccattgatgcatgggtcacggagcatattcccgccactcggccggtggttgccatgggattctcgcagggcggcctcttggccgcgcatctgctgcgtttcaatccgaagcgatatgccgcagccgtctcctgctctggatggctggcaccggggtccgttgcgggcgatgccgaattggcttcgttgaagccgcccgtgttctacgggcatggtgctgcggacgacatcttcccgaaagccgatgtggcggcgatgggtgagttctggcgcgagcacggcacgttgaccgaacaggtgtatccgggcatggcccattcgatcaatatgccggaaatgcgcgatattcaacggttcttggaggccaacggattcattcggccgcagatttggtagtcaccacctcacatggcgtagtctacgtgggcgaattcggggactttgtaccatttgacggggtagccggcaccgtgggcgcagaagaccgagtcgggggtgttgtccagatcggcttcgggatcgtaggcggcggctgcgatgacctgttcggcgtcatggcatggcttgtagccgccgaaggtggcggagaaacggccatggccgtgcgtgtactggttcacgtccatcgcatagtcgcgcatttcggacaccggcgcctcgccttcgatcacggcgtattcgtcatcggtgaccggggattcgaagctgccggccatgcgctggatgtcgctcatagcacggccgatcatgtctgcgggcacttcgagccggaaccggtaccacggttccagcagtcggcagttgccctcccctgtggtgtccggccggctctcgaccggcgtctcgggccggccactgactcctgccctggcttccatcagcccttggcgaatcgcccggtacgtggcttgacggaagtcgccgccttcggtgtgcttcagatgcgcgcggccggccaccaaagtcatcttgatatcggtgagcggtgcgccaacgagcacaccgagatgctcacgctcggtcaggtgggtcagaatcagccgttgccaattgcggtccaaatcattttcggacagggccgaggccacagtgactccgctgcccggctcccctggttccagcaggatatgtgcttcggcataatgacggagcggctcgaaatgacctgcgccttcgatcggcgcagtgatggtctcacggtacaggatggagccggggccaaaggacacatccagaccgaaccggtcgtgcagggtctgctggatgatttccagctggaccgcgcccatcaattgcacatgaatctcggccagccgttccacccacaccacatgcaacaacgggtcttcgtcttccagctcacgcaatgcggtgatgaccttgtgcaaggtcagatcatcgaactggggacgggccggcgagctattgtccgccgcggtctggccggcggtgtcgttctcctcattgcggccggttcccgacttggcggcatcatgctcggcatcgtcctgattcgcgctgtcatggccggctcccccacgtttggccgctcccgaggtgccggccgtatcggattccgctccgacgggcaacaccgtgtaggtcaacacgggttgcaacgacggcgattcggcgtccggttccgttcccagcccttcgccggggaaggtctgcgtcagcccggtcaccgcgcataccaagccggccggcacttcggtgaccgtctcgaatttggcgccattgtagatgcgcacctgatcgactttctcggaccacgccatgtcatcatcctcctgcgctggcgacggtgtcgacgccgcggcgcacgaggatgaggagacgatctccttggctttgagcgcaccgccggtgacgcgcagccacgtcatacggttgtgctgaccgtcgtgggcgattttaaacacgcgtgcggcgaaggcggccggccattcacgttcgcgggtgaacgtctccagcccgtccaggaattccttgaccccttcgagtttcaatgccgagccgaaatatacggggaacagctcgcgtacggcgatcatcgatcgcaatctgcccacggacagcgcgccatgttccaaatagtcgttcatcgcctcctcgtccagggtggcgatgtcttcggcgaacgcgtccaacggtagcgcgctgccctcagtggactgttccattgccggcaacggatatatcgcatcgctcagacgcctgcgcaactgagccaacacggcctcgcgggcaaatccggcggcgtcgcacttgttgacgaagatgaacgtcggcacaccgtatctggccagcagacgccatagtgtctcggtatggccttgcacgccatccgtgccggagaccacaagaatcgcgtagtcaagcacacgcagcacacgttcggtttcggctgcgaagtccacgtgccccggcgtatccagcaaggtcaggcgcaggtcgccgtgttctaccaatgcctggtgcgcgaaaatcgtgatgcctcgcgccttctccaaggaattggtgtccagaaacgcatcgccgtgatccactcgccccaatttgcggatctcaccggtacggtagagcagcgcctcggacagcgtggtcttgcccgcgtccacatgcgccacgatgcctgccactatctgtttcatcagctgtgctcccttcccgatgcgccgcatgttgccggccgcctaaccaatatatccgagaaaatccgggagggaaaaattttaccgtcagaccgggctgccggtacaataagtcaccgaacaccgactgatatgaggagcctccgtgaccacttccggcattaccgttttcggccaaccatcccagcccaatcatggtgccggcgggcgaatcgccatggacgatgccctctttcccaccgattatgtggcgctggatctggagaccaccggcttttacccgaacagttgcgccatcacggaaatcggtgccgtgcgcgtgcgggaggggcatatcgtcgatcaattccagcagctggtgaatcccttgcggccgattccgcgtcagatcaccacgctgaccggcatcaccgatgcgatggtggccgacctcgatccgattgacgaggtgcttccccgattcatcgcatggctcgctaccccggctgccggtcccaccgttgagccgattgtcggtcataacgtcagcttcgatctgcgattcctggattacaacacccggcatatcgccggctgcggctttgcctgcgcggattatgacacgatgcagatcagccgcgccctgttccccgcgcagcggcatcaccgtctggctgacctgatcgtgcgcttcggcatcgcggacaatgaggaacaccgcgcattaagcgatgccatccagacccagcagtgcttcgaatggatgcggcattatgtcaccgagcatcacgaatccgaagcaatccgttggaagcaggcgccggccagaaacagcaccgaaattctccaccagcagctagtggtaaagcggtagttacagcccgtattattcgcacatagaggaaaactattagtcgctgggctagagaccttatagtggacggattcctctcgcatatcggagaaatgcgggataccacacggttagcggccaatttggggccggcgtcccgcaaccgtgcgggacgccacgcacgtcaaacgatgcacacggctggcatcccacaccccattccacagaaccattggaattctgccaatcccacaaaccggtgacgacaccgtacatcaggttctgtgggacgccagaggaaaaacacccgaaatccgctggcatcccacaccatgtcacaccgcacctgcagcatcgcaccacaccacatcacgccgacacctattcgtgccccccatttgcataattcgacgtttttggaagatggcgcacacatgcatgtgcccccatttgcatatcaaacggttgacgcacaaatggggacacacaaccacaactcagaatcctcgaaattccgccaatcctgagatttcatcccccaacacggcaatcgccgcctctgccaccattttcgcatcaaacgattgacgcacaaatgggggctcatgcccctttgtatcggtatgaatcagtccctgccgtcaggctctccccctattgtgagggccgactggcagggactgaacacgcatactcacatgagcacaccatgccaagcatggacatctcagtacgaacagaacctattcgcacacgttacagcccgtattctttggcgatgacggaccagaggtcggcggcggcctgatcgacggtttcgttgacgatggtgacgtcgaattcgctttcggcggcgagctccactttggcggtttccaagcgtcgggcctgctgttcggcggtttcggtgccgcggccgatcagacggcgcttgagctcttcgaagctcggcggcgcgatgaacacgtacaccacttccaagtcgagttcggcggcgcgctgcttgacgcggcgagcaccctgcaaatcgatttccagaatcgttggcatgccggcagccagatgctcctcaacaggcttgagcaatgtaccgtagtgggccatgccgtgcaccacggcggtttccaggaactcccccgccgcttcgcgggtcaggaactcgtcttcggtgaggaaccagtagttgacgccatcaacctcgccggggcgcggggcacgcgtggtggcggagacggacacccacacttcggggtggtcggcgcgcagcttggcttccacggtgcccttacctactgcggtagggccagtcaggacgattagacggccggcatgggtgttttcagtcatgggttcctccggagatgatgtggtgtgcagcgattatgaatccaatgtggtaacggctcaccggcgagatgaccggtaactgttacagccccgacgaacagggaagaatatgaatcgtgatgcgacgtatgcaatgagatagatacgtacgcatgccgcgacatctgattccgttctgattactggttttctgcgccttcggcagtggcttccatcagcgactgacgtacgtcaagcgcaatcgactcggtagcttggctcagtgcggcgatatccggcccatgcgaggcgataaagcgggacacggtaaccagcacgttgccgcgcgtaccgcggaacacggttttcagatccttggcctcggcaccctgccaaccgtaaccgggggaaagaatcggaccggtgaacttggaggggtccacgccggaatcctgcatccattggccgatggtggcaccgatgatcagacccaccgagcccatgccttcgatatccacgttatgcttctgcgcggtggaggcgatgccgtaggccacggtacgtcccttgtaatcgccgctctggcgcaacgcggtctgcagactcatgccttccggattggaagtcagggaggcgatgaacacgccgcgtccgttttccaacgcttcggtaatcaagccgttcaacgagcgcgcgccatagtacggcagcagcgtgatggcgtcggccagcaacggtgcaccgggcttgaaataggcgtctgcgatggcggaaatcgtggtggacaggccgccgtgcaggcagtccacgatggtgatgacgcccatttgtcgtgccgcgtagagcacgcgctcgagcgcttcgaaacctttggctccgtagcgctcgaacatcgacgtctggaatttgactgctgcggcgcgcccgttggcggcctgcagcatacgcatggagaagagttcggcgccttcggcgtcgacgttgtatccccagtcggtgaggagcttgcgatgtgggtcaatgcccacacacagcggtccgtatttggccattgaattgctcagtcgcagaccgaaatccgaacgttgtgcctgcaattcctcactgctgggtgtagtcatcagaactcccgtcgctccaattcgaacagctgcttcgaatgctcctgaatgctcatgatctgataatcattatgcttcacggcctcgatagccagcagtgcggcttggaactcggtgatagtggtaaactgcggcagatcggctgcaatagcggcagcacggatggagtagccgtcggaacgggagccgcgcgagttcggcgtgttgaggatcatgtcgatcttgccttcctcaatgagctgaaccacgttcttgcccacggagccggcggcgtgatgcacctcgaccggggcttccggatcggtgtccacgcgggtgctgatcttgtccacgatgttcgactcgatgccgtaacggcgaagcacggaggcggtgccctcggtggcccagagcttgaatccaagctcttcgaggcgcacggcgagcagcggcagctgacgcttgtcggtgtcgttcacggaaatgaacacgttgccgtgggtcggcaggccaccatcgtaggcggcgagctggctcttggcgaaggcgtgcgggaagtcgcggtcgaagcccatgacctcgccggtggagcgcatctcaggtccgagcaggatgtcgacggtcttgcccaccggggtgcggaagcgcttgaacggcagcacggattccttgaccgcgacctgctggccggggtggatgtcgccgccgtcgcccttgggcagcagcagaccgttggcgcgctggtcggcgatggtttcgccggccatgatgcgggcggcggccttggccagcgccacgccggtggccttggaggcgaacggcacggtacgggaggcgcgcgggttggcttcgatcacgtacagcgtgttggccatgaaggcgtactgcacgttgatcaggccctgcacatggcagcccttggcgatggcgtaggtgccttcacgcaggcggcggatctggtcgtcggacagggtggacgggggcagggtgcaggcggcgtcaccggagtggacgccggcctcctcgacgtgctccataatgccgccgatgtacagttcctcgccgtcgaacagggcgtcgacgtcgatttcgatggcgtcctgcaggaacttgtcgatgagcagcggggagggcaggcggccggagaccacggtatcggccttggcctcggcaagcgcgcggtccacgtacttggtgagctgcttgtcgtcgtagacgatttccatgccgcggccgccaagcacgtagctcgggcgcacgagcaccgggtatccgatgcggtgggcagcgtccatggcctcttcgaggctcagggcggtgccgtaacgcggggcgttcatctccgccttcttgagcacctcgccgaacagctcgcggttctcggccagatcgatggattccggggtggtgccgagaatcggcacgccggcggccttcagacgcgcggccaaggacagcggggtctgaccgccgagctggacgatgacgcccttgaccgggcccatcctcttctcggcctcgtagatttcgagcacatcctcgaaggtgagcggctcgaagtagaggcggtcggacatgtcgtaatcggtggagacggtctccgggttgcagttgaccatgatggtgtcatagtccttgccaagctcctgcacggcgtgcacgcacgtgtagtcgaactcgatgccctggccgatgcgattcgggccggagccgaggatgatcacggcctcgcgctcgcgcgggcgcagctcggtttcgtcggcgtagcagctgtagtagtacggcgtggcggcgtcgaactcggcggcgcaggtgtcgacggtcttgtagaccgggcgcaggccgtaggtccagcgcagctcgcggatggtgttctcgccttcatcgcccaagccacgcaggtgggccacctgcacgtcggacagaccggcgagcttggccttcttgagcagcttcggggtgagggtttcggcctcgcgcaccgtcatggcggtctcgttgatgaggaagatctgcttcaggaaccacgggtcgatcttggtggccgcgaacacctgctccagcgtggcgccgccccagatggcgcgcatgagctgcaggtaacggtgttcggtcggggtgtggatggcctcaagcagttcggccacttcctcggcggacggcttctcgccatcccagttgaagcccatgtggcgcttgtcgatggaacgcatggccttgccgagggactcctggaagttgccggccagggccatggcttcgcccacggacttcatggaggtggtcagggtggggtcggcgcccgggaacttctcgaaggcgaagcgcggcaccttggtgaccacatagtcgatggtcggctcgaatgaggccggcgtggactgggtgatgtcgttgcgaatctcgtcgagcgtgtagccgagggccagcttggtggcgatcttggcgatcgggaagccggtggccttggaggccagtgcggaggaacgggagacgcgcgggttcatctcgatgacgatgatgcggccggtcttcggatgaacggcgaactggatgttgcagccgccggtgtccacgcccacgccgcggatgatggcgatgccgatgtcacgcagcttctggtattcgcggtcggtcagggtgaagcagggggccacggtgatggagtcaccggtgtgcacgccgaccgggtcgacgttctcgatcgggcagacgaccacgacgttgtcgttgcggtcgcgcatgagctcgagctcgaattccttccagccctcgatgccctcttcgatcaggacttcgtcggtgggcgagtaatggatgccggcgccggcgatgcggtgcagctcctcctcgttgtgggcgatgccggagcccaggccgcccatggtgaagctcgggcgcacaaccagcgggtagccgaacttctcggcgatcttgtcgacttcctcgatgctgtgggcgatgtcggagcgggcggattcggcgccggcctcgtcgacgaccttcttgaacagttcacggtcctcgccacggtcgatggcttccagggaggcaccgatcagttcgacgttgtacttcttcaggacgccggcctcgcccagcgccatggcggcgttgagtgcggtctggccgcccagggtgggcagaagcgcgtcggggcgttccttggcgatgatctgctcgaggatcggagtggcgatcggctcgatgtaggtggcgtcggccatctccgggtcggtcatgatggtggccgggttggagttgacgaggatgacgcggatgccttcctcacgaaggacgcggcatgcctgggtgcccgagtaatcgaactccgcagcctgaccgatcacgatcgggccggagccgatgaccatcacggatttgatgtcggtgcgcttcggcatatcacttaccttccttggagttgttcttcataagttcgcagaaacggtcgaacaggtaggccgcatcgtgcgggcctgctgcggcctccgggtggtactgcacggagaatgcggggatgtccacgcactgcaggccttcgaccacgtcgtcgttcagatcgatgtgggagacgaacaccttgccgtacttgccgttttcaaacggcgcgtcgacctgcttgccgatcggggcatcgaccgcgaagccgtggttgtgggcggtgacctcgaccttgccggtggtcagatccttgaccggctggttgatgccgcggtggccgaacttgagcttgtaggtgccgaagccgagcgcgcggccaagcagctggttgccgaagcagatgccgaagaacgggtagccggcgtcgagcacctggcgcagcagctcgatttcggggccggcctgttccgggtcgcccgggccgttggagaagaagacgccgtccgggttcaggttctcgatttcggcgaaggtgatggtggagggcaccacgtgcacgcggcagccgcgttcggccatgcggtgcggggtcatgcccttgatgccgaggtcgacggcggccacggtgtacagcggctccttgccttcgtactcgccgcatggctcgatggtgtaggcctgcttggtggacacttcgtcgtacaggctcaggccctgcatctgtggggtgttcttgacgtcttcgagcagctgctcgatggtcttgagcgcgccggtggcctggtcggtcagggcgtcgccggagaagatgccggcgcgcatcacgcctgcggaacgcaggtgacgcaccagcttgcgggtgtcgatgtggctcaagccgacgatgccgttcttggcgaggtcgtcatcaaggctaccttcggcacgccagttgctcacgttcggagagggatcacgcacaatgtatccggcaacccagatgcgggaggactcagggtcttcgctgttgacgccggtatcgccgatgtgcgggaacgtctgcacgacgatctggcgatcgtagctcggatcggtgagcgtctcctggtatccggtcataccggtggcgaagacgatctcaccggtcgtctcaccgagggcgccgtacggctcccccacatatacctgtccgtcttccaaaacgaggactgcatcgtccttgtcatacatcggaattgcgatggtcccggactcgttctggctcaccaaaacccccttatgtttttcgggtattcgtaccaaggttaacggccagcgcagactcacacgccgttgggcgcaaagtctcaccccgctggcggggctgtcggcaaggtgccgacttgagaatgtgtggcgacacaagtgtccgcccatgaaaaagcctcccgaatggggaggctgaacaacaaatgactaatcgaccgtcggctgaatctcagcggacggggcagcggactcgtcggatgcaccggacgaatcgggcgaatcggaaacatcgccctcatcggtcggctcggatgcggcggcatcggaatcggacgattcctcatcggcctcttctgccgcggactccggtgccggtgctgcgttcttggcggtgcacactgcagacagcaggccatggatgaaagcgggcgaatcgtcatcgcacagggtcttggccaatgccagagcctcgtcgatggcgaccttgtccggcacatcatcgttgaacagaatctcccaagcggcgatacgcagaatgttgcgatcgaccacgcccatacggcggaccttccaacccgtggagtgttcgtccagggtcatgtcgatctgacgacggtgctcggccacgcccttgacgatttcaatggcatagtcgggaagcggggtctgggcaccgggatgtgcgatgcgctcgtcaagcagggcgagaatatcctgacttttttcgtcggcttcgtacagggtgttcagagcccttttgcgcgcggtggaacgtgccatactgctgctgtcctagtcctttatacggtcggtcgtctgttaaggatgcggagatcagttgttctcgcggccggtgtaggaaccgtcctcggtgttgatcttgacgcggtcgccctcattgatgaacagcgggacctgaatctcggctccggtctcaacggtggccggcttggtgccggcgttggagcggttgccctgcaggcccggctcggtgtgggtgatggtcaggaccacggagcccggcagatcgacgctcagcggggtgccgtcgtggaaggagaccaagcagtcagtgccttcgagcatgaacttggccttgtcgcccacgagggtcttcggaaccatgatctggtcgtaggtggtcatgtccatgaacacgaagttgtcgccgtcctcgtaggagtactggagggtgcggttgtcgacggtctcgaattccatcttcatgcctgcgttgaaggtcttgtcgacgatcttgccggagagcacgttcttgatggtggtgcgtacgaaggcggggcccttgcccggcttgacgtgctggaacttcatgacggtccacagctgtccgtcgaggttcaggacggatccgttcttgatgtcgttagtagtctgtgccacgtttttcacctatttcaaattcaaactagcttaggcaaagcccaaaaattgccttggctattatgccacaccgggtatacaggaagtgaacgctggggtttcccacgtggcccccgactagactggatgaatatgcgatccttcttcgaagccatatccgtatcctgcgtcatccccgcgcgatcgccggcggacgacgaacgcacggtgttcgacaacctgtccttcagcatggaacgcggcgacatcatcgatctggtgggtccgtccggctccggcaaatcgagtctgctgaccgcatgcgcccgactcaacccgcacgcgcacggcacgttcgtcctcgacggcgtaggcagcgacgaattcagcgcgcagcagtggcggcgggacgtctcctacctgccgcaaaaaccgatcctgaccggcaaggacgtggccgaggcgatccgcctgccctggacgctcgcgattcgcggcaagggcggcaaggccgagcagctgctgcccgacgagcgcatccgcacgacgttggacgcgatgggctgcgaggacatcgacctggcgcgcgcgccacatgacctgtcgggcggtcaggcggcgcgcgtggcgttggcccgcacgctgctcaccgacccgaaggtgctgctggccgatgaggtggacgccggactcgacgacgacaacgcgtccaaagtggccgcgatcatggcggacgcggccgcacacggcatggcgatcatccgcatccgacaccgtccgccggacggacgcgccacccgcacgctgatgctcgatgcgggacggctcaccgatctgacgcgggacaaggaggtgcgcccatgaacggcgcctacgacatcgacacctggggtcttgttctggcgttgggcatggtggccgcggcggccatcatcagcgaactcatgcatatgggcatcggcaggaccctgatgtggtcggcatgccgcgccctcgtgcagctgtgcgccatgggattcatcatcagctacgtgattcgttcgagcagcgtgtggatggtgttcgccctgatgacggtcatgctggtcgcggcggtgcagatcgtgatatcccgcgcgcgcggcatccccaagggccttgccggaccgatcttcctgagcctggtcatcacgatgctgctcatgctggcgttggtcaccgaactcatcgtgcgcccacacccgtggtatgcgccccagctggtggtgcccctgaccggcatgctgctgggcaacaccgtttccgcgcttgctgtcgggctgagccgattctatgaaagcatggaggaacgccgcgacgaggtggatatgatgctggccttgggggcgacggcatgggagtccgcccgtccatccgtcatctcgtcgattcggctgggactgttgcccaccaccgcttcgctggcctccagcggcatcgtgaccatcccgggcatgatggcgggccaggtgatagccggcggagatccgctgaacgccgccaaataccagttcgtggtcttcggtgccatcgccgcgctgaccttgctggccgacggtctgatcatggccatggtctatcgcacctgcttcactaccgacgaccaatatcagacgcctaaagcacgatagcctcagtatcgatctcaggccaagcctcaggcgatggtgaccggcgtgccttccggaatttggttgtagaaccattcggcatcggccacagtgagtcgcacgcaaccatgtgaggccggctgaccgagcttgttgccttcctcttccatatactcgccggagttcgccccggtcggcaccgagtggaagaggaacgggccgttgaatcgcacccaataatcagcacccatgccttctgcgggattgtagaagtgatcgcctctcatcccgataacatagttgccgcgcggggtcgtatcgttgagcccggtgctggcgatcatcgtgtagatggtctcaccgccggattgcacatacacttcctgcttggcgatactgactttcacgctgagatcggagtattgcgacaaatcaggctgcttgccggtgggattcgtccatcgcgcacgttgcgcttccttgtcacgctgctcctgaatcgcctggttaaagaccggtacctgctggcggctcaaggatgaggccgatgcagacactcgcgatgccgactgttgcgcggattgactcaccttctgcgcctgcccctgaacctctgcctgcccctgtgcgaccgactcaccgcggggccacacccgttgggcgtcaatcgtcgagaagacggcaagaacgcagcacaacaatgcgcataccgcaaccacaatgcgccgtacaacgtaaattcgttgacgacgaatcctcatccgtgctcgacgccgctcagtcatgtcttccttctcgttgcaaagacttttgccgtaagtattgtagccgcttttacgatacgtcgcgtaccaatatcacgcgcgctattccgctgtcactattcctattccgttgccgtccacttacgtctcagcaacatccacaggccgatgatcacggccaccacgccgagcccgatgccgaacagtcccgaggattgcgccgcgtgcgcggttccctgggattccaacagcacgtcctgcgtgaccaccagcgacagcatcgcatcgagaaggtcacgaatttgaccgacgaatcgatggggttgtgcgtcttatgcgaaatcaccataccgcgaatcgcaatcaagaagaacccgcaacttacgcagcagacggtcaatcgccttaaggaggcgttctggaagctgtatgaaaccaagccgatcgagaagatctcggtgcgtcagatcaccgaactcgccggctacaatcacgccacgttctacctgtatttctcgtccgtgcgcgacgtgcgtgaccagatcgaagacgacctcatcgcccagcgagacctcatattgaagcagtgcatgcatgacggcacactccccagcatcgcaccgcatatgcaaatgccatcgcaatcggaagcagcgcagcagccagcggcatcaccgcaagcccagtagcgaggtcaacccacagctggcggcgcgggaaacaggtcgcgccgcccagtacacgaatccggcgagcttctaccgagtcgcgaggaagaagaaacgcgggaaggggaagatgatgctgccgtccgactgtgtggggtattcctcgcggacttgggagaacacttcggcctcgaacttcttgcggccggcgtcgtcaagcgcctgcagatacggacgcatgccggtgccgcgataccagtccataatcgcctcatgcgagggcagcgtgtgctcccgtttgaatcgcagatactgttccgaatcccgggtaaccatgctccccacgctaatcagccgttcacatatcggccgatattatctcacaattcagccaagcagggcgtcgcggcgggcgatgagcccgtcaatcgcggcctcgccttcgatgacggtgaaggtcagggacttacgttcgctggtctgcggggcgatggtgtgcaggtcgccgcgctgctcgtgccagccgcggccgtggacgctggagttcgagggttcgaggccgaccacgtagtcgcccgcacccatcgacttccattccatgaagtatgggaagaggctggcgtcgaagtcgatgacgactccaagtccgagcttgcggttgaccacggcggcgaagctgcggccgttcttgtcggcggcgagctcgtgcaggtacacgctttcggggcggttcgcctcgggtgcttggatttcgttccacggcgtggtgtcggctgcggtggtctcgtcacgcggggtggccttgcggctggggatcacgacttcggcgccttcggcgagcaacggccagccgaagttgcagtggtacatccacatcagcggctcgtcgcggaaggattcgttggtcacctcatcctcgaccgtgatcgacggctggccgtacacgctggtgatcttgcggcgcatcaccagattctcgccgaacagttcggcctcgcgcatttcgccggagacctcgagcacgtagtcgccttcggcggtccagtgggcgtcggagcccacatgctcggccggcgtggtgcggatgcggccgtgcatcgggaagctgccggccgggtacttgccgccctcaggcgtgacgtacggcgcgcagatgttctcgaagccgcaggtgaagaacaggccgcccatgatggagcgctgcgcctccagcccgttggtgtcgaactggttgcggccgttcaggcccggcttggacaggaaggtgaggttctcgccgcggtattcgaactggcagacgtcgagggcgcggtcggccatggatacgaagcgtagcgggccgttcttcacctcgatggccttgaggccgtgggcacggccctcctggtactcgatcgggcgcacgtaggcggcctgctgaaggctgcccatgtgggccaacatgtcggctcgcgtattgtgttctgtggatgtcatcgtcgtcaccgctccttgcaatcatcggcttgttgtccgtgtgcacatcatactgtaagcgttttccgcaattgtcgctatcaacaacgtatacgcatgtcgaaaagttggaccgaagaacaacgcaagcacaacgaaggctccccgaagggagccttccatcgtagcacacgttacgcgagaattcgtcgctcgcgctttacgcttccgcggcatcgtccttcagcgcacgcagcagggccttgttgcgggtttcgatgatgcgcttgccgtcctcgccctgccaagagaagaagccctgaccggtcttggcaccgaggttgccttccttgaccttttcggcgagcagcgggctcgggccggtgccgttgtccatgtcgtcgaacaggtaggtgctgatgttgtagaacacgtcgagtccgccgaggtcgatgctggcgatcgggccgaccaggttccagcggcggccgaggctgtacttcatcacgtcgtccacggtggccgcgtccgctataccctgctggacgatgtagaacgcctcgcgcaacacggccagctgcaggcggttgcccacaaagcccagcgattccttcttgatctttgccggcttcttgccgatcttggccatgaggtcgaaggtgatgtccaccaccttcggatcggtcttttcacccggcaccacttcgaccagcggcatcaactgcgcggggttccagaagtgcgccaccacgaagcgctcggggtgccccatcaccgactgcagcgcggtggggctcaggccggaggtgttcgtggacagaatcgcgtccttgggggcggcgtgctccacttcggcccagacggacttcttgatgtcaaggttctcggccacggattcgatgacgaagtccacgtccgccacgccgctcgcatagtcggcgtaaccggtgatgcgggccagcaccgtgtccacggtgtcgccggccttgagcagtccggcttcggcgaagtcctcggcatcagaacggatcgccttcatcgccttctccagcgaggcctcgctgcggccgaccagatgcaccggatatccggccagcgcgaactgcaacgtgatcgcatggcccattgttcccgtgccgacgttcgcaatcgtcttgatatcgtccgctgtctcaatcatggagaccccttctttccggcggttcgcctggcgttggcgtacgcaggaacagcaccgtgccgttatgcgtttgctcgcattctatgccgatttcgctacgtgaacatttactgaacatttcgcggattcgactagcacaaatccctatatcagcacaaaagcccgttgtctatttagaagtgcaacatccttgttgttcggttaatgatagcagttcgtcggcgaatgcctcggccggggtgcggtagccgagcacgcgcatgggacggttgtcggtctcgtccacgatggcctgtatctcgtcggccatggacgggtcgacgcgcgtgcgcttgggcaggtagcggcggatcgcgccgttgcagttctcgttgccgccgcgccggcacgacgggtacggggcggtgaagta

SEQ ID NO: 2282 - DNA, 4802 bp, Unknown
  R119_18m  MAG No. k141_12720
aagtctttatcaaacgcctcggctgctgtgatgaaccggtccagcagccgaggcgttcccatatatgccccagccgtgcccaaatccacctatccgattcgccgacttcgtacaactttcccgacaatgccattgctcaatggcgacgaaggatcgcagaacgcattggccattgcctcacggaacgcctgacggtcaaaatcaggcagattgacatgaaccagaccgctcatgatttcgtgattcggattccaaggcttcaatgcgttgatgtgcgagaacatatcaaccaacggcatccacgaagggttcggcgttgacggccaaagacgcccctttcatcacttgaaacacttccgatgccatgggcatggaacgtcggatcgcatccaccttgccgatggtcagcactccggcaagcgatggttgcggaccgtaggaaccgtccaccaccatcaacaacgcacggtcgaggtcatcgtcatctaacagcagcaatgtatcgccggaattggtgagacgaatcctgtcgcgcaaccgttcgcgcgcgacaggatcccagtcgtccaatcgtgattccgcgcggactgggcgctgtagtcgtagttgcgcaactgggataggcgactgacgaaccggctcgggaacagcggcaccacctcgggcgttccatccttcttcagacggcgctgtcccgccccctggatactggacacaatctgcaagttgcggtctacctcgatacacgccacaggcaacccgttgtccgcatggatgatttcagcacgcaccacgcgacctgcggcaccgtcttgctgaagaagataaacaccgccagcccgtcaacgctgcgatgttccctgctaacaccggttaccgtgccgttgtcttcgatgccaaggtacaacgacccgttttttcggtattggccaacgccaccacgttgtccacgagctcatcgtcaatctgaggtcgggatgcctcgcttgtaaactcaaccgtcaggctttcacggttcagcagcacaagtttactcacattgataccgttccataaccgttttcgatgtgaataagctcacggtcgcaacccacgataatcggacacggcatcaccgtaacggcgttataatgctgtttgtcggcgtcgacaagagccagcggcgccgatgaaaacaacaccaaagatgttcagcgaattgttcgcagtacatgtggtgtgcatccgtttcctcgacgaaactcctcttgttccaaccggcaggtcatcgtacgccagttgcgaaaggattcgcctatacatggcaaggtttaccaagaatcgttgggccagcgcaatcatccccgcactattgatccatatcccaatcggcaccgtctattgctggagcgtgttcaagcagttgatcgcggaccagcttcacgccagccccgcctccgtggaatggggcttctctctcgccatcttctttcttggcatgtccgctgcattcgccgggccgatggttgagaaaaacatcaagaaatctgctcttatctcaatggtctgctttgtggtcggtttcgccggtacgggcgtgagcatcgcattgggattcctgcccggcgtgttcatctgctacggcgcgatcatgggtgtcggtctgggcatcggctacctgaccccggtcaagaacctgatgctgtggttcgccgacaacaagggcctcgccaccggtatcgcagtcgccggtttcggcttggccaaagccattgccagtccggtgatggaatacctgatcggctcgatcggcctggtgaacatgttctatacgctcgccgtggtttacgcgataatgatgctcgtgggattcctgctcatacgccgccccgccggctgggtctatgatcccgcgacctcctatgtcagccgcgtctcgattcttaagaaacccgtgttctggggcatctggctcgccttctacatcaacatcacctgtggtctagctcttatcagccaagagaaagacatcctgcatgatgtgctgaaggcgttcccgcagtacgctccgctaagcccgagcgcgttcgcggccgccatttccggcattatcggtttggtgctcgccgtggattccgcgttcaacaccgccggccgcgtgggcctctccacgctgtccgatcacctcaagcgccgcgaaaccgtatatcaggtgattttcgtgatatcgatcgccgtatgcctgctgcaggtttgcactaacagtatcgaccgcgctttgttgtgggccgtgttgatgatgctgttcctcgtcaacgccggatacggcggcggcttctccaccctgccggtactgctcgatcagcacttcggcacgaaaaccgtatccaccacgcatgggctgaccttgagcgcctgggcattcgccggcttgtccggcaatcagctggcgtcgttcgtcgtcacgcacgcccccgatcaggcgcaccgttatgccgcgttgattccggtactcatcgtgctgttcataatcgcgctgatcagtatttcgctggtcaaggccgcaggcaagcgcgtcgccgtcgcctagcccccataggttcgtggttcctagttcgtgggattacagcggataatcccacgaactgggtgcctgcgccgtcgcatataaatatgcccggaatcaagccaaaacctgattccgggcatattcgtcatcgcgtggcattcggttcacagaatcaggcgacggaatcccgtgggccgaagcgtgctcacgcgcttatcaccgtttgtcacacgcttgtcacgcgccgatgagatcaagcatctgatgaatgctcttcttgccgaattcgacggtctgctcgccaccacggttgatgacgatgcagggcacgctcattgcgccgtattggtccttaagctcaggaaaatgcgaaacgtcgtaggcctcggcgcgcacggcagggtttagcgaggcgaggcgttgggaagcaagcacggtctccgggcacatcgtgcaggtgagcgagacgagaatcatgatattcagcgggcttgcaatggactttgcccgttcgatcagatcatcgcccaacggctgaccgggaccggccgcgttgtacaggcccagcacgaacgaattgaattcatggccggagggcacgccatggaaggcgaggccggtcggcttgccatccaccaccatgcgcacgcatggacgtgctgccggcaacacgtgttccacgtcgaataccgcacgccccgtatcatccttctcgtactcaccatcgaccactaccgatttcagcttgccatcggataacgcgaccatcgcatcaatgaatccccgcagttccgtggacagcggcgtatcatccagttccaaagcaagcgtgaccgggcgagacatacggttaaagaccacgttgagctgctgtttggtggtgtcggagaacaattcgccgggcttcctgacggcgtttgctgcgtcagcggcatcggtgctgcgtttgacgggtgccggtgcgggcgtggtgtcagccaacgaggcgacatctgtcttcgccgtggactgctcgtagacgcaagaggtcgggcgctgtggtatcaaaccggttttctcgctcatccgcttggcataccgttccaactccaccgcggcaatagcaccatcggcggtggcagtaacaacttgccgcaggtttttggcccgcagatcaccggccgcatacacgcccggcaccgatgtttcgagatagccgtgcgtgaccacgtaaccataatcgtccagttccaccacgccgcgcaccagattcgtggcgggcacatatcctgcgaacacgaacacgccgaacgtgccaccgtcagcaggtttccacgtttcggtctggccggtggcccggttcaggatcgtagcttcacgcaaaccgccttgaccggcagtgacgccttgcagctcaacttggtaacgcacgtcgattttcggattgtttttggctgcgtcggccaccgtggcgtcgcaggtgaaatcctgttcccgcacgagaacggtgactttggaggcgtatgctgtcaggaacacggattcctcggctgctgcgaaccctcctccgaccaccagtacttccttgccggtgaagaattcgccatcgcaggtagcacagtaggccacaccgcggccagcgtattcggattccccttcgaaccctagtttgcgtgggctggcgccggtggcgatgagaataccgaaagcctttaagtcgccgcgtgaggtatgcacggttttgacgtcgccatgcacgtcgaggccgatggcttcggcggaaaggaattcagcgccgaagtcctgcgcctgttgacgcatggtctgggtaagctcacggccagtggtgcggccgacacccggatagttgaccacctcattggtgatggtgatctgtccgccgaaatcgtctttctcgagaatcagcacgcgatatcgggcgcgggccagatacaatcccgccgtcagaccagcgggaccgccgccgacaactatgacatcatacaaatcatttcgagacataatgaatcccttcgcgccttaatctgtctgttcaaggggttgcccggaggttctccggacaacccgtcggattagattgacaatccgtccgtcaaataacgatcacagttggccaacaagatcgaggctaggttcgatggtgtcctcgcccggagtccagttggctgggcagacctgatcgccatgctcgtggacgaactgagaggcttgcacacgacgtagtagttcttcggcattgcgtcctacgttggag

SEQ ID NO: 2283 - DNA, 43507 bp, Unknown
  R119_18m  MAG No. k141_12926
acttgtctcgctcattatgatcgtggtaggccaccacgcgaccgttcacatgcacgccgagacggttggcgagcgcatagagacggcgggtgtcttcggctgcgacgatgtcggcgcgctccagcagtgcaatgaggcgtgtggacgcgtcggcagtattgccgatcggcgtggccgccagcacgaccgtgccttgcggaatgccgacgccgtccaccaacgcatcgagcgcaccggcggcggtaatccggccgccgtcatccgtcccgtccgtgaattcggttggctcctgtattgattgcgcttgtatgctctccatatcttccagtatctcctactgtgtatccaagggcatgtcttgcgggcgaaatgagacgactatgagtatacagacggtcaaggcgaatgcgcgatacgccgcacttcgacgacggcggcatcaacgtgatggctccgatgcgctcggcactcccgaaccacgttggaccgcccctaggcctttcgcatggttgatgacgattcttgtggccgctttcggcggaatcctgcgctttgtgagacttggctcccctcgcgcggtggtattcgacgaaacgtattacgtcaaagacgcgtgaaccatgctgaacaccggcgaggcgcgcgattggccgaaactggtgaccatcgacggcgtggatgtcgaaatcgaccgactgttcgcagccggcgacaccgaccgttggcttaatacggccgaatatgtggtgcatccgccggtcggcaagtggatgatcgcggccgggctgaaactgttcggcggcgccgacaatcccgccgcctggcgtgcgagcgttgccgttgccggtgtcgtcgccatcgcgctgatcacccgcgtggccttgtgcctgttccacaatctgccgatcgcgttgattgccggcctgctcgacaatttcatcatggtgttcgccttgggagcgttttcgctgatgttgatgcatcgcgattgggcccgtgcacggctgcgacggcaatatgcgattgatgcgacctcccgtacagcacgtttcaagacgggaaggcgcggcttgatactgcaacggcgtggaccgatgatcgccttgtcgtgataccgcgtagatgcggctttcctgcttggcatggcgaccggtgtgaagtggtcggtcacatatctgttcgctgtgttctgcgtgatctcgatgccgtgggatgcgtgggagcaccggcggatcggctaccgcgcatggttcacgaccggtttggtgaaggatgggctcgtggcggcttgctacatggtgccgatctacgcgctcacttatttgggcggatggctcaactggttcctgcatgccgactcgtatatgcacgattgggccacgaatcatcccggcgagggcgtgacctggcagccggaatcgttgcgttcctttgtggcctaccatgcgcagatgtggcgattccacaccacgcttgacgcgccacacgactacaagacgaatccgcttacctggccgttgcaggtaaggccgaccggcttttattgggagaagctgtctggacatccgggactgtgttcgttggcgccggattcgcaatgcgtggcagcgatcacatcgctcggcaatccgctgatctggtgggcggcacggtgacggcgatcatcatcgccatcgccggcctggtgcgcgggcgtattcgtggcggcaccccgcgaagatggtggctattggcgaatttgggcggttttggccggctttttgggcggttggctgccgtgggcgcagtatctgaatcgtgcgacgttcacgttctattcgattgtgattctgccgtggatcgtgcttgcaatctgttatgtgcttgagggccttatgttaatcatactggtttcggccttcttctacccgatctggacggcgataccggtgccttacgaattctggctgtcccatatgtggttcagatcatgaatctgaccacatatgggaccctacgcggcaagccgatcacctatacagaggcggaagggcgtcggcgagacgcatgaagtcgtgacggacgaatcgtctgaaatcgtcggcataccgcgaaccggcaacgggcgtgccgtatgttccggtgccggcggcattcggatcattgcgccacggcaagtaccacagtgcgcggcgggtgtatccgttggcgagcgcggcggtcagcagatacttcgtccatggcgaatccgacaacgctgaaccatcttcggccgcagcgtcatcattagcgccgatgatggtgagatcgtgggaatcgcagacgtacgagtcggcgaatattcccggagaaccgacttccgtggccgcggccagcttgccgcgctccttgccgaggcgaccgaccaatgcaagcatcgcaatcagatcggcatggcgggcctgcggatcctccgcgcttttctcggcgggcgcgatgtcccagtaatcgtcgaagccgagcacgtcgacatagtcatctccgggataggcatacagataaccggtctccaacgattccggcgtgctcatatcgatgcggctacggtcgggcgagtaggcgtagagcacattgtgcacatgcttgacgtcacgcaggtattcgatggtcatgcgccacagttcgacgaactgttcgggcgtggtgtcggtcgggcgcgcgggagaaccggtacaccaccagaaccagtcgccggtatgctcatggaacgggcggaagacgatgggaatcggttggccgttcgtgtccgtgatggtggtgagcgcggcggcaatgcggtcgagccagccgaggaacttctcatgcgcttcaccgccgagcagcaccgcttcgacggggtcctcggccacgttatggccgtaaccgccgagggcgagcgggttggcggaatgctagctgagcgtgttgacggcgcccatgttgaaggctcgaagcatttcgtttcggatggcttcggctccgaatccgtcgaggtggcggttccggtccagctccacgccgcccaagtcgttgccccacacagccgggtaggagccggtcaccgcatgcacatcggagtcggtatgctcgccaattacgttgctagcttcattctaatggcctaacatggcgaattcgcccgttgcgcggtgcaatgcgtcaaacagcgcgagtcttggcattgagatcgtcatccaccggctttgactttatgatggtgccgtcttcggccataccagcgctccttcgtgtcactccatgtcttttacccctactctaccggcgtccgcccgtgcctgcctccgccatgccggcgattcggattttcgcccctatgggattcggattcccctttcctacgattcggcttttcccagaacacacggaatgaggtcggaacgagcccacgcaacacggtcgaaccaattatttataaagttataaataacgtggtatccttatggggaaacgcaataaccaacgaacactgaccgtcgccgcacgcaacgccgccccacgtatacccacgcccgcagccagaagccgcaacgaagcagtctgaaaggattcccatgaagtacggccacttcgatgattccgcccgcgagtatgtaatcgaaactccggcaaccccgctgccatggatcaactacctcggcaacgagaacttcttctcactgatctccaataccggcggcggctactccttctacaaggacgccaaactgcgccgcatcacccgctaccgttacaacaacgtgcccggcgacaacggcgcgcgcaactactatctgagcctcatggactccaacgccgtcaacgccaagccgatcgacacgtggtcgccaaccttcctgccatgcaagacgccgctcgactcctataagtgccgtcagggcatcagctacaccgtgttcgaagccgccaagcacggcatcgaatccaagctcaccgcgttcgtgccgctgaagaccaatgccgaagtcaaccgtctcgacgtgaccaacaccaccgacgcaccggtcgtgctcgacgtgaccggttccgtggaatggtgcctgtggaacgcagtcgacgactcctccaacttccagcgcaacctgtccaccggcgaagtggagatcgagaagcaggatgacgccaccctgatctaccacaagaccgaattcaaggaacgtcgcaaccattatgcgttctttgccgtcaactcccccgtcgtcggcttcgacacgagccgtgacgagttcctcggcaagttcaatggttgggacactccgcaggtcatcgccgaaggccaggcccacgattccgtggcccacggctggttcccgatcgccgccgaccgcgtacacctcgagctcaagccgggcgagaccaagtcgctcgtattcgtgctgggctacatcgaagtcgccaaggaagacaagtgggagaatccgaacgatccggccaaggtaggcatcatcaacaagaagccggcgcatgagctgttccgccgcttcgccaccgtcgagcaggtagaggcagccctgaaggagctcaacacctactggaccgaactgctgaccacctacagcgtggaatccggcgacgagaagctcgaccgcatggtcaacatctggcaccagtaccagtgcatggtcaccttcaacatgtcccgttccgcctcctactacgagtccggcatgggccgcggcatgggcttccgcgattccaaccaggatctgctcggcttcgtgcacctgattccgggccgtgcgcgtcagcgcatcatcgacatcgcctccacccagatggaggatggttccgcgtggcaccagtatcagccgctcaccaagaagggcaatgccgacatcggcggtggcttcaacgatgatccgctgtggctcgtggccggcgtgaatgcgtacctcgccgagaccggcgacgcatcgatcctgaccgagcccgtgccgttcaacaacgtcgaaggctccgaagtgccgctgctcgagcacctgcgccgctccgtgaacttcaccatcacgcacaagggaccgcacggcatcccgctgatcggccgcgccgactggaacgactgcctgaacctcaactgcttctccgacactccgggcgagagcttccagaccgtggagaacaacgacaccggcgttgccgaatccgtgttcatcggtggcatgttcgtgctgtatggcggccagtatgccgacatcatcgaacattacggtcagctcaccggcatgaccgatgccgaaatcgccgccgaggcggccaatgtgcgtgccgaaatcggccagatctccgaagcggtcaaaaccgccggatgggacggcgaatggttcgtgcgcgcctacgacgcctattcgcgcaaggtcggcacgcacgaagacaccgagggtcagatctacatcgaaccgcagggcatgtgcgtgatggccggcatcggcctcgatgacggcaaggcccagcaggccctgaagtccgtgaaggacaagctgacctgcgattggggtaccgccatccttgccccggcctattccacctaccgcatcgagctgggcgagatctcgtcctatccgcgcggctataaggagaacggcggcatcttctgccataacaacccgtggatctccatcgccaatgcgctggccgacaacaacgaggaggccttcgcggtctaccagcgcaactgcccggcctacgtggaagacaagtccgacattcgcaaggtggagccgtacgtctactgccagatggtggccggcccggaggctccgaccccgggcgaaggcaagaactcctggctgaccggcaccgcagcctggacgttcgtgaacgtgtcccagtatctgctgggcgtgcgcccgacgcttgacggtctggccatcgagccgcatcttccggaacagttcaccgacctgaccgtgacccgtgtgttccgtggcgtaacctaccgcattgccatgaagcgcaccggcgagcgcacagtgagcgtcaatggcgagcagcttgcaggcaacgtcgtgccggtcccgaccaacgacaccaagttggtcgaggtggccgtcaccttctgatggccgaacggcagtcaagtagctgccaaacgactgaaacggggcgcatggacgacatcacgtcgcccatgcgcccccttatgaattgactttacgaataggatggatccatgcagtatttcgaacatgagatttccggcattgacggcaccgccgccaagttcgtcggatattgccttgacaacagcgaagaagtcatcccggattacgcgcgcccgtccgtgctggtgattcccggcggcggatacgagatgacgtccgaccgtgaggccgagccgattgcgatgcagtttcttgcaaccggctacaacgctttcgtcctgcgatattccgtgaaaccgtccgtctttccggttgcgctgttggaagcggccgaagcgatgaagcagattcgcgaacacgccgccgaatggcatgtcgacacgaacgccatcgccgtgatcggtttttccgcgggcggccatctcgccgcaaatctcgccacttccgccagtgacgatgtgatcgcggcgcacggctacgatccggatgcggtgcgtccgaacggcctgatgctcgcctacccggtgatcacgtccggcccgctcgcgcaccgcggcagctttgattcgctgctcggggaacgcaagaccgacccggaagcgctcgaatccgtgtccatcgagaagcatgtcgatgccaagacgccgccggtgttcgtgtggcataccgttcccgacgactgcgtaccgtatgagaacacgcttatgctcatcaacgcctgcaagcaggccggcgtcagtgtcgaggcgcacctgttccccagcggcggccatggcctgtcgctcggcaccgccgaaacggcgtggcagggtgtccacggcatcgaggaatgcgtgcaggtgtggccgcagttggctaccgcgtggatgcgtaggacgttcgccaaataggctcatagcgagcggcacagcgtgagggtcccggccaataggtcgggaccctcacgtttcaggtggcttttgcctcgaatgataccgggttatttctcgcggctcgcatactccttttcgattgcctgacgcgccttgaacatatccttggtgttcttcatatcgacgtcatagaccttcttgtaaccgagaccgtcaacctctttctgcatcttgctccagatggagttgaactcgtcatcgctcttggaaaacactgcctgccagcaggcgttcaccacggcggtcttcagctgtccacgggtggtagagatcacggagtcttcatccggagtggtgtacgaggcgcccggaatgaccgcgagtttgccactctgctccagatactccatggtcgtgcgcgcaccgcccatatgctcttgccaatctttgtcgagtgcggtatcacgcttggcgagttcggaatcccacatctgatagttgtacggcgcgttggttctcggatcgatgtccttgttgagcacggtggagacgttcaactgggatgcgccgtcggagtaaccgccaccgccgtattcctccggaacattgacgctttcgccgcccatggccttgacaccgaaatcggtaagtaccggtttgccgtccttgatgtcccaggtcagaccctttaacccggcagcgccattggtctgggaacccgcagcttggataccctcaggagagtaaagccaatcaatgaatttgaccagacgctccttgttcctggctttttctccgacgccgatgaacgtggtggtgccgttcggctgggcacccttggatgcgatcttcatgtcatcgatgctcagcatcatgaaacccttaccgtccttcttatggacgtccgtgttatgggccgcttggccgagccaaggccagaaggagaacaggatcttgccttccttgtacttggaatacatggtgtcgtagttctgcgtggtggattccggatcaaccaggcccatctgctcggccttgttatagaacttcagcgcacgcacgtaaacgccattctcgtcgatcagcgattgagcatccgtgccgtcggcattgctcatcacgtaaccggtcccttcggcatagccatagaacgccggaagctggaagccattctgcatggcctgatcatcccaatccttgaacagactcagcgcgtagacgtcatcgctgccggtctcttcgcgcgccttgtcctgcatctgcttgaggaccgggagcagatcctcaagcgtggcaaccttggggtagccgatctccttgtagtaatcccaacgtacgaacgggccgaaagtcggctcgacaccttcgctggactcggtcggagacaaggatgacaccgaggtcggaatgccccacataccgctctcctggttggcgtccttcgtcaactgatcgatggccccctgataagtcttgagatacttggtgtttttgatatacgaactcaggtcagtgacgagtttggacttgaccactttttcggcctgaccgctgccagagccgatgatcacaatgtcgcccagattgcccgcagccgcgcgggtatcgaacagggtgctgccgccgcctgcgacgttcggggccacaatattgagcttgatgttgaacttatccttgataaccttggcaaaccagcccttctgctcgccctgatagttcgccagttggtcgaacacctcgaccgtcatcagcgaattgtcatcggcatcgctcgcggtgtcaccgccgcaggccgccatcgtgcatgccatggcaagcacgccacacgccgcgacgagttttcttccgacactacgcatcttccctcaccttgtcctttcgtagctattgtcacgagcatgcaaacgtccacaatcatgacgattccgtcgtgaatcgcgcgtaaccgccacgaatgcgcgtatacaagcaaccctgcatttgctccgccctatggcttcctcaccatgccgtggacgtttacgttttcagggtacaaggccttatccttcattgtcgaatcgtttcgacgattttcgacaaaaagcatgcgggacattcgattgcgccgccttccttcacgggcagaggaatatcatacgcctttcgaaacgtcatgcaccgaacctcgactcaaatacttcaccgcaatcagttcctttgtcccttgctcggacatccgacgcttcccctcgatgatttccatcaacacatccaccgcacgggcacaggtggcacatggcctcagcggaatctcatcaagcggcggattcatcactgacgcctgaccgaaggcacccaactggatgacggagatatccttcggaatgtcatagccccgcgattgcaaggccgacttgagattcgacattgcgatcaatccaacttgcccgagcaccgcagttatccgtggatccgaagcaaaggccctttcaaccacacattccatctcatcagcgtcaccggtatcgatcacatcgcacgtcagccgcataccggccttctcagcgcagatccgcaccgaatcacgcgtacggatcagaaagttcacgccccgctcgtatgcatgggagttcgcgccgagaaacagtacatgacgatgcccggccttcatcagtttttgtaccgccatctcccccatctgctcgaaatccaaatccaccgcatagactccatccaaatcgtcagggcatccaatcgatgcgacgggcacccgggatgtcttcgccgcgcgggcacgcgggtcgctcatcgcaacatccaacagcagtactccatccaccaaaccggagtcggacatgcgcaccaactcctcatcctcatcctcacccatcagcaacaacacgtcatagccataatggcgcaggcgacgggccaccccgaaaaagaacggcgaccaatcgccatatgccgtctcgtcactcatcggagaactcagcgcgacgagccgcgttctttccccacgcagcatgcgggcaccggcattggggaaatagttcagctcgcgggcggcctgcatcaccttgatcttggtttcattccgcaccgaacgcttgccactcatcacatacgaaaccgtactgatggagacccccgcgcgcaccgcaacatctttgattcccgccatcaacaccccttatcacgagatggtcatcatccatgatgccgtaagcatactgtcctacaaaatttgtagtcttgtcttgcgtagattttcaagtatttcgacggatttcggatataatcaaaagaattgacgaatgcgtcatccggcaatcttcgcgccattttgcaaaggaggagggacaatgagcgttgcagcatggtctcagtttttggaagcccaatccggctccggcccggacacctccagcaccagcatcaccgcacgtgacaccacgtcaaaaaaaaccttcgaaaaacgcaagcgcatgagtcaggaagagcggcatctgcagattctgcaggccgcagccaagatcatcgccatcaaagggttctggggtatgtcgctgcaggatatctcagacgagctcggcatcaccgaagccgcactctaccactacatctcatcgaaagacgacctgctcaacatggtgctttccgaaggctatgacactccggatgcagatgaatacaatgccgtgaccgctgcggtaatcgacgatgacggacatcgcgtctactattatccccgatattgcctgaacatcgttcgctataacctgcagcgtccggaaatggtgcaactctattccgtactcaacggtgaggcgctcagcccggaacacccggcacacagcttcttcatcggccgccatatgcgcaactgggaaatgatctgctccatgaattggatactgccggaacacgtcgacgaggagcgcttctacgacctgtacacgcttgccatgagcgcgatggacggtctacagtaccgctggctgggcgacgattcaatgaacctgcttgagcagtggatttcgatttccgacatcatcttcccaccgagcgaatgggccggatacaccgatccgagcgaatacgcgagctccagcgcagattgcctgctgccgaagacgctttcggcacggcagtaggcaacctgcatattcgagctgttcacagtcaacttccatgtggggccaccggcccgatggccccacagcagtccggatggattccgcgcatatcagaacatgttgcatctcatatacgctacccactgaaaccgatacgggatgtcccgcaggaatcagtcctgtgggtaggaatcgtcgaagaagcggcgttccagatgcacgatagtgtggaatacctcggcttccggaccgtcgatggagcagtattcgttgaccagcgcgatgagatcgccgacccatttgcggaaatgcgcgccttcgtgcaggtcgacccatcccttgtgtgccgggacctgctgcacgaccccggcgtcgaccgtgcgcttggcccatgcgagatacagccattccatgcagcagatcgcggtgatcagttccggccagctcttatcggacagcgtatcgaggtacgcaccgtaatctctgttcgcctgggtctgttcggtgtcgtcatactcctgctggctgacgtggtagtcctcgaggaaatgctggaaatacgtggcctcgttgtccacgaaccatcgcgactgggcggcgagcatgtccttggtttcctgacgcggagccaacttgatgcgccgggtcatcatgccgttgttgtagaacttgaaatcctgaatcaaatatgatttcaatatctcttccggtagggcgtcatccaacagctcgttgacgaaacgcaagttgatggcttctcgccaatcctcggtattcagcatgtacatccggtcggcgacggagtccgactccgcgcccaaccaagcgtagtcgccgtgcgccagcattattacccggtatacgttcaaacggtcgaagcggatgcttcctctcagccttgcgaccccccgtgtctgtgcccgataatacacgggcatatgcgcccttatgccggaatttcagataccggccagcagaatccattgcgatcatgcgaacgggaatgatcagccttacgttgaaaaccgagatggcgccatccccgatacccccagtagggagcccaagaaaacggtaccacctcaaaatcaatccgcctctgtacacgctacggacgcatcacgccgcaacccaagaaaatcagtacagctccttgaagatcttgagcacgcgatcggcaaattcctgcagatcctgttcggtcacaccgtactcatgcagcgccttcttcggcaacagcttgttgataagcgtctccagctcgtcatacacataggccacgtcacagccgagaatgtcggcgatgaactggttcatcttaaggatctcgccttccggcttgatctccatatagttgcgtagcacgccggtgaacatggcgtagttggattcgccgtggggcacatgatattttttccgcccagctgatagttcagcgcatgcacggcagcgcacccgccggtatcgaagctgatacccgcatagtcggaggcgatcaggaagtcacgcatcagttcgttgcgcttgacgcggcgctccggcgaaccggcgggaccggcttcggcaacggccttgtagccggagatgatcatcttcatggcctcatagccgaacatgcgcgtgtatggcgtggagttcggcgaaagcgtggattccacggagtacacgagcacgaggcgtacggagcgcctgaagccgggcagatggtcgatcacgtcgtcgatggagataccgccggccaccgccacgaccttcacatatccatgacggcaccgccaccgactgccacgatgcggtcatagtcgaatttgcccgcatccgcgatgaattcgtcgatcatcacatcggtcggcgcctgcgcgccgtacttgtcgacaagaatcacgttcgcaccgttctcatacggttccaggaactacttgtagatcacttcgatgctgaccagcaggtccttcggtccgagttcgaacgatgcgaagaattccttgacagtatcgtaggtgtaggtattgtcgggtccaaccgtcaacagtttcatgatgcgtcctttccaaaacgttggctgcaaccgcgcccattccggcgattgcagccaactctatgtctgtttgcttgagggttcgttatcggcgatttcgctcgcccgcaacgattgcgtacttacttggcgctttcctcgacaatgatctccttgagtaccgccagcgcttcgttcagctcgtcatcggtgatgaccagcgacggcagcaagcggattacgttgccgttgatgccgcaggtcagcatgatcagaccttcttggatggtgcgcttggcgatgcggccgaccagctccttattcggctccatggtgcccggcttgacgaattcgacaccgatcatggcgccacggctacgtacttcggccaccgccggcacttcgtcgaccagcggaccgagtacggattcgacgatctcaccgatatgtgaggcctttgccggcagatcctgctcctccataatgccgattgcagcgagcgcggcggcacaggagaccgggttgccaccgtaggcgccgccgatgccgccaggctgcacggcgtccatgatttcggtgcgaccggtcacggccgcaatcggcatgccgccgccgaggcactcggcggcggtgatcaggtcaggaacgacgccgtcgtagttgtgtgggtgagcttagccacttcctcctgcacggccgcgacgacttccggcgcgcagttgccgacaccggtcacggcgatgccggaggcaaggtcgatgaagcggttgccatccacgtcggtgatggtggagccgcttgcggtctcggcgaataccggcatgccctggccgacgccggcgctgacatagcgggtatgttcggccttgagggcttcggacttcgggcccggaatggcggtgacgatcttgcgtgctacctgtgggactgacatgatggcttcctttcgatccgttcctcatcactgttggttgtcacgttagaaagtttgcccataatttgttatagacgagttgtcgaaaatatcgtcaagatatagacgaatccgttatgattcgctgtcggccggttaatctgaagccatggcgattaccgtacgcaatctgcttgagcaacgctccctcaacctacgactggctgtagaaggttccggcgcgacgctggactcccccatctcatgggtgcaggtatccgaatcagccgacccaaccacatatctggagggcggcgagctgttactgaccactggtctggtaatgccggatggcacgcccgacgcggctcatcgagaatatgcctcccgtcttgcggagattggcgcacgtggagtcggattcggtttaggcatccagcatgagcatgtgccgcaatggctcatctatcaatgcgaagcggtcggcctgcccttgtttacagtgccattggcgacaccgttcatcgccatctccaaaactatcgcgcgcggcatctccgatgatacgcatcgcaacgtggaacgaatgtaccgtaatcagcaacggctgctccgtagcgtgcattcgctcgatccggtgagcacgatcatctcgcgtctggccgaactgatcggcggctggaccgcactgctcaatccggcgggcggcatcatcgaatcttcccatcacacgttgccggtcgacatggactccttaagcgacgtgctcgcgttcagcgtgctcggcgaggcgaagttcacggtggcgaaaggctacgacattgcgatttttcatgtggcctctcccaaccgacagacactgggctatctggtcgcgggtcgtaaaggcgagcgcggcgccatcgaccatccgttggtggcggaagccgcttcactgttgtctttggccgtgaacagcgaagcggcatccaatcgtgcactcacgcacctgcgctccagcatgacccggctgtgcctggaaggcgaatcgcaatcggtgcgccgtttcgcggacgacgtatggaacgggctgccggtgcaaccgttggtcgtattgcgcattatcggacagcaggatgcgttggaagatgccggccgactgttcgagccgttccgacgtacggtggcgaagaacgacaatcgtgtggtgttcggcatcgtggacggcgatatgtgggcgatcgtgtcgcaatcgaatgcggcgatgtggacgcagcagtcgacccgtacgggtcgactgaccgtgggccaatcctcaggtgtgacctggatcgatatgcctcgtgcgcggcatgaggcatatcaggcgggcgcggaggcactgaccagcggcaaggcgctggtacagtacggcaacggcgagggcggtgcgacgctggaaggcgtggtggaaccgtcgctgatgcgtgcgttcgcggatctcaaactcgcgccgatcgcgaatctcacgttcgacctatcaaccggaccgcacaccaaggcgggaacggcacgaacgacggaagccgcaccggcaacgcaatcgtcaagcgacaaaacggattcaggcacgcaggtacgtgccatcgacgtgctgtgggcatggctgcaaagccgcggcaggaccgaagaggccgcgcggatggccggcatgcatcggcatacgctgaccaaatatctgggagtcatcggcaaggaactgggtgtcgatctgaacgatccgggcactaccgcggaactgtggtacgcatgccggttctcgcggtttggcggcacgctgaagtgacatccggagcataacggcgttgcacggcgacaatcagcgaatcggcacttcctccaagccatcgacttcggtttcgaaggcgtagtaggcgccgatcaggccggcgttgttggtgtgacggcagcgtttcacggacgtgcggaacgaatcccatgctggaatcttgtcaagtgccgcattgaccaacggcaacagctgctgctcacggcagacgcccccgcccaacagcacgcattcgggatcggcgactgcggtaatgttgaacacggcaatggcaagatagtcgatccattgatccacgattttgcgcacatgcggatcatccagcttgtggaacaacgtcgccggcacgatggacccggaaggcacgtccaattcctccgcatagctttcggccagcacaatggtggacagatagttttgcagggtctgaaaccctccgttttcataattcgggatcatcataccgagctcgccggcgcgccaatccttgccgcgtcgaatcttgccgtcaaggaacagggcgccgccgacgccggaatcgatggtgatcagcgcgaaatcatcgagcttgacggcgttgccactgagtttctccgccatcgcagcacaattcgcatcgttttccatccatgtcggcaccggatcatcgagatatttctgcaactctttgccgatttcatgcttatacagcatgccaagcgcgccagcggtgacggccagctgcctgtcgatatcgatgaatccgggcatgctcatggcgatgccgtcgagcgggaaacgttgattgttggcgatgtgcgcgagtgcccgatagaaggattccgcactgtccaccggcgtcgcgatagtgccggggatgcccatacggccgtcttcgaagaccacataacgggtgaagaacgtgccgatttcgaatgccaggatatgcttcttcgccgtcatttcgtcatctaacccgtctatattcgcccgatggtgcttcttcattgtagaactatccccgacactcgcgcacacccacctatagtttgatgacgttgacgccgtacggcctgagttcgatcgcatcgtcgatgcggccgcccgacagtagctcctcaccgccgttgagttcgctgacgcacaggcgcttgtcggtgttgctgttgttgatgaggaacgcatagcgtgtaccgtcatcggcgtagcgcaccgacagactcacgtcttccggggtgtcgaccgaccccaagcccagttcgctcacgattgatgccatgaaggcgttcatgccggtctcgtcgagcggagtgccgacgaagtaggccttgccggagccgaaatcgttgacggtgagcgcagaatggcctgcgtagaattcgctgccgccataggtggcgagccggcgtgcgccttcgcgatggatgatgctggccacgatctcgcccgtggcgtcgaccatgtcgccgtgcacttcgatggtttcgttcggtgcgagtgcgtcgatctcctcgacccatacgcccatgagcctgcggagcttgccaggatatccccccggcaccacgagatcatgctcgtcatgcagacccgccatatagccggtcacgaagctaccgccgtcggacacgtagttttccaacgtttcggcgacgcccggcagcacggtgatgagtgccggcgcgatgaccagatcgtatttcttgagctcatcgagcggcgtagtgctttcgatcatgtcgacgggcacgttgcggcgccacagagcacggtaaaaacgatgcacctcgtttggatacgagaagccggcagtcgggccgacgcagccttcaagcgaccaatagctctgccaatcgaacatgatggcgactttcgcgcgaatctcggaacccatgatccgcttgccgatgcgcgccagctcgtcgccgagcgccgcagtttccttgaacacgcgggaatcttcggtgccatcgtgcgcgatgaccgcgccatggaagcgttcgcagccaccgatggactgcttcatctggaagaactgcacggtgtcggcaccgtgcgccacggcctgccagctgagttttcgcacttcaccggggcgcttgaccttgcagaacgggaaccagttctgctggttcggagtctgctccatgagcatgaatggcttgttgccgccgatgccgcgcatgaggtcgtggcacatggcggtgaagctcgacggagtgtccatgcccgggtagttgtcccagctgaccacgtccatctccttggcccattcaaagtagtcgagatccttgaacgtgcccatgaggttggtggtgatcggcgtaacggcgtcgtattcacgaatcgcatcacgttcgttcttgtagcatgcgagctgcgcctggctttggaagcgacgatagtccatctgcaggccggagaccacgcatttggcgtcgccgatgccatcgccatagctgacgggtggcaccacgtcggcccattcggtgatggtgtggctccagaagttggcgcaccacgcctggttgagcgcttcgacggtgccatacttggccttgagccatgtgcggaaggattccgcacactggtcgcaatagcacaggccgccgcctccgccgtattcgttgcacacatgccagttcaccagacccggagtgccggtatagcgttcggccacatgtgcggcgagcgcgcgggacgcttcgcggaagtacggcgaggtcgggcagaagttgtgtcggcctccgaacacgtggcggatgccgttctgttcggtgcggattacttcaggatgcaggcgcaccatccagccgggcagggccgcggtgccggtggccatcacgatgttgaaatcatgcttgatgagcagcgcaacgatcttgtcgagcatggtgaagtcgtagcggtcctcggccggctgcagcagcgcccacgagaacacgttgatggtgacctcgttgatatgggcgtcttcgagcatttcgatgtcatgctcccaggtctcctccggccactgttccgggttccaatcgccgccgaacaggaagtggtcataaatcggcttcatctggttctccttcttcagactgaatcttgtatgtgttcacttggcaacagctgccgtcactcatcggcgacgccactgcctgcctgatagtgcacttcgttgaaatcgacgacgccgtcaccatgcgcatagacgccaagcaggattccggtgaatcctccggcgttggtgaagctcagcactttgccgggagcattgccgagcgtggtttcgtcggaagcggtgccgacggcgaaagtgtagccgtaatcgtcacctcggacgatcagtcgtaccggtccgcccgctggcacatgcacaccaccgacccgtgatatcagacccgcattgtgtacggtcgcatcgatcgcgacggtatcggcttcggcggcatgcactgcgatggtcatatagtggttggcattcgcgtaaatcgcgatgccggccgttccggagacaagttgcgtcggatcggcgatggtcgccgtgaatgcacaacggaaatcggtctgccgtgtgccgatcatcggcgctcccgcctccaaaccgaaatcctgccgcgcggccgtgacggtgatatgcgagcccgcatcgttcatcgtaaagcgatgcgccttgtcgatgctcggtgtgatccatgcgatctcatgctccagggcctcgccgcaaccgtcgagagggcaatcgtaggactggtcggcaagatcgggccaaccgtccttccacgtgaaccacactccatacggttcacggccaagccagccttgggcaggatactcgtcgttgttgcgcgtgccatggaacaccatcagggttcgatcggtgtcgaaatgggcgcaatcgcagtggccgatggcctgcagggtcaaatgtgtgctgcggttggtgatcagcggattgcccggatacatctcgtacggcccagtcggactggacgagcgggcgatgttctccatgtgcccggattccgtgccgccttcggcccacataagatagtatgtgctaccgcgcttgtacatgtgcgggccttccggattcgatccggtgatgcccccgcagatgcgctgacgtttggtcagcacggttcccgtggcgacatcgatgcgtgacagatagattcccgcgggttcgcgttcaccgtcgtcatccggctcggaaccttcgttgccgcagatgtagaccgaaccgtcgtcatcaaagaacagactgggatcgatgcccggccatccctccacccagatcggatcagaccatccgttatgcggatcgtcggtggtgaggatcatgttgccttcgttgacgttggtgacgatcagatagtatcggccgtcatggtaacgcaacgtcggcgcgtagatgccttggctgttacctatggattcataggggaactgggactctctgtccattgcgttgccgatacgtcgccaatgctcgccatcggcgctttcgaacacgggcagtcccggaaagaattcgaaggaactgttgaccatgtaatacgtaccctgaggggtttcgcagatggtcggatccggatggaaacctgacgcgatacgcttggcttcggttacgttgaaaagggtcattgcggggaactttcttcgttatgggttgtgttattgtgccaccgacatggtgcgcgcctcttggtagatggtttcgatctcgggatcgaagaaacgaccggtttcgcggttaaggaagcacatttccttggtggaggtgtcccataggatcgggcaggagccattgtccagcgcgcagcggatgacggtacgcagccacttgatgttgctgtcgtgatccttatggtcgacgggttcggtcagaagaccgtactcgccgatgatcacgggaatgtcgttgtcgatgaaacgtgccttctgtttggcgaagtcggcttcgaccgcggccacttcctcgtcgctgccccacacgtcgaccggcgtacaccagtcgctgtcatgttcggcgagcacgaattcggcgggcgagtagtagtggatcgacacgatcaggtgatcgtcgacagtatcttccggcagtcggaaacgtttgtcgcaggtcagtgcggtgtcggtgttgtaaccggggatcaggaggaatcggtcggcattgctgccgccggaagcgcgcacgatatcgacgaacagttgattcagccggttgagcagttcgtaggcggtgtcctgatgggcagcgtgcggaaagcagatctcattgccgccttcgaaaatcagatgatgatcgtagtcacggaatcgttccgcaatctgatgccatagtgcggagaagcgtgagcagacacccggatagtcctcgctggcggtacgaatccatccgaacgggccgttgccgccgtcgtgatgcacgtcgacgatcacgttcaatccggcctcgtaactccagtcgacggcttcctgcacggcagccatccataccggatcgacgttgccggtgtacgggtcctgccaatccttccacgtgacgggaatgcggatggtgtcgaaacccgcctccttgacgaagaaggcgcagtcgcgggtgaacggcttgttgaaccacagtcgctgctggtcttcgggcgtccacactcccccggtggtgattgtcttgttgcgttcgtcgttcagcggaaccgggtcgaaggggttgcccagattccaaccaagtccgaggccgcgcacaaactcaagtgccgtggtcattcgtattcctctctggtacggctgacgctctcgttgggtgcaagaccttggtgggtcttccacccgacgagagtcatatggattcggttatgttggctacttcaacgtcaccgtttcgccggcaatattgaagttgacgtcgagcgtttggccgtcttggaacgtgatcgtgaaggtcacgtcgccgtcggtcactgaaccgtcgtcgaagaaggccggcagcacggtcagcgtaccgcttgcacggtcggcggaatcgtagtgcacgctgaacgatccgctgttctgcaggtactgccaccagccggagttcggtccgacgcgattaccgttttcggtcgcggtgatgttcttcagctcggcaccgttgaagtccatcggaatcgtcagaccttcactcttggtgccggtcacggttccggtggcgttcacggccggagtaccggaatgcactacgtactcgtgccagtcggcacctgcggagaactgcagcgtcaggtcggcgatgatgcgtaaccacccttggcctcgtacatcttggctagatagccctgcttgagcgtgattgtggcgctggcttcatcgtaggtgtagtcggagccctcagtcagtccctcgatgcccttgaattcgttggcgttcaaggtcagcggcaacttgacgtcgccggtcggatcctcttcgagatacagggtgtccagtccggttgcataggaagaacggccgttgatgctcgcttcgagcaccttgccggcaagaggcttcttccactggtagctggtgcggtcgatgcccgaaccgttatcccagaacatataggagaagccgttctcgttggccattgcgcccatgtactcgtagtatttgagctcctcgcccgcctgtagcgcgccgtcggaggaagaatcataggccagcagaccgtattcgccgattaccagaccgatgccgttctcggtgaagtactgattcatgcggtcggcgaaggaatcgatgacgttgcgcggggtgcgctcgtcgccgtagatggattcgtcgaaaccggtgcgaccgagattggcgctgtacacccattcgctgtagtagtgcacggtggcgatgacgtttgcatcgttcttgagatccttgtggatgaagtcgaccgtcgcctgcagtttggcggtgtcgtcatgtgcggtgccgagtgtcggaattacgatcatgcgttgctcgttgcctgcggtggcgcggatgatgtcgtatgccgccttgctgacggcattgagcttggcttgcgcgtcgccatccgcgaactgcggttcgttgatggtctcgaaacatacggacagtggttcatcggcgaagtaggaggcgacctgtttccaatagtcactgaactcctggtattcggcggcggaggtgtcgccgttccagttcttcagccagatccaggaatcgtgatggatgttgatcatcacgtacaggccttcatccacggcccaatctacgacttccttgtatcgcttcagccaatccgcgttgatgacgtaacggtattcgccgtccttcgcatccttgttttcgctggaacgatggtagacggtcatcggaattcgaatgctcgtgtagcctttctccttgacggaatggatgagctcgcgggtcaccttcggattgccccaggcctcttcgcccttgtcttcggcactcagatcggtgttgacgccatcgaaggaattgcccagattccagccggcgcccatggccttggcatattcggtggaagacaacgtggcaacttgctcgtaggtaatagtcacgtcggaggcaagctgatattccttaccgttcacggtgatcgccgaggtgacgccttgggctgtggcggtgtgctgcgcagcggatgcctgccgttgcggaacggcatacatgcagcccgcaatcatggcgacggttcccagcacggcgatcgtacggcgcgcggcaagatggccgttctcccacttgaaggagatgccgacgccagcgagacccaccgcaatcagcgcgactgcgaataccgcggagctggtgctgccgaggatttcagcactctccttaacggccttcttgtcggttgttttgcgctgcgtatccgtcgatacggttgcggcggtgttgtctgtgatttgctcctcggttttgccggaagtggacccctccttgatgtggatgatcagagccttaccgtcctgttgcgcgactgcggatgcgccggatttcagtccgctcacctgccatgtgtagctggccgcggcaccatccgtgagaatctcttgcggcacggtggtaacgccggttgccttgatgatggtttcactgccgttgttggtgatggtcaactgatattcgccggcggaaacccgttcggcggtgatggctaccgcagcatcctgatcggcagccaaagcgggtgtcgtcatgccggtcattatgaggaacgcggcaaatatcgccgtgaccacggccagcagcgcgcccatgcaccgctggcggccgttcccttccatgacttgcggcacagcttcgtgcctcgtatgtaacaacactattttccctttctgataggtgccgaccggtcaccgcctacaattgccgaagcgcaggcacctttgatggccggttggtacactttcattggcaccgttgtgccaacgtgggttggattgcgaggagttcgtaggccacgcatccaacacaatgtgcaaagagcgtgcggacacaccttttgtccgcacgctcttgtcattcatttacggcatgcacggcgacagcgtgtgcgatcacacgtgcaacggatcggtgcccgggcgcgccagcaccggcagggtgtggtagtcgtactgctcggtgtaccacttgcccggctcgtaggcggtaccggtgatgatgttggtccaggcctggccggtgccgtcgtccggcacatagaagcgggccacaccatcctcgcggaataccggggcgaccagcaggtcatcgcccagcatgtactgggtgtcgatgtcttcgcaggtcgggtcgtccgggaattcgagcaccatggcacgcatcatcggaacaccggtctcgtgcgtctcctgagccatcttgagcaggtacggcttgagctgcagcttgagctcggtgaactcgcgggccacatcaacggcctcgtcaccgtacagccacggcaccttgtaggcggtggagccgtggtaacgggagtgggagctgagcagaccgaactgcgtccaacgcttgtacaggtccgggcttgcctggtcctcgaaaccggcgatatcgtggctccagtagccgaagccggacatgccgaagctcaggccggcacgcagggattccgccatggacgggtagttggaggagcagtcgccgccccagtgcaccgggaactgctggccgcccactgttgcggagcgtgcgaacagaatggcctcatcggcgcccttggtctcgacgagcacatcgtagacggccttgttgtacaggtaggtgtagtagttgtgcatgagctccggatcggaaccgtcataatacttgacgccctcggtcgggatgcgttcgccgaagtcggtcttgaagcaatcgacgcccatggccacgaggttcttcaggtagccctggtaccacttggtggcctccggattggtgaagtcgacgacggccatgccggcctgccacttgtcccactgccatacggagccgtcggcgttcttgatgaagtagccgttcctggcgccttcctcgaacagcggggacttctggccgatgtaggagttgatccacacgcagatcttcaggccacgctcatgcagcttcttgagcagaccttccggatccgggaacttggacttgtcccaatcgaagttgcaccattcgagttccttcatccaacggcagtcgaagtggaatacggacagcgggatgttgcgctcggccatgccgtcgacgaactcaagcacggtcttctcatcatagtcggtggtgaaggaggtggacagccacaggccgtagctccagtccggaaccagcggggccttgccggtcaggtcggtgtaggtgttgaggatcgccttgagatcctcaccgccgaccacggagtagctcatttcctcacccggcacggagaactgcacgcgggagaccttctcggagccgacttcgaagctgaccttgcccggattgtcgacgaacaggccgtacttcctgttggacaggtagaacgggatgttcttgtaggcctgctcggtgccggtgccgccatcctcattccagatgtcgacggtctggccgttcttgatgaagttggtgaagcgttcgccaaggccgtagatcttctcgcccacaccgaggtcgagctgttcggagacgtgcaactggccttccgggtcggtgacgaggcccttggcacgccagccggaatgcgcgatgaccttgccgtcgtacaggtacttgaagtcgatggtctcgcccttggcgatctcgagtgtcagacggccggaggtgaaggtccacttgtcgtcggtttcgtcgatttcgacatccggatcggtttcgttcaagccgaacttcgggcagttgctgcgatccttcttgaagttgatcagcttggtggtgatcacgtcttcgcgaggcgacgtcacctcgatggtcaggatgccgccgtcgagggtcatgccggcgttgtagatcggagaaccgaacgggcagaacagagtgagcttcttcggctcgatgttggcggcatagatgtttgccgcatacttgacgctgaagccatccttgacgagccagccgccgttgaggaacttcatacattgctcctttgcattagtgggattccgctttggaggatcggtcgcgacccatcctccaaaggcgttcgttatttcattttactttattaataagtttatagataagcgttatgcgacacgtccggagagacggatatcttccacggattctcccacgaacacgcttgcctccggcgccagagcgtaggctccggattcgttggaccagtaacgcaacgccttggcggcaggcatcgccacggtgacttcgcggaactcccctgcgttcagctcgaccttggcgaatcccttgagttccttggccgggcggtcctcgccggtgccttcaagaccgagatacacctgagcgaccgccttaccggcgcaatccccaatgttctcgacggtgaaggtgacgcggatctcgtcgtccacctgacgcacgtcaagatcgcggaatgcaaagtcggtgtagctcaggccgtgtccgaacgggaagagcaccggaacctgcctggtgtcgaagtaacggtagcccacatagatgtcttcctcatagtcgacgtgaccttcgagtccgaaggtgccgatcctgtgcgcaggttcgtcggccagcgcgatcgggaaggtctccggcagatggccgctcggatttacgcgaccgaacagcacctcggccagcgcggcgccggattcgcaacccgcataccagttccacacgatggccttggccttgtcggcccacggcatctcgatcggggagccggccacgaaagcgagaatcgtattcggagcggcttcgagcaacgcttcgatcaactcgtcctgaccgtacggcagacgcatgtcagtgcggtcgcgcccttcgagatcatgctcgtggtcaagaccgccgatgaacagcaccggatcaccggcagccgcgtattcgcgtgccttggccacagcctcttcgcgcagttcgtgtgcgtgcagctcgtccttggcgtcggaacccttggagttctcgaggctttcctcctgccaggactcgtcctggttcacctgcttggcgtcatagccgagcacatactcgatgtcgacgttgccgccgagttcgccgttgagccccagcagaggcgagatctcatgcagcgccttgatcacggccgaaccgccgccgttggagtgaatgcgatcggcgttcgcgccaatcaccagcagacgggtcatgccgtgctcgtcaagcggcaacaggttttcgtcattcttcaacagcacgatggattcgcgggcgatctccaatgccttcgcggcatggtcgatggtggcgtagcgtcccggctggcgggtcgcacgggcgtcgcccagcatgtgcaacgcatccatgacggcgatcacgcgttcgactttcacatcgacgtcgctttccttgacctcgccgttctcgacggctttcttcagcggattcgcgaaatagtaatcatcgaagttcggcgtcaccgacatctcaacgtccatgccgacctcggcactggccttggtgtcacgcaccgcgctccaatcggagacgacgaagccgtcgaaaccgtattcaccgcgcagaatgtcgtcaagcagctgcctgtgttcacagcatttgatgccgttgacgagattgtaggcgcccatgacggagagcacgccgccatcctgcaccgccgcctcgaaagccggcaggtagatctcgcgcaatgcccgctcgcttacggtctcgtcaacgtcaagccggtcggtctcctggctgttgaccgcatagtgcttcgcgcaagcggccacgtcggattcctgcacaccctgaatgtaggccacgccctgcgtggcggtcagtaccggatcctcgctcatgtactcgaaattgcgaccgcacagcgggctacgcttgatattgatggacggtccgagaatcacgtccttgccgcggccgcgcgcttcctcgccaagtacctcgccggtcgcgcgggccagatcgggattccatgtggaagcgacggcggaaccggacggcaggtaggtcacatagtcacgggtgttgtacagcggcgcccagttgtcgttatgcagctcggcccgcacgcccatcgggccgtcgtccatcttgagtgatgggatgcccagtcgttcggcgcagccattcctgaacaggccggcggcgtgcacgatggcgatcttttcgtccaacgtgagtttggcggtcaggtccctggccttggtcttgttggcttcggtgattacggtcatgtcttcttctttcctcgctcccgtcagcgggaggctggctgaaagcggtcgctacgttgttcttcttgtcaaccgacggttatcttgaatccgattggcaggccttgccgatcgggttcccttggcagtggggagatctccaaggcctcatcgccgcgtttgaagcgcaccggtcccgcccccagctgttccaccgattcgacgatgccattgaatggcggtttgacgccgtcgtgatatgcggcaaacgtcgacattgcaagtgtttcacaagatgtttcatgattatccgcgatatcgtcgggatgtaggcagaatgcgtagatcgctccgttcttcgtggtgaatcgccaatccgcggcggtccattcggtcggcttctgatcggcgaacatgccgtcggcctgcttcgtaggcccttcctgcgtgagcctccatggtcgggtgccgtagatgccttcaccgttcgcacgcaaccaatcgccgatgccgagcagcagctcacgatcatggtccgcgatcgaaccgtccgcgcgaggacctacgttcagcagcagattgccgttcttcgataccgcgtcgaccaacgcgacgatcagctcggcaagcgtcttgtactccagcgagttcgtgtagcaccacgaattacgggcgattgcggtatccgtctgccagacgaacggcgtagcatcggcaaaaccgccgcgttccacgtcgacgatgcccgcgccccaggcgagaccgtcgtacttatagcagatcgagacgttccgcccccactcgacgccacgattgtagtaaaaggcggccagcttcctcatgtacggcttgaacgactcgtgctgcacccaccaatcgaaatacagcagttccggccggtagtcgtcaatgatctcgcagacgcgcaacagccagtcctccagatattcggcggtcggcgtgggagtgccgtgaatgtcgaattcgttcggttcgggcatggccggccaatagaaatcgcccttccgcaacggctccttgatatcggagtcgaagtccttgccatggcccatgaaccaccagtgctcggcgcgatggttcgacgtggcaaaatgcagtccgtgggcgtgcgtggcgtcacgcaactcccccagcacgtcgcgatgcggaccggtttcgaaggtgttccagtgcgacaattcgctacggtacatctgatagccgtcatgatgctcggagaccgggaagtagtagcgcgcgcctgcggcggcgaacagatcgagccactcgttcgcatcgaaccgttcggcggtgaacatcggaatgaaatccttgtacccgaacctgttctgcgggccataggcgctcacgtggtgctcgaactccgggtagccctcgatgtacatgttgcgcgaataccactcattgcggtattcgggaacggtgtagagcccccaatgcgtgaagatgccgaatttggcgtcgttgaaccatgccggggtcggagcctggctcaacgactcccaggtgtcggcatagggaccggaggcgatgaccgcctcgacggtgctcagatcaatcatcgaacgtggtcctgttccaatcgaagcccacggcctgacaccatgcacgggcgatgatcatcgcaccgcgctcgtacggatgcacacgatcctggctggccaggcatccgtgcaactgggtgagccaatggtccacggccgcctgcgtatcgacgaaaatcgcgccatggcgttcggccacacgcttggacgcggccgcgaattcctcaaccttggcgcgcatggcatcctgtgggttcggctcgaacatgaacggacgcatgacgatgattcccttaagattcggcgcatcctgtttcacgcgttcaataagctcatcatagacacgctcgtaagtttccacggtgttgaggcgggcctgccacagcggaccgtcgaaataacgccaggcgtcattcacgccgatcatgatggacacatagtccggattcatgtcgatgacgtcactctgccagcgttcggacatgtcgacgatatcgttgccgttgatgccttcattgatggtgcacaatgccttatccggatatacggccgtaagaagattatgcaatgtgttgacatacccatgcccatagccccagcctccggggatagcagtacggtcgcggtcggcgtccgtgatggaatcgcctacgaaaacaatgcgtgagtgcttttcgataatcaactttgattcctttggtgtcatacggcgttgtaacagcgctcggttcatatgaacggtcggattgatgggttggcatgtaaagaaaggcggggcgccagataccggttcagcacatctggcgccccgcctctttcagttatttggattacgtggtggggactaacgcctcatcactcggaggaggaatcggagctggaggacttctccttgttctgatactccttcaggatgttcttacgggccttgtcctgatccttggcgttcttcatgtcgaccttcagcacggaatcgatgtccagaccgttgacggtcttgatcatctcgctgaagatcttctcgcattcggactcggagctggcgaaggacgccttccaagaggagttgacgatctcggtcttgatggaaccacgcaacgtggagatctgggagttctcctccggctggacatagctggagccagcaccgacgagcagcatatcgttgttctccaggtactccatggtggtggaggcacccatatgctcctgccaatccttgttcagcgggttctggttggccttctcgatctcgcttggccacatgaccgggttgtaggtgtaaccggtatccggatcaatgtcgttcacggtcacggtggtgaagttcagagcggaaataccgtcggagtaggagccgccgccccactcctccggcacgttcttggattcgccggaaagcaccgcggaaccgaattcggtcaggaccggcttgccgtccttgatctcccagttcagacccttcggaccagcggagccaccggtctggttggaggaggcatagacgccttccggagagtacagccagttgatgaacttgaccaggcgctgcttgttcttggccttggagcccagagcgatcatggtcttgtcgccacgaggagcggcgccgtatgagaagatcttcatgtccttgagcggagccagcatgaagcccttgccctcggccttgttggcgttggtgttgtaggctgcctgtccaagccacggccagaaggagaagagcaccttgccgttcttgtacttggagttcatggtgtcgtagttctgggtggtggattcaggatcgacgatgccggcacggttggcggcattgaagaacttgatcacgcgctcgtagatgccaccttccttggtgatggactcgaagtcagagccgtcacccttggccagcacgaagccgacttcgtcaaagccgtagaagcaggtcggctgcttggcgttgttcatcatgttgccgtcccagtccttgaacagagacatggcatagatgtcatcggagccggactcttcgcgagccttgtcctgcatctgcttgagtaccgggatgaggtcctcgagagtgtcgatctccggataaccgatttccttgtacagatcccaacgcaggtacgggccgaaggtcggttcgaggccttcggacggctggtcgggagtcagggtgtcgaccacggatgccggaacgccccacacaccggacttctgaccgatctgttcgttgacgtaatcggtggcatccttgtacttgttgatgtacttcatgcccttgaggtacggggtcatgtcctcgatcaggccggacttaaccagcttggcgcccttaccggtgtcatagccgtagatcacgatgtcgcccagattgcccgcagccgcgcgggtatcgaacagggtgctgccgccgcctgcgacgttcggggccacaatattgagtttgatgttgaacttatccttgatgatcttggcgaaccagcccttctgctcgccctggtagttcgccagaccgtcaaagacctcaacggtcatcagggagttatcatccttttcggcggccgtggtgctgccggaccctccgcaggcggagagcgacatcattgctgcaagcgtcactgccgcagcaatggttaccttctttttgagggacattgcgtccttcctttctctatttccttttattttgcagggatgggaactgagattgcggggccggtccgaccggcagatctcgccggcccacaatggctatagggagtaccgaaccgttacgaatcagcccttgacagcaccgagcatcatgcccttgacgaagaagcgctggaagaacggatagacgaacagaatcgggagcaccacgattacggaaaccgtcatacggatcgaggtaggcgtctgctgcgttgcgagagccgctacgttcatggcactacctgcactcgctcgcaccgaagcggccagtgcattcgcctggttgatgtaggtgtaaagcacgtactgcagggagtagagcttggaatccgtcatgtagatcagggtgtcctggaaggagttccactggccgacggcggagaagatgccgacggtcgccagaatcggggccatcatcggcaacacgatcttccagaagatcgtcagcgtgccggcaccgtccatttccgccgcttcctgcagggaggcggggatggactcgacgaaggtcttcaccaggatgatgttgaacggctgcacgatggccggcaggatgtagacccagaagttgttggtcagatggaggttcttcatggtgatgaacatcgggatcaggcctgcgttgaagtacatggtgatcacgatgaagcggtaccagaacttgcggtgccacatcttctcttgggtgaacatgaagccgaggaacgcgctggcgatcacggtgagcacggtaccgatgacggtacgagccacggagatgaaggccgaggtggtcagaccgctcagtgcgaagacctgcttgtagttctcccaatggatgccctgcggccaccagttgacctggcctgccgcggaggcgttgttgttggaaatcgagttgatgatcaggtagtagaacgggtagacgcagatgaatgcgaacacgaggaagaacaggatgttgaagacattgtagacttcctcacccttggtgcgcctcatagccggtgcgataccctgcttgattttctttgccatgattgcttccttactctttcctcatcagacgatcgatacgccacgggtacgcttggacagccagttcacaacaatcagcaggcctacgctgaccagcgacttcagcatggagattgcggttgcatacgacagggagttgttgcccataccgacgttgtacacgtacaggtcaaggacctggatgtgcttggtgttgaaggcgttctggaacacgaagtactgatccatgccgttgttcaggaagttggagatcgacagcatcaacagcacgaagtaggtcggcagcaactgcgggatcgtgacgtggatgatctgctggaagcggtttgcaccatccacctgggcggcttcgtacagttccgggtcgatgcctgcgatgccggcgaggtacatgatggagccccaaccaaggcccttccacaggccccacagcagcatcttcagccaagtgtgcgaatcggaatcgaggaatttaatcggctcgctgatgatgtgcaagttctgcagcatctcgttgagcatgccggtggtggagaacatggcgaaggccaccgcgtagaccagaacccaggagatgaagttcggcagcgtggtcagcgtctggataaggttcctgaaccacttggcacgaatctcgttcaatgcgatggcgaagaacaacgggaagaacgaggtgaggatgttcagaccggacatggcgaaggtgttgatgagcacctggccgatggtctgaagctgcgccgggttctgcaccatcatcttgaaccattgcagaccgacgaattcgctctgggacagcggaatcggcggctgataatcatagaatgcataaacccagccgaacagcgggaggtagctgaacagcacggacagaatcaaaaatggcgaaatcaacaggaacaacttaaatccatggcgcttcctgtcgctttgctgctgactcagcttctcggccttgcgcacagctcgccgtgtttttttatcggaaagcgtcatagcacctgaaccactgccatcagcagatgtcaccacactctccattccctcttgcgactgcatcattcctcctttggttcggcgatgcatccgatggccccttcaggaacgcaacacttccttgatgccgtcccatctggtaaccttcttatttattgcttaataaataagctgttaggagctatagtatattcgtcttactaacttgtcaattcagcgcgctcaacggcgagtatgcttggaatatcaacgaaaacggaggtccaatgcactacaatcccaatagccccgtatggcagttcgtctcgctctgcctgcggtatttcatcctcaacctgttcttcctgatctccatcatcccgatcgtaaccatcggaccggcccgagccgcactgtacagcaccgtgtttgccttcagcgacaatgacgacatcaacctcggccgcgaatacatccgacgcttcaaacgtgaattcaagcgcggcatcggctcctccatcatcttcgtggtgctgattgccgccatcgtgttcgccatcgtgttttggaacgcgctcgacaccaacgccgcctacataacgcttccgatcctcatcatcttcggtgtgctcacgttcctgaccttcgaatactactatccgcttcaggctcgctatgagaataccttccggcagacgctgcgcaactccttcatgatgccttgggcctgtttcggatacacgctcggcatcctcgccatcgacgtggccgcgggtgcgatcttcgcattcacgccatatctgcgattcctattcatcctgctcggcttcgcatggctggcctatgctaagtcactgctctatctgcgggcgttccagcgtgtcagcggcgacccaaacacgccgcgagaaaagcctgactactcgttgcccagcgcctccatccaataacccgtatctaacgcatcccccgagcacgcggaacgcgaccgcctgccctcttcacgattgtgtaaggccctcatcagcgagaaccgcaccgctgctcaacgaccaggacctcaaacacgcatgttagaggtcctgatttgcgaagaaccctgcggtactcgcagatcagggccccaaacacccggattaaactccgcaagctacgagtacaccccagtggcgtttcgatcctcgcccatccggttcggaaacgacggttccgaaccgggcagtcctacgacagcatcaccttgccttccgaagcggccacgacctccccgaatcccagacgtgcggtgaacgctcgtccgtccgagctggacacttcaacaccgtctgcagtcttacgagcgctgaacaccaccgacgatccgtctgtctccgtaaccaccgcttcagcggcgtcaccctgatcgaggaacactgacgccagcgcgtccttgccatactcgcaatccggcttctcggccccggcttggtaaccagcacactgccctcacgcacccacaacggaatggtatcgaagccatgccgctcattgcgccacacaccatgctcggaagccaccttctcgccggtgaaccagttggtccacacgccagcaggcaggtaatactccacatcaccggagtaggtgaacaccggagccaccaacaggttcggaccgaacatgtactggcggtccagcgtacggcaggtcggatcatccgggaattccacgaacatcgaacgcatgaccggagtgccgttcagatgcggctgcaggccggtctggaacagatacggcatgagcgaaagtttgagcttggcgaacgtgcgggccacatccacagctgccacgactggattccataagatccggcgcttcgtcggagttcaggaactggctaccgttctgggcgatctgcgtgaaggatttgcgttcgaacttgatttcaactccggtttccttttcaaaggcttccgcggcgcgacgccatgcctgggtctgaccggcgtcgtcttcctcgtagtaccagaacgacaggctatctggcgtttcctcgtcttgcgcggtgtcgctgccgcatgcagcgagagaggtcagcgccagtgctgcgatggccatcgtggccagtcctctttccatattcatttcttttctccttgttttccttctagaacgccttccttgcaacgctccaaaaaccgtgattgttgaaacgtttcgattacacctatgaagttatgccatgtgaatcacaccgaaaacttcgccgttttaccgcgaagccaccttcaaagtcctttcgccgggatttatctcggcaacggaaccgcgaaacttcactgcgggagcctcaagctcgacatcacccttgatcttgacgccttgctcaatcgccgagaccaaaagccccctggcctgcaagcataacttctctggcatgaccggcatctcggtaatcggacgcgacatcatcagttcgccgtcaaaatacgtgccgcatgacagcaccgaaacatcctccggcaccgatagccctgcgaccgacagttcctgcaatacccagttgagcacattggcgttagcctgattgattatcgccgtcggacgatcctcatcaacaaaggtctctcgcacaaagcgaatcacgtcgaaacggtcatcctcatatcgcgaggattcaacaaccgtcatgccgcgttccttcgcacgtgacagcatgctttcgcgaaaaatcacgacataaccggaacgacgctcataatcggcctcgttgttgcgcaggaacgcaaccttacagtggcctttgtcgaatagaaaatccaccgccttgcgcccggcctcggcgaaatcgatgtcgacgcaggcataaccctcatgcgcctgcgggtagctgatggctatgcagggtttggagaaatcgccggatgaggtcgcgcgctcgtcatcctgctcgacatcgagcagcaccacgccatcaaccaaattgctttgcgtcacacgacggatgtcgttcaccgcgtccagtccggtcagcagcaacacatcataaccggcattcctcgccgcccacgcggtatggaggaagtaggcgttgtatttggcctgattaatgtcgccacgaatcggcacacttaatgtgatgacctatgaacgtatgccacgcatcttgcgagcgctggcgtccggggtgtatccgagcttctccaccgccaccatgaccttgtcggacgtcttggcggaaatcgaacgtttgccggaaagcacatacgagacggtgctgacggacacccccgcttcacaggccacatccttgatgcctgccatcgtcatcgcctccttcggcttccctgcgttctcgacatcatctttcgcgtccttcaacgctgcaatgcgttgcatcgacgctagtcgtcactggcgaaacccctcgatctcactaatcgaatcgtttcgtcggaacgtttcaatagtcataccccccccccacagaaaatatatcaaacgtttcgacacgctgaaggcggcaccttcttgcgactacaagaccaccatctgcgagcagcaggcctctcctcgacagctacggccccaaaacgtcgatttagaggccgtagccatcgagtagtcgcaagatactcgcaacctacggacgcaaccacccgcatcagcaggcagattcgaacctgacgaacgggaaaaagaccccttcagcggacgagactcatgaatcaggccacagtcgccgacatacacggacggttcccacccggtgtttgctggcgtgacatctgccgaccaaacggatgccctccggtcgggttcgctggcagaagtcggacgaccgccaacgagtttccgatgcgcctgcagaccaccggaatcatgctgattgagcagagccatagccaccgtaaacattgacggtttgtgcagatttgccacccgtcgggcgctactaggcgctgcattagcggggcgctggtaggctgacattggttccgcaggcgtgcggaagttcaggccaaccgccacaggcagcctgaaccacgtaattttgaacgtatagatgtaaggtactcacagagagcattccatgggaattatcaacttcttcattaatctgctcaaggatccacgcaccgcaatcgccggctggatctccatgggcgtcgcccctacgcttggtttcatcttcctgatcgtgttcgttgaaactggcgtcgtgttcttcccgttcctgccgggcgactccctgctgttcgccgccggcttcttcgccgcgcccgacgcccagaccggcgtttccgcgctgccgctgttcgcgctgctgcccgtggtctggtgcgctccgatcatcggcgaccagtgcaactactggatcggccacttcttcggccgtcgcatcatcgaatccggcaaagtcaaggccatgacccccgaacgcctcgccaaaaccgaaggcatgatcgaaaagtggggcccgctcgccgtgttcctcggccgtttcttcccgttcatccgcacgttcatgccgttcatttccggcatttccggcatgcgttggagccgtttcaccccgttctccgtactcggcggcctgtgctggtccaccctgttcacgctactcggctacttcttcggcggcatcccggccgtacaaaagcatttcgagctggtcatcgttgcgattctcgtgctgtctctgattcctacgatcgtcggcctgctcaaggctaagttcggtaagaagaaagctgataccacagccgtagaagcctgatcttccgcttctctccttttcttggagaaaacggcgtccttcgatcattcggaagacgccgttttcgtatgcttttcacagaaatcatggcaacacgcgactatcggaaattgcattagtacagacctcgtactagaatcacgagagttgtcttaagacatggggccgtagctcagttggtagagcgcttcgttcgcatcgaagaggtcgcggtttcgactaccgtcggctccactaagcccgctgcattcattccaccgcagcgggctttttctttactcatgcaacccatacatgtcggtcaccaaccaaccaatcctcgccaaacacccccgaactcatatatctgccatatataagcgagataaggcgcaaatttaggcttgagacgtgcgctgacgtacgaatgcgtcaagcgaggccacgtcgatgccctcataccccttgatcgaagcgaactgcgggccgttggaattgtcgatctgcatgaatccggtctggccaatcgtcgtcgcaccggaagcgacagccgaacgcaaaccagacatggaatcttcgaccgcaatgcagtacttcatatcttccggcgcgacgcccaggcggcggccagcctccaagtacggggccggagaaggcttcttctcaacatcgtcgtcgccgcacacgtagcccgcgaacgcaccgtccggtgcctgcgcaaccagattctccgcaagatgacgcggcgacgtggtgaccagcatcgaaggaacacccgcatcacgcaacgcaacaagcacgtcctccacgccttcgatccacggaatgcgctcgaattccttctgagctacataatcgatcatgccttgaccgatctcctcgattgacagctggcaaccatgctccaccatacggcgagccacatccggaaccggcgtgcccgaaccctgccaggcaagctcctcatcccaatacccgccgtgcgcggctgcgattttcatctccccctcatgccagtacggttcggaatcgatcagagtaccgtccatatcccaaaacacagccttgatcatcaggttcgactcggtcatgatgttccttccttacgaccgtcggactcagagcaccggatttacgcgcggcgccgtccatcgcgatttccactgccatttcagcagagcggcaagacggcaaacgaaaagcgcccggacgttctttcatccgagcgcttcccacatcaacgcaataactcacgtctgcgaaataatccgtctcaagtactacaggcaacccccattgccgcaacccatgacattcgaaaaattcgcctctatcggaagattcgaaatctactctccctggttctccttgttttctccagcggcttccgcggccttttccgcattttccgccttccagcgggcaatgcaacgttccacgcgcttgtagccgatgatcttcggatcaagccctgcctcgcggaagatcgcggcaggcgagccaccttcggcatacctgcgcatgcagtcgtcgcgaaactccttggagtagcaaatacgatattgggtgaccgattccacggcatccagagacccgagatacttacgggtcttagcggtgaacgcaactcttggcactgtacgctcctaacctttcctgttcttgccgcatatcttacccccccccatgatttctcatggaaaaggagacccatctttcaccgaagcaccttaataaccggaagaatgacagttagaacgcggatactcaacatcatttcccacaacgatgacatcgtcgcagaaaacaacgcatttggcgaaattgtataacaaaacaggcacatctgttgcaagatatgcctgtttttaaatattttcagtattttttccgaaaatcagtcaattccccaaagcacgattgacctagaaacgggatctgaagcgggttggcccctctgaacaccctcgttttcgcgcgcgacacctctattgggcgtgttgtacgcgtcggccgcgacacgcgcggactccatggactcacgcgatggtagctgccgggtattgacctgaatctgcctgcgccacatgcgcgcacggcgggaacgttcgatctccacaatgtcgccgtccgcatcggctgcgaacacgctggagccggccggcttgcgcagacgctcgacctggcggcgcagctcgcggttctcctcctccagggaaagaatccgtgcgacaccggccagattgatgccctcttcctggctcagctgctgcgctttcgcaaggcgggcgatatctcgcagcgagtaacggcgggcaccgccatccgtgcgctgcggcaccacaagcccaagccgatcgtactggcgaagtgtttgagggtgcacgttggcgagttcgccggcacggcctaccgtgaatatcggcagttcgatgtcgaaaccaacttcgtctgccccatcaagatcggccctgccggccacaatcgccatcgcacacatgtcgtacagcattttggcctgccgcgccgcgcgggcttgggaggtccgagatgcgcgcgccatggcgatcagcgctccttggcaagttcgtcggcgaagtcgccgcactccttgtcgaattccttcgccgcatgcttgactttcaggcttggcctgtcggggatgcgaatctgcacgcgcccgaccaaatcgccgtcgccctgcctgttggccacgcctttgccggaaatacgcacttccgtgccgctggatgagcccgccggcactttgaaggtgacttcgttgccgtcgacgtctttcgcagtcactttcgcgcccgttacggcctggccgacggtaatcggcaaatccatgatgatgtcacgcttgcgcaggctgaatttcggatcttcggcaacgctgatctgcaggtacaaatcaccgtttttgccgccgttacggcccggcttgcccttgcctgaaatgcggatcttctgcccgtcatgcacgcctgccggaacatgcgttttgaacttcttgccatcggcagacagcgaaaccgtcgctcctttgaccgcctggcggaaggtcaagttgatcttggagttgcggtcctcgccgtcttccggttgcgcagcctgctcgtagccacccccgtaagggcttccggtggcagacccaccagcgctgccaccgaacatcgagaaaatatcgttgatattcgggttgccgccgccggtttggaagcggatgcgcgaaccattgccgcccgcgccatacgctccagccccagcgccaccgccgaacatcgatccgaagatgtcggagaaagcccccgcatcgaatccgcccgcaccggaaccgccggcgaagcgcgcgccacccatgccaaactggcggatggcgtcgtacttctggcggttgtctttgttgctgagcacgtcgtaagcttcggaaatgtctttgaacttctcctcggcctccttggtcttgttcagatcaggatggtacttacgtgccagcttgcggtacgccttggtgatctcatcgtccgtggcgtctttggagacaccgaggaccttgtagaaatccttgctcagccattcattctcagccatgatgtgcctcctttcacgaggtcgctgatgtcactgcgtgttgttttgcggttattggtatcgcaatcgcgaatgtcactgcgttcagttctgcggggaggccacgaccacgcgagccgcgcgaatcacgcggtcgccgatgcgatagccggcttccaccacggtgtcgacggtttccttctcggcctgcgaatccggcttgtgcaggatcgcgtcatgcttggtcgggtcgaaatcctcacctttttcgccgaacttctcgacgccgaacttttcgaacgccttgtcgattttgg

SEQ ID NO: 2284 - DNA, 12104 bp, Unknown
  R119_18m  MAG No. k141_13514
aaccggccccggcccgaacccgcacgggcaccgggacctccccgcatacccatgagacccacgcccgggaccattcccggccagccccgacggcgaggccgaacggcgcggcgcgtccgcgaccgtgggagcccgacgcccggcccccggtccgccgcgcagacagctcccctccagaggggagccagaaactggcttggttatggggtcgctctacactggcttctgctatgcattacttcacccctaaacgttgcgccacgtcgaataaaatcatgtaccacgataaggcgcaggctcagcgtgccgctgatcaaagcctgatcgagcgtggagccgagctatgggtgtaccgttgcgaatattgcggatgctggcacctcacacatcgcgatccacaatccagttaccggcatgtaccgctgaaccagcaactcaagccacacagtcgtaaaaagggctacaagccacgtagacgttagcgtcagaagctccacaggcctcgccaacgccgtatctgaggcaggttacggtccaaacacgccaggtcgtaggctgctaagcgttcagggcgctcggacacactccgtccaacactcacatcaccttggtgctttcaaggttgcggataacccaatcgttgaagcgaattaccggcttgcgcaacataagtcccaacagcaatgagggaacaaggaacagtgccagtttgcccatggaaacccagtattccatgccgaatgagcccgccatggccgaatgcatcgcatccaccgcataggggaacagtagccatttagaaacgacctggaagaacgtcggcagtgtttcaatggggaatgtgccgccggaaccggctacctgcataaccagcagtactacggcaatggctttgccgatatcaccgaacgatagggccagcgtatacacaatattcgagaacaccagtgcagacaaccacccgaccatcaaaaactgaatcggatgctcacactgcacgccgagatagaacatatcgcccaggcacaccagcgtaccttgcagcaaagcaaggaaaccgaaaatcatgtatcggccgaaatattcgtggtgcaagcgtaaaccgaactgccgcgcattgccggaagactcggcacgcggcttcttcagcacatccaacgcggcggccggtccggcaatccgcccggcaatcatggcctcgcgaagacccactcccgaaccgagcggcagatcattgcccaaccctaagatacgggccttctcatggtcggaaatcgatactttcaacatggcgaccagaatgatcgcaccgacccagatagacagaatcgtgtagaacggagccatcgcggaaccatagttggcaacgggatagagcgcgatgcggtcgaccgctacgggtgccgccagcatggaagcaatggcatcgggcttcgcagaggaaatcacagacaggtcgttggtgccgccactggtgatagaggcgagttgggaagacaagttgtcgagtttcttcgccgaacgggtcaaagcgctagctgcgtcagtcaaggccgactggatatccgtcaggctgtctgaaacgccgccagaaagacctgacacgctgctgacggtcgacgcaagcccgtcgattacggaacttgcctgcgtggccacttcgtccatggacgaggtcagattgttcagttgcggtttcagcgtgctcttgtacgtgtctgaagcctgagtaatcgattgtttggcggcggcgatttgtgatttcagatctcgacgcgctgtatcggcatcggcagtaccatttgctatgtgcgtggccgcatcgcccaacgcggtggcggcttgctgcatgctctgctgcgtctttgtggcttggtctgcagccgcgttcagttgagcggcaacggtatctccgcccacgggcagtgaagccgcttgtttggcgagatctcgtaaagcggcggcatactttccaaagctgtcggcctgagcctccactttggattgcatatcggtcagcttgtttgatatctgcgaggattgtgagcccacatcggcaaaagcggcatcgatctgcttggcaatggtgtcgtaggatgaaccggcctgctgcaatgccgtaccgacgccatcggtggctccggacaatgccttgtcgaggctggagacgccgttgcgggtctgtttcaacgcctttttggttgtggccgcagctgagcctgttgatcccagcagcttatcggtggaatcaatgatgctgttggcggccccgagcagattggcataggaatccatctgcgacgcagtgccggtcaaacgagacgacatggtggcaatatgactggaggcgttgttgacgtactgctccatttgcgggctttgcgcgtaatcggccacgttggaaaccaaatccagcgccacgctcgccaaggtcttcacaaatgtctggtcgatggtcgtggccacggtggtagcaccctggtcggtgatatgcggagcgatcggattgattttctcattgagatagtattcgagcttggcgtgcttgatcttcggtgaaaacagcgtcatcatatcggagctgaagctctttggaataatcagcgcggcatagtattcgcctgagttcacgccatcgatggccttagcacgatccacaaactgccagtcaaggtcatgattggccctgagcgtattggtcacggtttcgccgacgttgatggtgatcggcatcagatcggacttatagcccttatccacgtttgccacggcgaccttcaaggccttggtgttgccgtacgggtcccagctggcggcgatgttgtaccaggcgtacagtgccggcacaatcaccaatcccatagccacgattacggcgatcacattgcgggtggcttggcgcacgtcacgtacgaatattttccagataagcttcatcgtgcgcctccttgcccagactgcccagactgcccagactgaccggactgctcgaactgtgcggtgtgcgcagtcggctcggcggcctgatcgccgaacagtgtgagtcgttcagtggtttcgccgatatccggattgctgcccatcgccgcttcgtgacgtccgtggccgtggaaacgccgccacacatatccgttgagcatcacattgcggaactcgtcggcactcatggcactgacgccaagctgcatggcgtaggtttcgcgtgcgtattcaaccacaatgagataggcgtcgataagaataatcgacagaatccaggaggtcagcatggcgattttctcttgggtgatgaacagcagtaccaggaatacgaacgggagtacggtcagcaatgtcagaccggcaacgatcatctttgggtaccgcgcgaagaaccggtgcgcgcgatgagcgatgatatcgcgcagttccttgctgtcggacaccgtgcggaatacggagttcaagctcacctgttcgttcaccatgctgttgtgctcggtgatcatcaggtcggtatctcccaaacgatggtcgaacagcgcgttcaggttcatcgcataccggcgtacgacaagtcccacgaaaagcgccgccggcagataccagaacaggtgcagcatgtcgagccagtaatggttcgcgtacaggccggcgatcgggccgcgcatcgcgttgatgccgtaggtaaagggcagccatgggtgcagttcgcggaagaagttcggcatcatttcaatcggatacaggccggaggcaccgggtatctgcacaatgaccagaattacggcgatggctttgccgatatggcggaacgccacggccagcgcgtaaataatgttgatgtagacgaacgaacagaagattccggccaagatgaacagcagcggatgctcgcattggatgccgagcaccagatcgccaatggtggcgatgatggcttgcaggaatccgatggtgaccagcagcagccagcggccaagatatgcttgcgtagcggtgatacggcgaatgcctttgcggtcgacctcaagcttgtagatggcaatcagcacgaaaccgcctacccacagtgccagattcgtgtagaacggggtgactgcggacccgtaattgtcggtggcgtacacgactttcgtggtcagggtgacgggattgcccatgaactcgccgaatcccttgtcatccagatgcagcgtatcccggattttctggtaagcggcggaactatcgagcgtggcgatatcggtgcgtacggtggcgacatcgctggccgcctggcgcagcgaatcctgcgtgctgctgatggtggttttcgtttggttcagggtatcgacaagctggtcgaacagcccgtcggcctgatccaaggtgccggacaacgaagtcaacgtgccatccagcgtgccgttcagggcggcgaaactgttcaatgatgaggtgagcgacggcattacggtgccggtcagcgagccgcgcgcggtattcagcgccgcgatgccgccggtggtggtgttggtcatggctccggaaaggttcgtggtggcgtctttgccggagttgatgaactgtgtggtgtcggtatggaaggtgttgagctgtgtctgctgtttgctgatcaataagtcgagcgcatcgatttgtttccagatgttctggccgaccgggtcggtggtgtctttgccgatgccggctttggtcagcgcgtctttcagatcgctgattgacgtttgggtggcgttcagtggggccgaaagtgtgttggtgatggtgtcgacggagttctgcgcgctgttgaaggagccggtgatgctgccggcggcgttgttgacgtggacggccagtccggagagttgtgctgaactgctgtcgagcgcgccgaccagtgtggtggagaaggcttgtgacccggcctgtgtttccgccaacagtgtgccggactggcgggaggcattctgcgcggccgcgacggtctgcttgagtgaggcggtggtctgtttggcgtcggcgagaatcgtgtctgattgggccagcgtgtcctgtaagtcggtgagtgaatcctgaacggtgttcagcgtggacatcaccgtattgagatcatcgatcgtatcgtgctggactttgccagtggcttggccgagatcgtctccggtttcggaaatggccgaggcaacggtggtggctaccgtggtgacgaaggcggagttgatctgctcatcgatggtggtggcgccggtgtcggtgattttcggcgcgatcgcgttcttcttctcgttgacgtaatacttgattttcggctgtttggaggttccggtcaccgattcgaccaagctggcgctgaaatccttgggcagcacgatggctgcatagtatccgccggtctccacgccgtggacggcctgttcctcattgtctacgaagcgccagccgagttcgtcgttctgcttgagtttcttgacgacctgccggcccgcatcgagatggccgaccagatcgttggtggtgccttggtcttcattggctacggccacttgcagattgccggtggctgaatagggatcccagttggcgagaatgttgaaccatgcgtacagcgagggcagcattgctacgccgagcgtcaccacaacggcaacgggattgcgtaagatacgtctgcaatcgcgtagaaagacttgccaaaccgtccgcatccagtccctcttttccggttcgtagtcattgcggccacatgcagtctattcccaccactggtgcggatactgctggtttggcgggttttcttgcaaaactggccgttggttgtccgcataatgggactgatatgtgaacgtttgttgatggtgcgacaccggcgggatggttgtgcaattttgccggtatccggtgatgaaatgttgaggtgttggaactgagtcgtcgcagtgctgagaccgagacgactcagtgacgagcctatccgaggctatctcgttggttctggtctcactgatccagacggaagccctgagcggcggccttgtcgagcagtgtctgatggctgacatcctgccgactgatcgtggcgacctgatcgctgaaagcgtccaccggacggtcggcttggcgcagatcgtagtaccggtgaacttcctcgtcgaaggcgggcagctggtcgagtacgccatcggcgtcagccgggtaggtgttctcgaagaactgcatcgtgcgcggcatgcgcggcttgacggtcgggttctgatcgggcttgccgatggccagacccagcaccggatacgtgtattccggcagattcagcacgtcgataaggccggggatgttgttgagcagagagccgagaattacgcagcccagtcccagcgaataggcggcggtctccatggcgtgcagggccagcacggcgtcgttctgagcttgggtgaagcgatagctgtacttgagatggaattcgtcggaagcgggatcgatacccttgcgttcggcgatgcgtgcgttgcggtgctcgtcgatgacgaacacgtacagcaacggcgcggtggcgatatacggctgatggccgaattcggcgagcttggctttggtggccgggtcggtgatacggatggcggaccagtcgttaaggaactggctggacacggcatgttgggcgacggtttcgagcgtggcgcgggtatcgtcgtcgatggcctcgtccttgaacttacggatggagcggcggcccagaagagcctcgattgttgcgttggtaaccatggctttattgtcgcacggcagacgccggacgccacggtggattacctcacagtgaaatgccgatattgtgtggcggaactgtgctggactgatggttcctgtcgattgactgatggttccttgacgaaattccagcgatgagtcatcagtcagccaacagaaaccatcatccaaccgggggattagcggctgggcttgcgatggcggtggtcgacgaacgccttggagccccgatccgacagctgcgaaaccactgcgccgagtgcggccgaaacggcggcgaatgccagactcattgccagactttgcggcgcgtctgccgccagtcccttgcgcagattgcgtttgcttgtgcccttgtcccatatcatctggaatgctttgccggcaaccaagcctgccagcgctgggactgccgacttgatgagcttgtcgcccagagaatcagggtcgttgagccggtcctcgcgcagcctgttgaccttctcgtcgatgcggtgcaggctgtcgaccgcgcggtcggcgctggaggggaagtcggtgttcgtttcgtcgctcatgactctcagtctaatagcatctcaatcatctcagcgcaaaagatgggcgttaatggtggagtcatgaacgagcgcagactagagtggaggcatgagcgaacagaacgtgaacggcaccgttgccgtcgagaactctcgtggcggcaatggatttttggtgttgctgcgccacggccagaccgtgtggagcgaatccgggcagcataccgggcgcacggacatcccgttgaccgcggtcggcgagcagcaggcagcggatgccggaaggcgcctgcgcgaggccttccccgaaggattcagccagagctgtgtgttttccagtccgctgaagcgggcgtgccaaaccgctgaattggctggttttgcggaccacggtgtgttggacggcatcgctgaatgggattacggccgagccgaggggcgtacgcgccagcaggtgagtgaggccagcggttttgaatgggatgtgtggcgtgacgggccgcgctcgctgacgcccacgctggagggcgactgggtcgagaccttgccttcgggcgaacaggtgccggttcatgccgggccgggcgagacgctggaagaagcggcggcacgcgccaagagcgccatcgacgagattacgccgctgctgaaagacggccataatgtgctgttggtggctcatgcgcacatcctgcgcatcctcacctcgcaatggctgggcgtggacccgcatttcgcacggttgctgcgtttggatacggcgcactactcggtgctcagcgtctataagggagataacgtcatcgaacggtggaacgcctagccccggttgcgctgcgattgcgctggcctgcccgctactgcgggcgggcctttattgtttgtggcgggaattgcggtatgtcgataaatgatttgcaaacgatagcgtcggcgtgttgttttttgatgggtataagtggcaatcgattgccatgaaagatatgttagcgctctcatgattgcgaacgcttgcattgcgataatgaggcaaaaatgactgaattaatgggatatttgttgacaatggcctgaaaatgatgatttatgacgcgccgatattgctatcgtttgcaaaaagaagcaaaccgttgcacaatagtgcatgtcgatagtcgtaaaggtgcgtgctagcgtacctgtcccgaccggggacggccgggtcgacgatgaaagagaaaggttcgatgatgaatcgtacagtcaagtcagcagtcgcgatggcggctgtcgctgcgatgtccctcggcgctttggcggcctgcggaagctcgacctccggcgatgacgccaagggcaaggtctactacctgaatttcaagccggaagcggctgatcagtggaccgctctggccaaggaatacaccaaggaaaagggcgttgaggtcaaggtgcagaccgcggcctccggtacctacgagcagaccctgaagtccgaaatcgccaaaaccgaagccccgaccttgttccaggtcaacggcccggtcggctaccagaactggaagaagtacaccgccgatatgtccaatacggatgtgtacaaggagctcaccaaccaggatgtggccctgaaggatggcgacaaggtggtcggcgtgccgtacgtgatggaaacctacggcctgatctacaacaaggacatcctcaacaagtacttcgcgctggatggcgccaaggccacgtccatggacgaaatcgacaacttcgacaccctgaaggccgtggccgacgacatgcaggcccgcaaggacgagctcggcgtcaagggcgcgttcacctccgccggcttcgactccagctccgactggcgcttcaagacccacctggccaatctgccgctttactacgagttcaaggacgacaacgtcaccgagcagccggccaagatcaagggcacctacctgccgaactacaagaagatcttcgacctgtacatcaccgactccaccaccgaacccacccagctgagcgccaagaccggagatgatgcgaactccgagttcgcgctcggcgaggccgccttctaccagaacggcacctgggcctggaccgacctgcagaaggccggcatgaccgccgatcaggtaggcatgatgccgatctacatcggcgtcaagggcgaggagaagcagggtctgaccaccggttccgagaactactggtgcatcaatgacaaggcctccgacgccgacaagaaggccaccgaggacttcctcaagtgggtgatcacctctgataccggcaagaaggccctctctcaggacatgggcttcaccaccccgttcaagaccttcgatgacgtcaaaagcgacaacccgctgaccgaggccgccgtggaagaccaggagtccggcaagacccaggtttcttggaacttcaccatgatgccgtccgaggaatggaagaacaaggtcggccaggcgctgctcgagtacgcgcagggcaccggcaagtgggatgccgtcaagaccgccttcgtggacggttgggcttccgaatacgaggcctcgcactgagtctcatagagtcccatagccgataagcaacaatccgcggcgcccctgcctttccttctccaggggcgccgctttgtattgctgagtctcgcacaaaatcgtccgccgcagaaaagtgtgaggcacgcacccgctcaatcgcacgctgtggggccatgaatcggcgatttttcgccattctccacaatgtgcgattgagcgttattgtgcggttgcctcacactttttctatggtgggctttgttgtgtgagcctacttaacgcgggaggtggaggagcggaccttcagctgggccgggaacacgatgtagggttgctcaatcggcttttcgtcaatgagatcgagcgtcatgcgggctgccacgcgggccatttccaccggatcctggcggatggtggtcaggccgatatcgccggtgtagaaactatcgtcgtagccgaccagcgagacgtcgccgggcacggagaatccattgcgctccagctggaacataagcggcaaagcgatgccatcctcctggcatgcgatggcggtgggcatctcgtcttggctcatgagttggtcgaccacgtcgctgatttcataacgcccatcgtcatcgaccttgcagacgatgacctgcggctcgatgccttccctgcggcagcaggcggtgaatgagtcgaatcggctttgcacggagaagctcagcgacacctcgcgattggtgctgatgtaggtgatgcggcgatgtccgagattgataagatggcgggcggccagcgtggagccctgcacgtcgtcgatattgacggcggcggtaaagccgcgggcttcgggctcgactgaattgatgccgacgatcggcacgccgaccgaagccagttgcgcgatttcgttgttgtcgatatcgaaagacgccacaatcacggcatcggcgttacggcgtaccggcaacatctcgaagaattccttgcgctcctcgatgctggaaatctggaataccgaaatatcgtagccctgcgtgtgcagcacctcgttgagcccctcgatgaccgaggcggtgaaccacaggcggatatggccgctcatcagtactgcgatgcgcagggcgcggccggatttcagggccgcagccgagcgggagagtgagaaattgagtttgtcggcgatggcgagcacgcgctcgcgggtcttggccgacaccagatccggcctggtgaaggaacgtgagacggtggagatggagacgccggcctcgcgggcgacatcctgaatgctcgtagccattgcagcccccttgcgttgaatggaaaatcgcaatacacatgcacaactgactacagtgtacatgctgattgattgatttgcggcgatgacaacgattgtattacaaacgtttgcaaagtgtctatgacggcgtcagattggctttatatagccattatcttagttgaaagaagattgctggagctggagtatgctcgagattgaaacgctgaaaatgacaacgtttgacatataatgattcgacgtttactatgaacataggcttgaacgagaacaggccgtgcatgcggttctcgatcggcaggctcgcattgagttgaactccacagccggcgcacgatgcagtgtcgcaacgcagcggactcaaggaggaggaaaagtcatgatcagcatggctggcaaggcgatacgcagatggtgggcgctgttcgcgctccccacattcgccgcattcatcatcgggttcctggtgcccttcatcatgggcgtctacttaagcttttgcgaattcaccaccgttaccgacggtgaatgggtggggcttaagaacggttcttggcggatttttgtgcgttgaggggtgtggagggggctaccatcgttgttttttcctgctggcgtccatgatcttgaggaagaggtattcgtcgtcgggtagtccgtagtgtttgcgtctgagggtcttgatcatgttgttggttccctcgaccttgccgctggtgacgggatggagggcgtgcgcgcagatgccgtccatgtgggattcgagcaggcgggcgaaccaggcgaagtgcctgtcgccggttccatggcggatgccggccgcgtgttcgatcagttcgcgtatctgtcgggggtcgtggctctcgtaggccagggagagggtgtccttgacgaggtccgcggcgaacaggagctcgttcgaggcgacgagctcgcggtagcggacggcggattccgggccggcctgccatcggggtctgacctcgccgcagaagagcgagg

SEQ ID NO: 2285 - DNA, 20227 bp, Unknown
  R119_18m  MAG No. k141_14050
gcaatgcagtgagttcgtcatacgtacgcggcagtttgtcggcgtactgctcggccaccacgcgggcacattcctgcaagcgcaatgcacggcgtggatagccgagccgaccccatgcggtgatcacctcggccttgggggcctcggcgagtgagcgggcgtcaggccagcgttccatccagtcggtccagtacggcaccacacgactcatctgcgtctgctggctcatcacctcactgaccagcacgccccacggcgtggcccgtccgaagcgccatggcaagtcacgcgcattggcctcccaccatgctcccaatcgcaaagaaattgctgtgtcgttcatcgttcttattcttagcagctatgacgaacgaggcaaaacacaacccccagagcacaccgaatccagccaatcccgaaaccaaagtcgagaaaatgttcgaatacggctatcgcaagtcgaattacgggccggacgagctggtgaccgacgcacacggcaaccccatctccgtggtggacgcgatgctttccgccgagaaggccgccgccaccgaaaccgtgacgccgcacctgtgctattactcgccgcgtattcccggcaacaccggttcggccatccgcctgtgcgcagtgaccggcacgattctgcatctggtggagccgctgggcttcaacctgcgcgacaccaagctgcgccgtgcgggcctcgactaccatgacatggcccacgtggtgttgcacccgaatttcgacaatctggtggagtcgatgcccaattcgcgcatcatcgcgttcaccgcgcacgccaccaagctctacaccgaggtggaatacaagccgactgacatcctgctgttcggccccgagcccggcgacatccccgacccgatggacatcatggagggccctcatgtggccgaacaagtgcggctgcccatgcgcccgtccctgcgttccctgaacctcaccaactgcgcatccatcgccatctacgaagcctggcgccagctcaattttgcgggcggagcgtgaggagaaggcccggtgggccttcgagtagcgacgccgaacgaacgccgacaggcgcgagagcggaaacactgagcttcgcgcagtgatgaacgctgaatataaggctacctgcgtttcgaggggcggatttggcatccgccggaggtctactgccgcttcaaggggctgtcaaaggacgagaccccgagtatggccgttgaaatatcaatgcttgtactcggggtcttcatatataccagcccctcgaaacggaagtagacctccagaaaggtcggaatcagcccctcgaaacgggaatagacctccagaaaggtaattcgagctggtatctgccttcaaagaggtacattcgagcgtttgcagaatgctatctgccttcaaagaggtaccgcaatcgagaaaccccgggtatgagtgttgatatttcaacgctcatacccggggtttccgcatataggtacctctttgaaagcagatagctctccgcgaggggccaaatgtacctctctgaaagcagataccctaccgaatcaattcttgaagctgtgaatcggcgcagggattcggccgccacgggtcacgaaggcctcgcagctggtctggttcaccggaatgatcggcgcatagcccatcaggccgccgaagttggccatctcccctacgcctttgccttccaccggaatcacgcgcacggcggtggtcttctggttgaccatgccgatcgcggcctcgtcggcgatgatgccggaaatggtggctgcggtggtgtctcccggaatggcgatcatgtcgaggccgacggagcacacgcaggtcatggcctcaagcttttcgatcttcaggcagccattggttgccgcgtcgatcatgttcttgtcttcggagaccgggatgaacgcgccggacaagccacccacgtagctggaggccatgatgccgcccttcttgacctggtcgttgagcatggcgagcgccgcggtagtgcccggtgcgccaacctgttcgaggccgatcttctcaagcacttcgccgacggagtcgcccacggccggggtcggcgcgagggaaaggtcgatgatgccgaatggaatgccaaggcgacgggatgcctcctgtgccaccagctggccgacgcgcgtgatcttgaacgcggtgcgcttgatggtttcgcacaggaactcgaaatccttgcccttggcctcgtccaatgcacgggagaccacacccgggccggaaacgccgacattaatcaccgcgtcgccttcggtcacgccatggaagccgcctgccatgaacgggttgtcgtcaggcacgttgcagaaggccacgaacttgacgcagccgtaggagtcgttgtcggcggtgcgctcggcaacgtccttgatgatgtggccgagcagttcgaccgcgttcatgtcgatgccggtcttggtggaaccgacgttcacggacgagcagacgatgtcggtctcggaaagggcttgcggcagggagcggatgagcaactcctcggccggggtcatggacttggagacgagtgcggagtagccgccgatcaggtcgacgccgacctccttggccgccttgtcaagcgcgtgggcgatcttgacgaagtcctcgctcgtcttgcaggagctggcaccgaccagcgagatcggggtgacggtgatgcgcttgttgacgatcgggatgccgtagtcgcgttcgatggccttgccggtggaaacgaggtccttggcataggtagtgatcttgcggtagatgttgtcgcaggtcttgtcgacatcgtccgaggcgcagtcgagcaacgagatgcccatggtgatggtgcggacgtcgagcttctcctgctcgatcatctgattggtctcgtggacctccatgatgttcagcatggtttgttccttacaggatatttaaagactagtttggcggtcaccctcatcagagggataaggatggctccgtcagcggaaagcccaccgggctttccgcctcctcgcgtgcggcggcctgctgagcgggccgcctcaaatacggtgcatcttggtgaagatttcctcacgctggcagcggatgcgcacaccgatgtcgtcgccgaggtcctcaaggttgccgaccatcgcgccgaagtccttgtccgcgttggcgtagtcgacaatcatcatcatgttgaagtaaccgtcgatgatggtctgggaaatgtcaagcacgttgacgttgtgctgggacaggtaggtgcagacgcgtgcgatgatgccgacggtgtcctgaccgacgacggtgatgattgccttgttcatggctctccctggtcgtatacaaaaagcgggtgactacccaattatagggaagacacccgccattatgttcattaccgattcatgtatcgtttgccgcccttgaacatgaaggagaacaccagcacaacgcccgagttgacgccgatggtaaagaacagcgcgccggcgggcatggtggtggtgcgggataaaacgaagctccctcgtcagagggagcttgcaatggctcaggcctcgcgcaaagcgctcggcgctgcgcacgcggtcctgcaattacggacgacctacggccgacccagcattacctcggcctcgcctattggctcgacctcgaccgcatccgccggacaacccaccgggttgtcctaggcctcgcgcgaagcgctcggcgctgcgtacgcggccagggcgcgcggtgcgtggaagccttgattttcgaattcgtcggcgatcttctgagcgacttcctgagaacggcccttatcaaccagagcgatgatggagccgccgaagccgccgccggtcatacgcgcaccgtaggcgccgttcttgcgggccacgtccacggcgatgtccagctcggggacagtgacctcgtagtcggcggccagcgaatcgtgggaagcgttgaacagacggcccgcagccttgatgtcgccctgagcgaaggcacgcacgaaggaacgcacgcgctcgatttcggtgacgacgtggcgcacgcgcttcttcatggtctcgtcaggcagggcgtcaagcgtttccttgagggcctggaactggtcatcggccttggagatgccgtcggcggtcacacgcaggttggccacaccgagaatcttggcggcttcctcgcaggtggcgcgacgctgagcgtactggccatcgttgagctggtgcggagcctgggtatcgaccacaagcagctcgaggttgtacttgtcgaggtcgaactcctgctgggagacgttctccagcggggtcagctccgagcggcagtcaagcagcagcgcgtggccttcggtgcaacgcatggaagcgttctggtcaagaccgccggtggaggcgccggccatctcgttctcggacttgatggcggcgttgatgagggtcacacggccggcgtcggaatcgccgtagccaaggccgtacacgtcgtccagagccagagcggtggagcaggtcatggcggcggaggagctcaggccggagcccagcggcacgcaggagacgaaggcggcgtcaaagcccttgaccttgtcgaaaccagcctgacgcagcgcccaggccacaccggtcgggtaggcggaccagccgtccacgccacgggccttgaggccatcgagatcagtttcagcgaccttgtcgggagccacgtcggagacgacgcgaaccttggtgtcttcgcgcggcttcagggcgatgaaagtgcggtgcggcagagcgatcggcaggcacaggccggcgttgtaatcggtgtgctcaccgatcaggttcacacggcccggagcagcccacacgccctcgggcgcagcgccgtaggtatcgacgaacagcttggtggcttgcgagacgccttcctcatgggtcagcggctcaatgaattcaacagcagtcattgatgttttctttctatcagtcggcgatatcgatggagccgagctcgtggaagcgcttggcgatgagttccggcgtggtgtcggagatccaggcggccatgccggattcggagccggcgaggtacttgatcttgttggcggcacgacggaaggagaagaactgcaggttcaggcggtagttctcgcggcgggcgtcgtggatcggggcctggtgccaggcggcgatgtacggcagatccatgcccttgccgtcgcccttgtcgaagaaggcgttgccgcgcttcaggaggtgcgagtacatggaggcaaggtcccaacgctcttcgtcgttgagctggtcgagggtgagcacgtcacgcaccggagccacgtggacctcgaggggccaacgggcggcggccggcacgtaggcgacccagctgtggttgcgcatcacgatgcgttcgccggcttcgagctcggcgttcatgatgtccttaagcaggttgccgccggtcttctcgtggtaggcctcggtgtgctggagttccttctccatcttcggggcgatgaacgggtagcagtagacctggccgtgcgggtgggcgagggagacgccgatttcctggccgtggttctcgaacgggaagatctgctcgatgccttccatcttggagatttcggcggtacggaaggcccaagcctcaaccacggtgcgcaggcgggagaccggcagatcggccggcaggccatcctcgttcgggtcgaagcagatgacctcgcagcggccggcggcgagcttcttctcccacagcgggttgccgtcaacgtaggtcacgtcctcggagacgccgggcacgcgcaccatggaggggaagcggttctcgaacacgacgacgttgtagtcggtgtccggcacttcgccgtcctggtacgggtcaccgggcttgcgggcggccagcgggttgcccttggcggtagcgccggggccggcggtgatcgggcggttcatacgggcggtggccatcgggatccagtcgccggtcagcgggtcgcggcgcatctgcggggcggcgtacggcacttcgttgccgtcggcgtccaggtgcggggcgaaacggtagtccagcgggcgcgggtccttgagctcgcgggtcttggcaccggagacgaactcggggtcgtcgtccaggtagaagaagtcacgaccgtcggcaagcgtcgtcggcgtgatgcggatgtgctccttcgcatactccccgggggtgtagttggcgaaatcagccatgggtttactcactttcctcaatgatctcgctctggtgggccagcacgagttcctttaccaaatccttggttttggcggcggagtcgggatcgagcccgtcgtcagtaatgaccgtgtccacctggtcgaagcgcgcaaacagcgacagcgatgtgcagctccacttggtgtgatcggtcaaaactatggtacgatcggcgatgtccatcatcgccatatcggttgcggcttccagcgaattcggcatcaggaagccacggggaatcgacaccgagtgggtgccgaggaatacggtgttgacacgcagcgaggcgacgaccttgtccgcgatcggaccgacaagcgagttcgatcgggtgatcacgccgccggtgacgatcacctccacgtccttggattcgagggcctggaccagttcggccacgggaatcgaattggtgaggatggtgatgccgctggactgctgcgattcgagcagatgctgggcgaagacataggccgtggtgccgccgccgatggcgatcacatcgccgggagccacatatttgatggcttcctgggcgatggcgtccttcaggccgagatccatctgggacttgacagagaacaggggttcgctgagcaaggtactggtagtcaccgcgccgccatggacgcgtttcagcagtcccttgtcggcaagttcggcgatatcgcggcggatggtcatcgctgacacacccagttccttcgatagcgccgtaatgcgcactgccccgcgcgtgcgcaacctgctcaagatgaggtgctgacgttgtgacgaaatcatgtgaacattatcgcacacaaaagctcacaaaccaaaccggcttgagcgttttggggacaatctctcgaaaattccgggcaattcaggtgttcatttccacaaaaccgcgcaaaatcgcacattgtgcgaaccgatattctcgcagcgaccactagcgcgatgactcacgaccgacgactctcccgagcgcgttgctcagcggcgagtcacgcctgatacctggtgcatcccgattcatgtatcttctgccgagccgacgcctgcgtgcgcctcgacacgcggtagccccttccccaattcgcctaggcaggaatcgcctagccgcaccagcccaagcgtgagacaataggcggtatgacttacgtttctgaaagcttctggcacgacgccgtcaacaaagccaccaccgatctgttcaccttcggctacaagcacatcatcaaaccgaacttcgtgttcaaccaccgccccgatgaggcacacgatcagatgatcgagttctgccacgtcgtcaagaacgtcccgccgctgctgctcgccgagcagctgatgctcgactacaccgaccccattctggaaacgaatgtgatgggcgtcgatttcaccaacccgttcggcctgtccgccggcctcgacaagaactgcgacatgcccgtggtgctggaccatgccggcttcggttttgaaaccgtaggctccaccacctcgcgtccctgcccgggcaacgccaagccgtggttccaccgtctgcctgaatacgattcgatgatggtgcacgtcggcctcgccaacatcggttcggacaaggtcatcgagcgcgccgagaaggcttggactcaggcccgccagatgcagctgtccgtgtcgatcgcccgcaccaacgacgaccagtgcggcgatttggacgaaggcattgaggattactgcatttcgatgcgccgcgccgccggccgcaccgcgatggtggaggtcaacgtctcctgcccgaacacgcacgtcggcgaaccgttcaccgcgactccggaagcgctcgaccgtctgtttacggcgctcgacaagatcgaccgcccgcagcccacgctggtcaagatgccgttgaacaagccgtggggcgagtacaaggagctgctcgatgtgctggccgagcacaatgtgcaggggctgtccatcgccaatctgcagaaggaccgcaccggcctcgagattccgcgcgattgggagggcggcctgtccggcggcccgtgcaccaacgccagcaccgagctgattcgcaaggtgtataaggagtatggcgaccggttcgccatcgccggcatcggtggcgtctttacccccgagcaagcctatgcgaagattcgttccggctccagcctggtcatgttcatcagctcgctgatgtaccgaggcccgcagcagatcaccgtgttgaagcgcggtctggcccagctgctgcgccgcgacggattcgagcacgtctccgacgccgtcggcgtggacgtggagtgaactcacatattgccctattacccatggggcgggaaaaccctcatggggcggtgattgtcccatggggcggttagccaaatttcacattccgcagaataccgccgttttgggttaccgccccatgagggttttaccgccccatgagggttttaccgccccatgggaaagtcaccgccccatgaggattcagtacgcaccggccacgtattgcggggcgtagggggcctctgtggacggtatgcccagcttgttggccgcacgcaacggccagtacggatcgcgcaatgcggcgcggccaatttccacggcatcggcttcgccacgggccaaaatcttggccgcctgcttcggcttggtgataagacccaccgcggtcaccggaatatcggccttggacttgacctgctcggcgaacggcacctgatagttcggcttgaccggaatcgacactcccgacatgatgccgccagtggacacgtccatcacatcgacgccatgctccttcagcaccttggatagtgcaatggtctgatccaaatcccaaccgccagcggcccaatccgtggccgaaatgcgcaccagaaccggcacgccctcggggacggccccgcgcacggcatccacaacctcgaccaggaaacgagagcgaccggtcaaatcgccaccatattcgtcatcacgctcattgctcagcgggtcaaggaactgagaaatcagatagccatgcgcagcatgaatctgaatagcctggaagccggcggccaccgcacggcccgccgccgcggcgaacgcaccgaccagaccatgaatctcatccacggacagcgcgcgcggcgtacgcaacccgccgaacgcgatttcagacggtgccatggtgggccagccgcccgcctcctccggcacactctgaccgtcgtaaccaacggcgaagcaaccggtcgaagccttacgccccgcatggttgagctggatggcaggcaccgcacccgcctcgcgaataccgtccacgatccagcgccaagcatcaatctgcccgtcttcccacaggcccagatcgcacggcgtgatacgcccttcaggagccacggcggtggattcgacgatcaccatgccgaatccgccgaacgcacgagacacgtaatgctggtagtggaacggcgtgggcctaccatcgcaggcgaacgacgaacacgtgcacatcggcggcaaccaaatacgattacgcacggtcacttcgcgcagcgtcattggcgcaaacagtcccggacggtccttgctggctttcttatctgccttgctcacagcttccctttcctcataatcctcataatcatcgaacgattcgctcgtcttgcccgcgccggcccgcttcttggaccgtgcgtcggattttgacttcttcttaccgtgcctacggttcctcgatgcatcctcgtgcttggtcttcggctgcttggactgttcgccgtccgaagacgaagccagcgtcaccgctttgagatccggcacgtcgaatccacgaaaatcaaaattctcatgcgtcagatcgtcgtcgctcatcgttcccctttccaatgcgcgttcatggcgaatattcgatgaacgcgctggcgttgtcattaagtattgtaaaacgggcgtcacctgaaacaggtaacgcccgcaaactacgtaatttgggtatcgcagtcgactatgttacgtagactcagccggcctgcaatcaccaaatgtcaaacgccaatcaccaatcactggccatcattcgaccgctctgaattggtgccctgggtttgggtgttgttttgcccagtgttctgcgactgagactgcgactgggattgaccattggtggtcgtctgcgattggctgttgccattcgtagtggtctgcggcacgctgaacgttcgtccgccaatgcccaggtacttgccagtcgtggtgtacttcgagacgggctggccgtaatcgttgtcaatcggtattttcttcttggaaatgtagctattgaagaagttggtaacggccggagctgcgattgtcgaaccatcccaatagctgttgtaccggccgttgatggcaatgttggaaatacggttggtgtacgggttctgtgcatcgccgaccacagcgaacgccgcaatctgattaggaatgaacgatccaccggacaccgcaagatcctcactggtaccggtcttaccaaacgacttacgcccgtcagccaatctgaatgaccaaccggcaccatccggccgcaccgtaccttggttcagggtataagcgagtgtttggatgatgtccttatccaccgcctgatggcagttcgcggatggaaccttgagatcgttgccgtccttatcggtcaccttgctgatggcaatcgggttgcattgcacaccattcgaggcgtatacggcgaagatgctcgccatggtcagcggggacacattcaccgagccgatcatcatggatggtgtatacacctgggttttgtcgatggtctcacccgtggcggcgtcatggtatcccagtttggtcgcggtgtccgccaccttgcacagtttgaggatggcgcccatggaggcctgggtggtgttgtgcgatcgcaccagaccgaggaacgggctttccgggttcaccgtgccggcgcccatggcgttcgacacgttccacgaatcggcaccgcccttgtagttgttgcaggcgaagtcggtcgtggggtacgtcgtggtggtctgtaggttgtcgttgatcgaatgaccagcctccatccacgcaatcaggttgatcggcttccaagacgaaccaatggtccaaccggagccgccgccgtccaccagatcgacggcatagttctggcccgacttggtcggatcgttcgcggctgccggagtggcgtcatagtaacgattcaggccaaagctcagcacctcgccggttcccggtttgactgcggccatggctatttccatgccgctgggatcgtccggtggaatggtattacgcgcggtctccatcatcgtggaattcgcttccacatccaacgtggtgacgatcttcaggccaccctcctgcagcagcttgttacgctccgcacgagtcttgccgaattcttcggagttctggatgcgatgcaccacgaaatcacagaagtatgcgtagtcgccggtgtcctggcagccgacgttcacggcctgcaccttcagcgtgtccttcagcggcgtgttcacggcttcggtgtactgcttctgggtgatgtacccctcctgcagcatcagcttgagcacgatgttgcgctggttctcgctttccttctggttctcctcgaccagcggatcgtactggctcgggttcttggtgatagccgcgatggtggcggactgcaccacgttcaaatcggcggcggacacgctgaagtagcgctgggctgcggtttccacgccatacaggttgttgccgaactgggcgatgttcagatagccttgcagaatctcggccttggaatacttcttctccatctgcacggagatcagcatctcgcgaatcttacgggcgacggtgtcttcggtggcatggtactgggcgatcgggtcgtcgtcctcgatcgcctgcatgagcagcacgttcttgacgtactgctgggtcagcgacgaaccaccctgctgggagcctttgacgaggtaggtctgcacgaacgcacgcatcacgccttgcacgtcgacgccggcgtgagtccagaatcgacggtcctcgcgcgccaccactgcctgctgcatggttttggaaatcttcttcagcggcacgacgatacggttttggttgtagaacgtcgcgataacggtggaaccgtctcgcgcgtacatcgtcgacttctggggcagaccggtcacgtcgaagtccacgttttctaccttgagcgacggaatcaccgctttggcggctttattggcaccgaccacacccggtacaaacaacacgctggccgccacgccaccgcagacggcaagcatgatataggccaagaggagaacaagcacacgttggagagtgagggacttctttttgggcatgggccccattctaaatggggtgccctaccaaccgggctcgcggtcagctcccgtgaacatatcatcacaagaaccgcactagcgtaacattggctggaagtcagccgaacggtcagcgccgcgagcgtcgaatcagcatgcctggctggaagatgatgatcgatcgaccgtcacgtgcgatccatccgcggttggaaaagtccatcaacgccttgttcacggtctcacgactggagcccaccagttgggccagctcttcctgagtcaggtcatgcggcactttgaggccctgttccaccggctcgccgaaacgtgagcccaagttgagcaatgtcttggccagacgcgccggcacatccatgaataccaagtcggagatgcgttcgttgttgccgcgctggcggttggccatgacctgcaacatgtcgatggccacacgcggatgctcatcaagccatgcgaacagggcatcatgctccagccagaccacgcgcgtgccatggctcatggacaccgcggacgcagtgcgcgggccaccatgagggtcgaataccggaatctcgccaagcacttcgcccggcgcgtggatggacagcagctgcacgcggtcatcggaagaagtgcgaatcagcttgacgcgcccctgctccagtagatacatgcgctgatcggtatcgccttcggagaagatatagtcgcccttatcgaaggtcgcacgcttcaaatgcggcagcagctcctcggcttcggctggcgatacctgcttgaacaatgccgtatgcagcaggatgttctcctcgtcagcaaaagcgtttggcgtttccaagctcatcgcaccatccttattgtcctacgaccgtcgtcggccatccgtcatattgtaacgcgccccacaggtttcgtcagaagcatgccatcattcgtcacttcatgtgtggcgcgatccgatagccgtacgacatgctgacgaatgtgttaccgcgaaaaacggcactgtcgcggttaccgcgctcgcccatgacaaaaccacgcacggccaccggcaaaatcgtatacggccatcggtgaaatcacgccgcaaaccagtcaataaggtgttcgacgatgtgttcgcggctgagacccgtctggcttttcatcgggtccacacgtttgactgctgatttcaccgctttgtctgacatcttctcgcgactggtgttgagcacacggctcatcttggccgcatcgatgtcatatgccatggtcacatggtgcagcaccgcgccgcctgagcctacggggaagcgccgttgcgccgctcccccgatcttgccgtactgcgaggcgatatcattgaggcccgcgaaccgcacatccaagccaagttcgcgcagcgcttcgaccagccaccagtcacagagccggtaggattcttcgatgcttacgccctgaacgaaatcgagcggtgcatacagagaataggtaatggtgttgcccggttcgataaacatcgcgccaccacccgtgcaacggcgcaccacgtcgaaaccgagctgctcggcaatgtccagattcacctcgtcctgggccgattggaaacggccgatgaccacagccgggcccgcccactcccagaaccgtatggtcggctgtcgtgttcctgctgcgacttcacgcgcccaggtctcgtcaatggccatttgctcgtccggcgtacgcggatggtcgtggatcacggtgagttgaggtctgagggcgttccagcgctcccggtattcagagcttttgtcgggctgcttggtttgtgtattgatggatgccggggtgttcggcgcatcggggctgaccacccccacccgctgcgcgggagcccccaccagcgggggcaagttgctgcttacggctcggctatatgcggttttgatggcaacttcatctgtgccgataatttggcaactagggtgagcgtccaatacggaccgcaatgaatcatcactaattagagcctgttccaagtcacgcaacaaagcatgagattcggcatccgaaactgattcaataaagaaatcaccgctgatatggcatgactgtgcggtgccgtcatcatcgacggatacggtcacggcgactagtttgccgccaacggttttgcattccccatgtcgcatttgcatgcaactcagtataaacttggctcccctctggaggggagccaagtgggacatcacatgcgggccagaatgtccttgccgacctggtcggtggagcgcacggtggagccgagctcctcgatgtccgcttcgacggcggtgtgaatcttcttggccgcatcatcaaagccgagatgctcgagcagcatggcggcggagaggatggcggcggtcgggttggccttgttctgaccggcgatgtccggagcggaaccgtgaatcggctcgaacatggacgggaactcgtcggaggcgttgatgcagccggaggcggagtagcccacgccgcccaccacggagccggcctcatcggtcagaatgtcgccgaagaggttgtctgtgagaatcacatcgaaacggctcgggtcggagaccaggaagatggtggccgcatcgatgtgctggtagtcgtgggtgacctcagggtattcctcgccgaccttgtcgacgatgcgttgccacatatcaccggcgttgacgagcacgttcttcttgtgcaccagggtgacgtgcttcttgcgcttcatagcgagcttgaaggcgtaacgcaccacacgctccacaccgtatgcggtgttgatggacacctcggtggccacctcctgcggggtgttgcggcgcaccgcgccgccggcgccgcagtacagaccttcggtgccttcacgcaccaccacgaagtcgatgtcgccggggttggcgagcggcgaggtgacgcccttgtacagcttggagggacgcaggttcacgtactggtcgaggtcgaagcgcagcttgagcagcaggccgcgttccagaatgccggccttgatgcgcggatcgcccacggcgccgagcagaatcgcgtcgttggccttgatgcgctcctcttcgtcctcgggcaggatcgcaccatcgcgcagataacgctcggcacccagatcgaagttctcgtactcgaagtcagctacgccttcagcggccttttccaaagccttctgagcccacggagtgacttccttgccaataccgtcgccgggaataacggcgattttatatgtctttgccatagttcaaggagcctactcgcgcgaccacctgccggcccgaacccgctcagctagtggacacaaccaacatgcgtatcgtgtcgagacattcattaggtcattttagtgttcattaggtcggcgtgggttcatttcagggactgaaatggcggcatttcagtctcacatagaagaggacaccgacctaatgaacgacgaaatgacctaatgagcgagccccatcacatccatgcaccaagcgttctcataggaaacctcttcccattgtttgtaacgcccggatagaccgccgtgaccggcctcgacctcgatcttggccaccgcgtccacgccggcggactgcagacgggccagccacttgagcggctcgacgtacagcacgcgggtgtcgttcatcgaggtggtgatgaagattctcgggaattgcgcggcggcgagcgcgccggcggcagccccatcagcactgccgtcaccggcagcctcgtcgttgccgccctcgagcacggtgaccggcacattctcgtatggcgtgtacgacttcatgtactgatacacctcagggtcatgcaacgggtctccccattcgtcccattcggtgacggtcaacggcaagtccgggtcaagaatggaggtcaacgcgtccacgaacggcacatccgcctcaacaccggcgtagcattcgggcgccatattggcaatcgcgcccatcagcaggccgccagcggatccgccattggccacggtgcgccaagcatcagccaaatgcgccttctgcagcgcgcgcgtggcgtccacgaagtcctcaaaggaatgcttcttgttcagtctgcgcccctgttcataccaggcacgtcccatttcgccgccgccacgaatatgcggcacggcgtacagcacaccgcgatccaacatgctcagacgagagaccgagaaccccggatcggaggaaatctcgtatgcaccatatccggtaatgaacatcggcgaatcctgcgccgggcaatcgcggtgccagacgagggaaacaggaatgcgttcgccgtcgcgcgcggtaatccacacacggcgttccatgtaatcgcgtggattgaagtcgcccaacacggtggctcgcttcagcagcgcatcttcaccggtggcgggatcgatttcgtgcagctcgcccgggcgggtgtagctggcgaacgagtagcgcatgcgcggcgcctcatacgatgggttgccgccgacgccgatggtgtacaagcgccgggtctcaccgggcaggtggtcgtcgctggcaccatcggaagatgacgtgtgatccgtgggggcctcatcttcggtccacaagatttcgccatgatcgccggtgaagttttcgcgatcggcggcgaccatgtcccagtcgtcctccagggcaggcggcagcaattccgtaaaccgccacggccgtccggccaggaagtcggcggcggccgcgctcttggtcatgtatgccacgtgcggctggccgtcggcacggtagctcagggacacaaagttgcgatgcaacgcgatgccttcgatgcccagaccgtgggcaccctgcaatatcgccggattggcggcgttgaagtatgcctcggtaatcggcttatccggctcaccatgttcgcagccgtacggcgacccggcggcgatgcacacgccttcgccgagtcggtacggcggctcatggccacgcatgtcaatgacgtcgatttcgaaattcggattggcggcgttgtggtagaccacggcgagtggcacatccgcaccgttctcccccgcgccttcaaaacaggcaaagctcacatcatattcaatatcgttctgacgtggaatgaaggcttggaattcgccttcaggcgtggccaccggcagcatcagcacttcggtggtggttttggaaccggtgccgatcacgatattgcgctcatcaaaactgatgccgacgcccacccagaaccgttcatcggtttctcggtacacgcacacatccgattcgaccgccgtgccaacacgatgccgccacacggcgagcggccgccaggaatcgtccaattccacccagaacacccattggccgtccggcgtgaagcatgcgctgccaatgccggtgaactgttcgggcagttcgctgaccggctccccggtctccagcccggcaaggtcgcgaatgcggaaatcatatcgttcgtctcccgcaacatccacgccgtacagcatccaacggccgtccttgctcagatccaagccgccgagccggaagaagtcatgcccctcggattccttgttcgcatcaaaaacgacctgttcaccgggcatggagccgggcgcgccttgcggatccacgaccggcgggtcccagtcatcggcatcacgcacggggatgcggcattgcacgccatactgtttgccctgctgcgtgcgggtgaagtaccagtaatcattgacgcgcgtaggaacagacatatcggtctcttccacatgcgatttcagctcttcaaacaacgtatgccggaaatccgccagatgcgccatgcgacgctcgcagtactggttttcggcagctacgtagctgcgcacatcatcggagtctttgtctcgcatccactcgtaatcgtcgtcgaaaacgtcaccgtggaattcgcggcgcttcggctcgcgcttggcgtaaggcggcatcgcggccgcggcgtttgtgctctcgtcagtcataccacgcgattataggcgaggcaccacaccgggacgcattcggcgttcatcacgccgcgcttatcgcaacaccgtcttcagatacggcagcatggtcttcagaatgttcgagccggtggtgccggtgaatactggtacatcggttaccggagtcggctgggtcgaggtgagtcccgtcaccgacgccaatccggttgattcgcgcgggctcaactcacgaatgacgatagccagtacacgtccgggatatctgcgggcgatggtggcgtacgtggtcgggtccttctgcccgtcatcgcccaccagaatgaacttcatgtccgggaagtcggccataagttgttcggcaaactcaagtttgtgctgggggccggtgggcacgaaggtcttgggcctcgggtcgaggtcgcgcagcagcagcgggccttcgggaaaaccatggtcagtgatgaagttgcgaatcgaactctccacattccagggcgatgtcgaaagatagaagaacggtgcgccggggaacaagtcggcgatgcgggtgaacagcacgctcatgcccggcacggaggctttcttcttggggtcgaggaacagcaggttgtacgcggccttccatggcaccggggcctgtgtgatcatgatggtgtcgtccacatcggagatgatgccgactttggcactggcggggatggtgtacaggttggcgctcacgggtttgcggttggccacgctgtaggagacgcgatggatgccgggcaccagacgatgctcggccacgaggtcgaggtatccggcggaatcggagatggcgtattcgctgccgagatcgcgcgtgcggtccaccttgtcatagacctcggagacgccgatctgcacggtgttgagcggcgtgtcatcaatgctggcctgcacgtgggtgcgcggcgcgggcacggcaagcatgccgcggatgccgcggatcagttcgccggattgcgcatgcttgggggcgtataccgtgcggcagatcaggcgcgagtaatcgccggtgccataacccacatagggttccactcgcggataccagccccattggcgcaccacctgagtggagatgtgtgaccatacgccgaacacgcgggtgatggcacgacgtatgaatcgggtgatcggcggcttgacctcgatgcgctcacgcttggagggggtgtcgaacgtcgtggcagccttgcgtgcgggaatcggcacggtgggcatgtcatcggaatattcagcattgctggcattgctggcattgtcggcgccattggcggatgccttgacgtcagagactggcgcggtggcggacagcgctgcattgcgagcagcagcatcccaaggcagtcgcttgcctgccgcctcaaaatcctcgcgtgggcttctcatagacaccaatataggccatacgcctcattttcttggctccgttgtagatgactttgttttagcttgtcgctagagcgaagtcatctgcatggcctcgttgccgaggccagctccaagcctcacacggcttacgccgtcgcttggttcgcgtttcacaggatgccgcgttgcccgacgcgatgcgtcggtccgtcttccgcttcctccgcgcgcgtttaacgtctccggggcactcccggcgacttggatgttgatggcc

SEQ ID NO: 2286 - DNA, 16638 bp, Unknown
  R119_18m  MAG No. k141_14735
gcgtcggatgacgcaactttgacacaagccgattcgtagccgatgagtgacatgctgttgtgtcacgggacatgcgggaaaaacgttggaatagcaaggctcagtgactacgaactatctggtggataaactcagccatatgttaccttaccgttcaaggaatgctgattttccaacgttttgcgggacttggaccccgtaatgacaccaatggaaaacgacgcaaccgtttacgggggtgtcccggacggcccgttgtgcgtcattcgctgttgtggttgtcccgtgtcatcgccggcgccttggtcctacgcaaaagcaccttgtggattatcccatatcccgtctacacgatgcaatggggttctggcgggcgggaattagcgattcggtcatcgggaggagacgtggaaggcggcggcgatgccgtcaatgccgacgccggtaaatgggcgctgggcatgccctgtttcctgagcgagagcccggccctgtatcgtctggcgatttgtcgatcgttgcgattccggcgttctgccgggctttcatttcgaaatgacgcatctggaatagcgcggccgtctttggtgctcctctcttcagtgatccgccgaggttacgcccatggctgaacgcccggaatgtcccgcgaaatccggtgagacggtctaggccgcggatgtaccgtgaatggcgcataggcgtgtcggtcgccgcaatcatggcaatgagaggaaaccccgttatggatcatgcatcccgatctcagcatcagactcaggccgatgcgtcttcgatctcttcaacgaatccgacggcctcgtcgccgctgcccacccaggcgccgccgtggggcgcgctgtgggtgatggccctgggattggccatgatcgtgctcgacagctcgatcgtcaatgtctccatccccaccatcatcgacgacatcggcattaacctgaccgacgcccagtgggtcacctcgctctacaacatcgtgcttgccgcgttgttgctgcctttcggcaagttgggcgacgccagagggcgcaaactggtgtttcaagccggtaccgtgatcttcgtggcgagttcggcgctcgccgccgcctcgcagggtgcggggatgctgcttgccgcccgtgtgctgcagggcatcggaggcgcgatgatcatgccgaacaccctgtccacggtgtccgccctgttccgtggcaagtaccgcgccgcggcgttcggcgtctggggcgcggtgatgagttcggccgccgcgcttggtccgctgctcggtggcgtgttcaccgagaccttgggatggcgttggatcttcctggtgaacctgccgttgggcatcgcggtctttgtgtcggccatcttcctggtgccgaagaccggtgggaacgcctcggtcgccggtgccgcggatgccgcgcaggatgcccgatcccgtcgcgtcggtgtggatatcccgggcgtggtgttgtctgccctgacctcggccctgttggtgttcggtcttatcgaaggcgagacctacggttggtggaagcagacctcaacgcagttgaagctcggcgggctgagctggaatcgtgactggttgtcgccggtgccgatctgcctgatcgccggcgcgcttctgatggccgtcttcatcgtcttcgaatccgcgcggggcaaagccggtcggccggtcatgctggacatgaccctgtttcgcatcaagacgttctcgtggggcaatctggcggctgcggccatcgccgccggcgagttcgcgctggtgttcatgctgccgttgtatctcatcaacgcccgcgggctcaacacgctgcaggccggtgcgatgctggccgtgatgggcctggggtccatcgtcgcaggtgcgcaggcccatgtcatggccgccaggctcaccccggccggcgtgattcaactcggtcttgtgatcgagatcatcgccgtcgccctggtcgcggtccttatgcctgtgggattgtcggtgtggtggcagcttgttcccatggccgcatacggtctgggtctgggcttcgcctccgcgcagctgaccagcgtggtgctctccgaagtgccgatcatgcagtccggcgaagggtcggccacccagtccacggttcgacagctcggcaccgccgtcggttcggccatctccggcgcgtcgctggccatggccgtcaacggaacattgccggcgcggctcgaatccctcgggctgcccgccaaggtcggcgacggtctggcccaagcggtcagcggttcggcgggtggagtgatcggcgtgttccgcaacggtgatggaccggcggcccgattcggcgacgaggcgccgaagattgccgatgcgatgacttcagggttcgtcgaaggcggccagtggacgcttctggttgccggcatcatgctgttcatcggtttgctggcctcggtggccgtgcgtcgtgccgcgtcgtcgcacaacgtgcgttgacgcatgacggctactgtcttatggggagtgcggccgtgcgcggtcgaacgatatggtccgcataccgtccaccacacctgcggtcggttcgccggtggaaggaacgatgtatcagacggcgtgtcgtaatccgatgatgctgtaacatatcctcttgtgcctcagcgaggcacgcacggccccgtagctcagttggttagagcgccgccctgtcacggcggaggtcaccggttcaagtccggccggggtcgccaccaaactcccgatgcatgtcgggagttttttttgtttcctgccgttcttcgatgccatccgcaagggcggcgaaagcgattgcatccgattcgacacgccgtccgcaccgatgccggcgttaaggggcgcccgtttgcaacgggtgaaatgcatgaggaagcgcatcggtggaatgttcgcgacgcatgacgaaccacggaaaaaccgcggtgggaggtcatggcggctcgctactattttcgctatctcgcatgttacgaaagtcttcaaggagtaagccatgaccacgctcgccattgatatcggaggaaccaagatcgccgccgccgtctgcgatgcaaacgacagcatcatccagcgctggcgcgtccccacgccgatggacgccgacgccatcaaccagcacatcgccgaggtgtaccgcgaggctgtggccgccgggcacaccgatatcgaggccgtcggcatctccgccgccggcaatgtgagcgcggatcgcaagacgctcaccttctccgccaacattccggcatggatcaactacgatctgtccgagcacgtcggcgcgctgatcgaccatgccgtgccggtcatcgtcgaaaacgacgccaactgcgccggatggggcgaattcgtgcacggcgccggccagggtagctccaacatggtcgcgctgaccgtgggcaccggcctcggcggtgccatcgtgatcaacggccagctctaccgcggctccttcggcatggccgccgagctcggccacctgccgatggtcccggacggcgaccactgcggctgcggcctgcgcggctgcgccgaacgttacacttcgggaacctcgctggagaacttcgccaagtccgccgtgcgccgtcgtcctcaggacgccaagcgtcttctggaactgtgcggcggcgacatcaccaaactggaggggccgatggtgtcccaagcggctcaggaaggtgacgtacttggcctgtatgcgttcggcaagatcggcgaatggctgggccgcaccatggccgccgtttccgccgtgcttgacccggacctgttcgtgatcggcggcggcgtggtggccgtgggcgacatcctgctggagccggcccgctacaactaccagcgtttcctggaaggcagcgcctaccgcggccatgccaagatcgtcgcggccactgcgggccaggatgccggtctgatcggcgcggccaacctggctctgcgctgacgatgtcgctccggcaacgggacgttagtctaatggtgagtcatggccggtgccatggctcactgccgcgctgatagtgcggtcgatgagtttccgctgcctgaccatggaatcgaattccgggttctcagcgatttcctcgtactcgtgttcggtggtcacgccggcgatttcggcgataatctcctcataggacgtttcgacggttcgatgcacgccggtgacgtgcccctgacgtatcacgacaatgcggtcggataccgcgaacacatccggcagatcgtggcagaccatcaccacggaccggccttcggagcgcagtctcttgatatatgcgagcacttccgccgactgcatcaccgacagtgcggcggtcggttcgtccagcagaataagctgcgggttattgagcagcgtgcgtgctatggccacggtctggcgctggccgacggataaggatgcgataggggagccgacccgaatcgccgagctcagggtcttcagcacggaacgggcacgcgagttcatcgaatcgtcatcgcgtatgccaatctgattgatctccttgccgaggaacaggttcgaggccacgtccaggttgtcgcagaactcctgcccctggaacaccgatgcgatgcccatgcggtccgcctccctgatcgagggaatggtcacctgttcgccgttgagatagatatggccgaatcccggctgcagaaatcccgcgatgaccttgatcagagtggactttcctgcgccgttatcgcccacgatggcgacaacctcctggcgttggatggacagattcaccgatttcaacgcctcgacgaagccgaacttcacacagatgtcctccagccgcagcagaggaggtgtgctcgaattcctcatggtgtgttccttcttctcactcttctcctggtaccggtcactggctgacgtcattgcgaaccgagaactcgatggcgcataatgcgccgcctagcgcgcagttgtcgttcgggtgggatgacacgagtacatcgatgggtgccacggcatcagggaacagcatgcgctgcaacgcttcattgaacggttggatgaatacgtcgccggtcatggccagcttgccgccgagcacaatgacctccggatccacgctgatgcacagatcagccgccacctgaccgatacgcacggccgtgtcggcgatgatgcgacggcaaccggggtcgccttcgttggcaaaggacaccagatcatccagcgtcatattgccgtgtgtgacgctgagcaactgcaccagcctgttttccgccacgacggtgtcaaggcagccgcggttaccgcacgaacagatggcacccagcgggtcgacctggatatggccgatttcaccggccaggccggtcacgccatgcatgatttcgccgttgatgacgatgcctgcgccaaccccgtcgttggctgagatatatacgaaattgcgtttgcctgccgccacgcccatacgggattcgccgtatgccgcgaaattcgcgtcattatcgacgtatacgggaacgttgaacgccgtgcgcaacggggccgtgatatcgacgccgtcccatccgggcagaatgccgggaatcgctatggtgtggtcgctggtggccaccggtgcggccacggccacgccgatgccgaccagctcgctggcttcggcgtcgatgctgctcagggtctcattgatgagcagcatggcgcgttccagcgttgtgtccgccttgtggcccaacggcagggggagcgtgtgctcagcgatgattgacttcgagaagtcaacgatagaaagcgtaagatgacgtcgcgcgatccaaagcccgacgccgaggccctgatgccgtgcaagggtcaccagagtggctctgcgaccgttgcgaacggtgtttttggtctccagctggtcttcgtcgacaagctgatggacgagcgtggacacggtcgcagtggacagtcctgtcacctctgccagttcgacctgtgtcatggcgccgaacttgtggatgctggccagcaagttggcgcggtttgcctcgcgaagcgaggtctgcgaaccgaaaagccttgttgccataagagttcagtgtagtcgttaccggcatgaggcacagcgaggcgcagagcgtggatttttcggcgtgtcgccttgtgatgcgcgaaaaatcgacattgcgttcattggtcgaacataaacgacgggaaattcgctttcttgagtttgacaacttaactcaatacggtattctatgagatgaacctgaggttattctcaggttcgggcgaccaaggagggttcgccatcccctcgaagatgaaggagaacaaatgaagttcactaagaagatcgtcgccgtggtggcaggcgttgccatgtgcgcgggcctcgcggcctgcggtggcagccgtagcggccaggcaactggcggtgatgccaagatcgaaaagggcgccactatcggcatttcgatgccgaccaagtccgaagagcgttggaacaaggacggcaacaacctgaaggccaagctggagaaggccggatacaaggtcatcctgtccttcgccgacgataagccggcccagcagaacgctgacatcgagaacatggtcaacaacgacgccaagatcgtcgtggtcgcttccaaggacggcaccgcagtgggccccgccgttgagaaggcccgcgatgcaggtgccaaggtcatcgcctacgatcgactgatcatgaacaccgacgccgtcgactactacgccaccttccagctggagcaggtcggcgtgctcgaggccacgtggctcattgaccagctcaagcttaaggatggcgccaccggcccgttcaatatcgagctgttcaccggttccccggatgacaacaacgccaagtacttcttcaagggcgcttgggatctgctgcagccgtacttcgagaagggcgtgctcgtctccccgtcccagcacggtcagggtggcgtgaccaaggacttcaccgttgaggattggcagaagatctccgtgatgagctggaagaccgagcaggcgcagaaggacatggaatccatccttgactccacctacgcccacggcgagaagctcgacgcggtcctcactccgtacgacggcatcgcccagggtgtgatcaacgccatcgaatccaagcgtcccgacatgaagccgggcaccgactcctggccgtacatcaccggtcaggacgccatggagatcgcagttgccaacatcgccaaggataagcagggcgagaccgtgttcaaggacgtgaacaagctggctgacgccgtgtacgacatggtcgtcgagatcgccgagggcaaggaagtctccggcctgaacggcaagttcaacaacaacaacatcgacgttccgtccaagctgcttgacccccagaacatcaccaaggacaacctccaggatctggtcacggccaactacatcacccaggatcgcttcgacgagctgactaagtagtcctcatcaggcaatccgtaaacaaacacaatgacatgcggcgcatagccgatatgcgccgcatgtccatgaacacagaactgtgacgaggagtgatgacatgtcatcaaatgacaccatcttgacgatggaaaacatcacgaagacgttcggtccggtcaaagccctcaccgatgtgaatctttccgtcgatcgcggcgagatccacgccatctgcggcgagaacggtgcaggcaaatcgaccctgatgaacgtgctttcgggtgtgtacccatacggtagctattccggcaaaatcacctttgatggcaaggaatgcaaataccatactattaatgattccgaggccgacggcatcgtaatcattcatcaggaactggcgttgagcccgttcctgtccattgcggagaacatcttcatcggcaacgagcaggccaagggtggcgtgatcgactgggacaagacccgcgccgaggcgaagaagctgctcgatcgtgtgggacttcccgaagacccggataccagggttatggacatcggcgtcggcaagcagcagctcgtcgaaatcgccaaggcattgtccaaggacgtgaagctgctcatcctcgatgagccgaccgctgcactgaacgatgaggattccgcccacctgcttgacctggttcgtcagctacgtgacgagcagggcgtgaccagcatcatcatcactcataaactcaacgaggtcgccgccattgccgacaatgtcaccatcattcgagacggttcgaccgtcggtgtgatgtacgtgacgccggagacgccgctcgaccaggaagaactcatccgcaagatggtgggtcgtccgctgcacaacctgtacccgaaccacccctccaataccccgggcgaggaatacctgcgcgtcgaggattggaccgtgcatcatccgctcgacgcggagcgcgtgatcgtagaccatgcgaacatcaacgtgcacgccggcgagatcgtcggtctggcgggtctgatgggtgcgggtcgtaccgaaatggccatgtccatcttcggccactcttacggttccaacatctccggcaaggtgttcgtcaagggcaaggaagtcaagatgcccaacgtgcagtccgcgattgacgcaggtctcgcctacgccaccgaggatcgtaagggcaacggtctgaacctgctgcagaacatccgagagaacgcatccctggcctccctgaccaagatcagcaagggcggggttgtggacgacaaccttgagcgcaaggaagtcgaacagtaccgcaaggacttcaacatcaagtgtcatgacatcgatgtgaatgtctccaccctctccggtggtaaccagcagaaagtgctgctcgccaagtgggttatctcgcagccggacatcctcatcctcgatgagccgacccgaggcatcgacgtcggcgccaagtatgagatctacgaaatcatcgataagcttgccgatgcaggcaaggccgtcatcgtgatttcctccgagctgcctgagctcatcggtatctgcgaccgcatttacacggtgtcctacggtgtcgtcaccgacaatgtcgagaagaatggatttacccaggaatacctgatgaagggtatgaccaaggaaagggaggtggcagcctgatgagcgccgcaactgcaacacctgcaaagaaagaagaaaagaccggcctgctggccacggtcgccaacaatgcccgtcaatacggtattgtcggcgcactgctgatcatcgtcgtggccttcgagatcctgaccggaggtgtgctgctgaagccgaactccttcgtgtccctgatccagcagaacgcctacgtgatcatcctggccattggtatggtgatggtcatcatcgccacccacatcgacctttcggttggttccttggtagccttcatcggtggtgtgtgtgcactgctgatggaacgcgccggagtcaactggatgctcgccatcgtcatcgctctggtcgtcggcctgatcgtcggcgtctggcagggcttctgggtcgccgtcatcggcatcccgggcttcattaccactctggccggcatgttgatcttccgtggtctcgccaccgtgatcgtcggcgaatccgtgccgattacctccctcgaattccgtggcattgcccgtaactacctgcccaacatccttggctggtggggtccgttcgacggtctgaccattgtgctcggcatcctgtgcattgtcggctttgcctggagccagctgcgcaagcgcgcccgtgtggccaaggtcggcctggtgcccgagccgatgagcctgaccgtcctcaagattgtgcttgtcgcggtcgtcatcgccttcgtcacctacctgctggcttcctccggtaacgctgatcagggtggtaccccgatcatgctggtgatcgtcggtgtgctggtcttcatctacaacttcatcctgaccaagaccgtgttcggtcgccacgtgtacgccgttggtggcaaccgcaaggccgccatcctctccggtatcaacacccgccgcgtggacttcctgctgttcgtccacatgggcttcctgtccgcagtggccgctgtctgcatgctttcccgtctggcttccgcaactgctcaggccggtatggagttcgagatggacgccatcgctgcctgcttcatcggtggcacggccgtcaccggtggtattggtaccatcccgggcgctgtgattggtgcattcgtgatgggtgttatcaaccagggtctgtcgattatgggtgttgacaccgccgtggtgaagaccatcaagggcctcgtgctcctgctggccgtcgccgtggacatcatatccaagcgcaagaagagctgaccttcccctttctcctcctcgatgtgggattcgtgccggtgccgctggtgcggatcccacactgttatctgccgtcattcttgtaatcaaaggactttttccgccatgaaactcaccgcgcgctccacctcccgtatgtatgcattgacctgcttggcctgcgttatctggctctggcagtcactggtcgaggccaataacgatggctcgctgttcaattgggccactattgtcttctcgctgtgcttgctagtggtcatcggatggagtggttggaatgccgtcaccgggtggaacgccaaggagactgaggccgccacggcgggtgccaaggatgatgagggcagcactgattggtaacgtatatacggctgttgttgccgggaacatataggtcccggcaaacctgcagcgatatgtgcattgcaagccagggatcccctggcttttttttatgccgaaacggaactcgacacgggcgcgcaggttgttgggtttgtctagagcctgcatatagttacttatggtaatgactattagtaactaattggaggttgggccagcgatgtgcgattcccgaaccgataccaagaccggcttgcttccggtgaatgaggtgcggagcctcctggatgtctgctggaaggccaagaccatcaccgaactgatgccggcattgccgaaaggtatgaaaccgcgctatgtccacgtgatcgacgccgtctggcatatcaacgaaccgaatgggcaagataccggcaccgcgcgcgtgggcgacgtcagcgcattcctcggcgtcactacgccgagcatcaccaagctcgtcggcgaaatggccgacctcggactcgtcgtcaaacacgccgatgccgccgatcggcgtgcggtgacgctcacgctcaccgaacgcggcttggatatccgccgcatctatatggaggaatatcacgcgcatttgagccaactgctgggcggattgacctcggaccagtgcgaaaccacggtacgcaccttgaccgaggctctgcgactcatgcaggaagacttccaacgtcgtagtcagaatatctgaatgaatggaggagagaacaagatcgtgactcattccgcaacacagctgcctaacggcggcaagcaaccggtctccaacaaactcgtcatcgcggtcgtctcgctcgcgatcctgaccttcctcggcatcctatcggaaacgtcactgaacatcgcctactccacgccgatggaggagttctccatcggcgcctcggtggtgcagtggcttgtcaccggttatctgctcttgctgtcggtgtcgattccgagctcgccgttcatggtgcgcaaattcgccaccaaaacactgttcatcatggccatcgtgattttcaccgccggcacattactgggcgcgctcgcggtcaacttcccgatgctgctcgccgcccgactggtcatgtcgctcggcaccggcatctccctgccgcttatcaccaacatccactggcacgaagaagcgtgattccaacatgcaacgccctattatgacttcgcggtcgtttttgcgcacgccgtctgaagcggctgggcccggcgacgaggcaactattcaggacctcgtggatacgttggaggccaaccgttcacggtgcgtgggcatggccgccaacatgatcggcgtgagcaagcgcatcatcgtcttcgtggacgaagatctcggtggccgtatcacggtgatgctcaaccccgtgatcaccgcttcggatggtgccttcgacacccaggaaggctgtttgtcgctgaccggtgaacgccgcacactgcgctgccgccgtatcgaggtcaactacgaggaccgtcggttccgcgcccgccacgccaccttcaccggctggaccgcgcagatcatccaacacgaagtcgatcactgcaacggcatcattatctgattcatatcggtgctcgttgcagcccaactcccgaggctggtcatcgcgattacgatgcgattacatcgcaaccgctatgaccagtttttttttatgtgcactggtggggtgggtgttctcagcggtgttggggtgccatgcgctggccggttggcttcgctgaggggtgtgggtggtgtcatgttgccagcggttggctggttggcttcgctggaggttctctcagcgtcggtgatgtgccaaagagtggcgggctggcttcgctaaggagcgttaccgccggtggagaaccagtgcgtgacctgctgccgacgctaagcgttcattaagcgtcgttagcggccaaaacttggacgtgtaacgatgctgggcggttttagcgtcgttgctgtgccaagttgtggtcctctgccgacgctgccagtgcagtagcgtcggcgttgggacaggtgttgggcctttgccgactctataagcgagggaaaatcattcgccggtgcctaagtgggtctattgccatgctgaatacatctgctgagtgtagctatgcgttcgaaggcgatttcgggacctttctcagtagcaaatatgcctaatgcgcggagttatacacttcaccgtgcacttatacacgccaaacgaagcagaaatcgactgctgacagtggacgacacgccagagacgatgtggataacccagagacggtggataacagctgcgcgatcagtggataacctgcaagaaagtgcggttatccaccgacggtagccactgttatgcacattccataccccttggaatcattgggttttccacttatccaccatctcgccatgcgggcttgcgggccgccgcacgaacgtcatacagtgtgcctcacggcgggcaacgtagcccgccgtccacatcacatgaaggggaaacaccatgagcaccgcaaccactactactgccgaaaatgccggtttgccagcaatgctggacaccaaagacgtagccgagatgttcaaacgctgcaatctcgccgtctatgccgaagcgagacgcatatattatcgcgaagtgaatctgaacccatgcaaaaagtatccgaagcaggtgctgcaaaggatcgaatggtggttctgggattggtttgcctatgactgcgccgtcagcggtattggactgaccggcaatgaatccgaagatttacgtatcgaattgcagtacggtccgggcgcaggtatctcgccattcctagccttggccgaattcatgtatgacaaggacgaacgtatcggcacacgcgagatacgtgattttcgcgaacttgatgacaccaatttcgcttcgatgttctggattcgcgatgccagcgcggtcaaaggtcgtctgacagttgaggacatcattcatggtggtgtctacgaggtggcggacgtacatgccgcctcgcaatacgatggtgcgcacggcggcatgatcgtcaatcgcatcgcacatgtgagaggcgtgtggcgatcctgttccatcccgatctatgaggcacgaaggcctgatgacccgcaaatcggtgattcgctggcccgttcattccgggaaaccggatataaaccggactttgccggtctggtgcggtttttctacgggagggccaaagacaccggtctcgactgggaagatgtggaagccgcgcgccaagccggtactttgggcgcgctgatcaagaaggccagcaatcggtgaaggattcgcctaacgctgctgtccaagtcggcggccgcgatcacgaatgaagagtgacgcaaccaaacagaccgcgcacacaatggcgaccgtgcggaacgaagcccgcacgccaatggccgatgccgccgcttccggcactccggtgcgcatggccgccgcggtgtgcgtgttcatgatggtgaccagcagcacagccgcagacgtcatgatcgcgaagcccagtaaggcgagcggccggccaccgatacggtcatacatcttgcctgccaccgggttcaggatgcccatggcgatgccgctcggcatcatcaccagaccggacaccagtgcattaacgccaagatcattctgcaaatatgcccatcgcgtacaggaacagctggcgggtggtgaaggtctcgatgaggaacgcggtgatcgggatcatgatgccgttggtaagcatgaatccggtggtcagccattgcacggtgctgctgggcacgtcgaactcgtgcatcaacgtgggcagggcggagatcatcagcgtttggttgaggatggccacaaacgagccgatcatcagggtgatgaccatggcggtggtgttggcgggggtggtgctgttggagttggcggggtggtggagccggcctcagcggtggccggcgaggaattgcgtgacgtcaattatcaagtctcgttttcttggctgagttgtctttcttggcttgcccatactatctgtgccttgactgcattcgaaaaccattgcaatgactagcaacacgctgagacgcggcgtattaattcaatcatttgacaaacttagttcgttcgttttattattggtcctgcaatccgtaatatcgcctactgcaaaggagcgcccaaatgggtctgtgggatgttgacaagatcgagtacgtcggccgcgccaaaggaccgaaggaagacttcgccttccattactacgatgccgacaaggtcgttgccggcaagaagatgaaggattggctgcgcttcggcgttgcttggtggcacaccttcaaccaggaactggttgatccgttcggcaccggcaccgcgcaccgcccgtactacaagtacaccgatccgatggaccaggctctggccaaggtcgactacgccttcgagctgttccagaagctgggcgtcgagtacttctgcttccacgatcgtgacatcgcccccgaaggcgacaccctgcgcgagaccaacgccaacctcgacaaggtcgttgacaagatcgacgagaatatgaagtccaccggtgtcaagctgctgtggaacacctcctccctgttcaccaacccgcgcttcgtgtccggcgccgccacttctccgttcgccgacatctacgcctacgccggtggccagctcaagaagagcttggagatcggcaagcgcctgggcgccgagaactacgtgttctggggtggccgcgaaggctacgagaacctgtggaacaccgagatgaagcgcgagaccgaccacatcgccaagttcttccacatgtgcgcagattacgccaaggaaatcggctttgaggcccagttcctgatcgagccgaagccgaaggagccgacgctgcaccagtacgacttcgatgccgccaccgccatcgagttcctgcgcaaccacgacctgaccgacgtcttcaagctgaacctggaaggcaaccacgccaacctggccggccacacctaccagcacgagatccgcgtggcccgcgaatccggcttcctcggctccctcgacgccaaccagggcgacaagctcatcggctgggacatggatgagttcccgaccgacctgtacgagaccgtcgccgtcatgtgggaagtcctgcaggccggctccatcggacctcacggtggtctgaacttcgacgccaagccgcgccgtacctccttctacgaggaggatttgttccgctcccacatcgccggcatggacacctacgccgctggtctgctggttgccgacaagatgaaccaggacggcttcatccaggaccttatggccgagcgctacagctcctacgactctggcatcggcaaggacatcgacgagggcaacgtcaccttggccgacctcgaagcctacagcctcgacaagccgcagtccgagctcatcgccgccaccaagtccgaccacctcgagtccgtcaaggccaccatcaacaactacattgttgatgctctggctgaggtcgagtgaccatcggtctgactgattgaattcgcttcatcgggcgcgtgcgcatcaattatggtgccagcgcgcccgatgggctgatccggtagttttgccatgcgcggcgttatgttacgtccgcacggcacctttccattccttctttctcctttctctccgcgcagaccggcatggagttcgagatggacgccatcgcggcctgcttcatcggcggcacggccgtcaccggcggcatcggcaccatccccggtgccatggtcggcgccctgatcatgggcgtgctcaaccagggcctgtccatcatgggcgtggacgccgcctgggtcaagaccatcaagggcctcgtcgtcatcgccgccgtcgcctacgacctgctctccaagaaaaagaaa

SEQ ID NO: 2287 - DNA, 40653 bp, Unknown
  R119_18m  MAG No. k141_15470
acggcaccatcctcaacgtgatcggcgacgccgtcggcgccggatggttcgggctcggccccgtctacccggccacgggaggcatcctcgcggtcaccggcacgcccgccaacgcggccatatccctgatcgcgcagctcgccgtcgccatgctgctcatggcgttgggtggatggtgctcggcacacccgcgcacaacgcgctgaacggcaccggcggaacccccaccgaaaaaacatcacacggaaagaagacgtcatgttcatctccatcaaccacctgaccaaggacttcctgaggaagccccgcgcgctggacgacgtgacctgcgacctgccgcacggcatggtcggtctgatcgggccgaacggcgcaggcaagaccacgctcatgcgcatcctcgccggcatcatccgccccacatcgggccaggtactcatggacggccacgatctgaaggacgagaggacccgccgtgcgctcaaacgcacgctcggctacctgccgcaggacatcgaaccctacccgcagctcaccccgctcgaattcctcgactacgtgggcgtcctcaaaggcatcgacgacacgcgaaagcgcatgcgccaggcgcacgagctcatcgaacgggtcgggctcacggacgtggccgaccggcgcatcggcggcttctccggaggcatgcgccgccgcgtcggcatcgcccaggccctcatggcggatccccggctcatcatcgtggacgaacccaccgccggactcgaccccgaggaacgcatgcgtttccgcacgctgctcgccggcctcggcggcgaccgcaccgtgatcctgtccacccacatcctcgacgacatcgcccagacttgcccatacgtgttcgtcctgcgccaaggccgcatccgctacgacgggccgaccgaacacctcaccgaacacgccacgggccgtgtctggctcacccagccatccaacaccccgccaccggccggcatgatcgtcgccaacgccgtcaccaccgcacgcggcgtacgctaccgcgtcatcaccgacaccccgcccgccgacgcgcatcccatggaccccacattggaggacggctacatggtcctcatcgaggaacaccccgaccagcattgacggcagacgaacaagcaccccgaccaccaccgaacacgacaaaggaaaccagcatgaccaacacgacacacgccatccaaaccatcaccgccaccggcctcgccgccatcatggccctgggactgaccgcctgcatggacggcatcgaacaccccgaaaactaccctaccaacggcagcaagaaaatcaccgcgaccagcaacccacaggacatcagcgccgaccaactcggccacacatggcccctcaccgtcgaccacggcaccgtcagctgcacgcacaacagcaaaggcgatcccgtcatgcgcttcaccgcgcccgacggcacccaatacgccctcaaccagaccagcgacaacaaggacctgcccgacatcaatcagctcctcgccgacggcaaatccaccggcaccctcaccagcttcgccttcaccgtctgcgacgtgaaataatcatgcgcccgctgccggcggccgtgtcgatgtcgaccaccgtgcgcataccgcgagaatcctgtgacgctgacggttcagcatcgtcttgcagtcaggaccggcgcggttccgccgccgttttctccgtaacaatcgcgtatagcaccagtgcgaccagcacgacgagccgggtccaatcggaattacggatgagcagcccgacgagaatcaggacgtcgtagaacagcgtgcgcgcccaccgccacgggtattccttacggacgcgcatcgtctccgccaatccccagatcagggcgcagacggcgatgataccgttgaaccacagcactatgggcctgccctgcggatcggtgtccggcatagcgagattgctgaagaacatcaccagagcacccgtatatacggcctcgggcgcgaccgacaatcttccgccttcaacgcgaggatctgacatgattacctccttattgggggatccgtcaacgctaacgaatcatgcgaaaaaccattatatttgaatggtatgagcggggctcaagcattcacaacatgctgtcaagcaatcgtatgacaagaatcatccgtttacggcatcgccgccggatgaccacaccagcagggcacccgcgagggagacgacgatgacgccgatcacggccaccgcggtgatggtctgtcgcaatatcagcgcggcgataatcacgctcatggcggggtcgatggagaacagcgtgccgaccacgcgcgccgacgtgatacgcccggacaacgtgtccatcgtgtagggaatcgcaactcccagcaccgccgaggctgcgatgacgccccactgggcggccgacacatgcggcgcgcgagtgatggataccggcgaagtggccagcgccgcaaccgtgaccgacagggcgagcccgtcgagcccggtgcctgccttgccgacccggtcggcgaagagcgtgtacaggccgaagcacacggccgagcccagcgcgaacaggtagccggccggattgaagtagccgcccggcgtaaacgagatcaagcccacacccaccagcgcgaccaccgcgcacaggccctcgcgccagtgatgcgaaccggccagggcgaccacgcagggtccgaggaattccagggtgacggccacgcccatcggaatgcggtcgatggccgagtacaggcagacgttcatcgccgccatcgcaagcccgtagattacgatgcccagccattcgcctttcgaccggccagccagtttcgggcgggtgagtgcgagaatgacgatcgcggcgaccagcatgcgcatcgaactgaccggaattggtcccaacgcgccgaacaacgacgccgacagggacgacgacgtctggatacccaacgaccccaccatcaccatgccggccgccgccatcacacggccacgcgccgaacgcggcgcccgaagcttgcccaatacccctcccctgtcacggccattcccacacgacctctgcgccaccaatgatagtgttcggcgaagactcgcgacgtgcggagtcgactttgtatggcgggatcagcggaaagcggcaggctcactcccgcaacggaatacggtgagaaagctggctgccggacgattacgatccgaaacagtgcacccgtatacggcttcggtcagacacgtttcaccgccttgaacagcagacatgcgcttatcgcggcgatggcgacgccgaccggaatcacgtaaccggcgaatttcaccccgttcaacacccatgtggttggtatgacggcgtacagcatcggcgcgtcctcgaacatgccggaactcaccgtaagtccggcgacgatgaagaaggcgacgacgttccaggcgacgagaggactggcatagagtcgcagaacgaagcatgccagggaaaggacgacggcggtgaacgcaagcatcagaatggtacgcgacgaaagcggctcgttgacgacgagcccgacggcaagcccgtacagcaaagtcaggcagacgttgatcacgacgccgagcgacagcgacttcacgctgaagcgaagcaggagccggtcgtggatgctgaaggaacggtacgaggagggcaccctcgcatgggagaagacgagaccggccgcggttacgggaagcgccatcaccatcgccgactgcaccaccgcacccgtgttcccgtaacgcaaaaagaacaacggaaacagcagcacggccacgaaggcgagcgtcgaccagcggatcaccgccacacgctcaatacgcaatagggacttcatttcctctccactccttcgcgacggaaccggctcaacagcacataggcaaccaaaagcaccacgatcgggacgacgaccatcacggggccgacggacgctcgactcgccgcttccgccggcgacatcacggtgccgttcaggttcagcccgacggtccgtagggcgttcgcgacgtagggcgtcgcatagtcgggaaggtcgcccggcaggagaatccatgcatagcaaaggatggccgagacgattccggcggttctgggatcggcggcgatctcgacgatcgagtagatcagggaggtcgcaaggctctgcagcacgacgaagcacaggacagctgccagatgcgggtgcattccggtacccgtcaggaccatgatggcgtcgaagcacagtacgccaatcaggttcacggaggtcaggatcagggcccggaacacggccctgagcgagcatggcgtccacgcggaatacacgtggcgcggcaggccaccgtagtgcgccttcgcgaccctggcatcgcatgcgaagagcagcgaaagacagatcaacggctgggtggcggtgaaatagacgcaataccctccggttatcggggttccgttcgccgcgcttgagatccacgcacccagcagaagggacgagacggccccaaacaccgcggcgaggaaataccacgtgttccagtagtaggcgaccaacgcgcgaacaggggaaacggcgttcaagaccctacctcccctgatacagatccgcgaggttcaccccagtcagatccgtgacctgcacggcccggccgtgacgaatcatgatgcactcgtccgggacgccctggatctcatgaagcagatgcgtggagatgacgacgcagttccccttgtcccggtaggcgcgaagcgtttcggacaaggaggctatgccatcggggtccagaccgttctgcggctcgtcgaggaacaggaacctcggatgcggcacaagggcgaggcacagctccagacgctctttcatgcccgtcgagtagtccttcgccttccgcccatacaccgcgcgattgatgcccacaccgtccaacgccgcctccgggtccacatccagaccccagaacgcggagaccacctcgacgttctctctaccactcaggtaaggaaagaaactgggatggtctatcgccgcggacatctcattgatattcgtccctgtgtacgtgacctctccgctcacgggctttatccgtccgagtagcgtcttcatcaacgtggttttgcccgcgccgtttgccccaagcagacagataatcctacccgtgctcaaccgcaggttaatgttgctgacgattggggaacccttgtacccgatcgagagattcgtagccgatataactggcataatcacccttcacgaaaggcgggcctgaaggcaaaggcaggatgccttgcccagacccgcgcgttgcaatgtcgccgctatttcacccttcagcggccgcaaacgcaacaacatgtcaggccaatcgcatgacggtagctccatgctccctcgattcgccgaaactatccatcggccaaaggaatgaacctgcgcatcatccgcaaggacgatgcatccgactcccatcgcacacttgccgccaccggtctctctccccccccccaaaaaaaaatggcgaagggcgggttccagtgatcgtcgcaacgcctggctgactgatgggagggccaggtggacaggtgggtgttcgagggcgtggagtacgcgacgcgtggcgagatgtgcgcggcgcggcggcgccgctacgccgagctgctggaggcgggcatgaacttcacgcaggccgcgcgggcggtgggcgtgtccaaacgcaccggcaaggtgtggcgcaacggaaggacacgatcgaacggcaggaacgagaagccatcggtggactggtatcgttccaccgtggacattccccaaaagatcagttcgaggtatctgagccaggacgagcgcatcagcatcgccgactggcggaaggccggcatgagcgtgcgcgggatcgcgcgcacgctcaatcgtctcgcgtcgaccgccagccgcgagctggtgcgcaacacgaatcccgcgaccggcatgtacgagccgtaccggccccagcagatgagcgcggacggcccagacgacccaagcccgcgaagatccatacggtgcccggcctgctcgcatacattcgtgcaggattgcgggcgcattggagtcccgagcagatcgcggggcgcctgcgcgccgatttcccggataatgatgctatgcatgtgtgcgcggagacgatctaccaggccatctacgtccaggccaaaggcgaactgaaaaaggacgtcatcaaggccctgaggagcgggcgcgcccaacgccggccgcacgggcaggcgggttcgcgcaggcccgtttccgcgagctcatgatcatgatcagcgagcggcccgccgaagtcgaggaccgggcgatacccggtcattgggaaggcgacctgatctgcagcgcggccaacaaaagcgcgatcggcacgctcgtggaacgctcgacacggttcacgatcctcctgcacctgcccgacgggcacgacgccaaacacgtccggcaggccgtcatccggaaaatgcaatacctgcccaagctcctgaggaactcgctgacctgggaccagggaagcgagctcaccctgcacaaacgcatctcgaccacgctggacatgcaggtgtatttccgcgacccgcattcaccctggcagcgcggcaccaacgagaacaccaacgggctcctgcgccaatacttccccaagggcaccgacctgagcgcataccccgaggactacctcgacgcggtcgccgaggaactcaacgaccggccccgcaaaacactcggctacaggaaaccatccgagaaaatactcgaactcatcaacacagcatgatacgatcgcaccaatccaagaccgccatcaagagcggcaaaacacacaggtgttgcaaccaccactaaaatccgccaagcccaccttgccgaatggggtgtcgaacatggaatccgtcttggggggggcgtgcggtagtcgcattcgtaacaacaatccgcttgaatgagctgctgagcaaatagcaggtctacatgcctgctttgaaccagccgatggcgatttgagtgcgattgcgtaggcccaaagttgcgaggatacgggtcacggcacgtttgacggaggcaggttcgacggtgagttgattggcgatttcctcgttgatgagcccttcggagatgagtgcgcagatttcacgctggcgaggggtgagtgcgtcgaaagctttgcgcatttcttgctggcgctggctgctggtgggatgcggaacgcctcgttcaagcacttgtctggtgattcgtggggtgagtattgcgtcaccgttggcgatggcgtgaaccgcgtcgatgaggttgtgcttggtgacgtccttgagcaggaagccgctggctccggcgtcgagaccgccaaaggcgtaatcgtcctcgtcgtacgtggtaaggatgagaatgctgatggtgggccagcgtctggtgatgcggcgagtggcttcgatgccgtccataccgggcatccgcacatccatgaggattacattcggcaatggacgatgctgaacggcgagctgttcgagcgtctcgatggcggatcggccgtcagcggactgggcagtgacgacgatgtcggaagcatcgtcaagcatgagttggaagccaagtcgcgcgaaacgctggtcgtctacgagcattatacgaatcatgcggtgtggtccttttcgttcactccgttggacgggatggtcgcctcgacgacccattcgccgtcttcgtttggaccgtattcgaagatgccgcttgccgattcgacgcggtggaatagacggacgagcccagtaccgtcatccttgcgcgcgtccttgcgcgcgggactgccgtcattgcggataatcacggcgacggtgccgttctcgctgtggttccaggcgatgctgatatgcaccacgttctgtccgtgacgtatggcgttggtgatggcttcgcgagtcacatcgaaacacaaatcagcctgagcttcgtcatcggcgcgcgtaccagtctcggtgaacaccgtgacgatgcccagccggcgtgcgtgcgcgagaatcggccgaatgtcatcccatgaatgctggtctgattcttgggtgtgcgtatcgtcaccgttcgccgctccatcgaactcggtcagtgcgcggacggctttgcgcgtgtcgcccagactctctcgtgcgatttcgttgatgccgtgcagcgcatcctccacgcgtgggtcatcggttttgccggccagaccctcagacagtgcgatgattacggtcagatcctggcccacactgtcgtgcagttgaccggctatgcgcgaacggcgtattgcggcatcgcgttggaaggccagctcggctgcccgccggcattcctcggcagctttgtgttcggcttccttggcctgttgcctgccacgtactgcaagcgcgccgcctcccacggctgccaacgttaccactcgactcacccattcggtcgcgagaacgtccgaatgcaccatgatggccgacgcggtcatcgacagcatcatgccgatgcctccaacgcacagcccgcgccccctcgctgtccgggcgaacgcatagcaggcgacgagcgtctgaatcatcacgattgagtccaaccgccagtacgaggcaactattaacaataccgcttcaagcgccaaggcaacggctggcagccagtaacggacaagcagtatcgcactgctggctatggtcatcgccagcagcagagccaatcccagcggatctttggcaaacgtatacatggtgtcggccggcgctccgatcgcatgctcccacagcatcgctgcacattcgaccacggcgatgaccagtggcacggccaggaccgtgaccttattggcctgcgcggattgcggtttcatggctcccattgtggctctttttgtatgatgttgcgtgcatgtcagcatgtgcgtatcgtgtcggccacgctgcggtgtagcgcggggcgaatctgcgtgaactggatgaggaacaatgccagccagcaggccgtgcccatgccgattacgcccggccatgggatttcggccacggggatgccgacgagcgccgcggatcttgcggcgaaaacgcttgcgctgacggcgaccgggatgagcgagagaatgaccgcgccggcggccagctgcaggctctgccagagatacatgcggatcacacgacgtggggacaggccgatgctgcgcagcaatgcctggtcggcgaccatgctgcggttcgacagggcgatgaccgccatgctggtggccagggacacgatgcacagcatcgttatgagcagcagcgagtccgcgtagttcaggctcttcggatggccgcccaaggcgagtatccggccataggatcgcgcgcaggtcagcagggtgaccgacagtcccatggcaagggcgagcggggcaatcgtgttcgtgttgctggcggccttcgcctcggcggaacgggcggcgagcacaccggtcgcggacccgcacaggcgacacacgacacgtccgatgcccaacagaatcggaatcagcatgctgacaaggatgtacatgccgaacgaggcgatgatgccggcccacagcgcgctgttgaatgtctgccccgcctcctggccgaacgcgagcgcccgtggcgtgcccatgccggagaacgccaatgccagcgccgccgccatgacaatcaaaccaagtgcccagtgcgcccaagaccgccaaccgtgccgtatcccgatggctcccgtgccgcgaatcacctcgatgggacggatcttcgctgcgcgcagcgaggggatggacgcgcccaacatgcacgtggccacacccaacagcagggatccgagccacgcggccatcgacggcgtgaacgcaggaggtgcgaacgagccgaatccatcggcgaagctttccgcagccatggcgttgaactcgggaaccgccagcaggctggccggcactgcagccagagagccgatcagggaaccgaacaggctcgccacacccacgagcatccacatgctggcaagcacctgactcgggctggcgcccataagccgccattgcgcgaacgtgctgtgaatacggttgaccgtggccgagccgaccaccgtcaacgagaagaacgcgagtaatgacaccaccacatagatcgtgaccgacaccatgccgaactcggccggatcaagacccgcctgccgcgcggccaatgtgaacgacggagacgaggtccacacgaattggttcatgcatatgcccaccagcgtggtcaccactgcgaccaccagaatcgtgggtacccatcccgtgacattgtcgcggaacacacgcagcacatacctagccacgatgagcctccttccgctgctgcggatacgccacgcgctggaccggtcggcccggttggacggattggataggctgggcgttcaccatcatcgggccgacagaccgcgccgccgcaaccaacggcggcgacccggccggtacgaaagtgcggcgtatgccatcggcaatctgctcggcggtgagtctgccagcgatgtgggtgacctgaccgtcgcgcaggaagatcacgtggtcggccaaagcggcggcatccgtgtcatgcgtgaccatgaccacgctggagcccgcatccgccagctcgcgcagcacctgcagcacaagctcgctgttcgcggtgtcgagcgcgccggtcggctcgtcggcgaacaccaccgccggacgcatgagcagcgcacggcacagggcgacgcgctgctgttcgccaccggacagggcgcttaccgtcgtcttcgccctctggcgaagaccgaaccgggacagcagctgcgtgacctgcacgtagtcggccttgcgatgggcgagcgagagcggcaacatcacgttctcctcgaccgtcagatacggcacgagattgtattgctggaacacgaaaccgatatgcccgcgaatgaaccgcgaacgccgttcctcattcagtgcgtagacgtcggtaccgccgatggtcacccgcccggaatcgggcctgtccaatccggacagcacatacagcagcgaggtcttgcctgcgccggacggaccgacgatcgccgtcaagcccgctccatcgatatccaacgaaacattattgagaacagtctgcgtgtttgcgggtcgggaggcggttcgagcatcgaaccctgtccgtttcaccagtccgagcgcctgaatcggtgtgccggcattttgccaagtcatgaggtagccccctgtcgtgaaagttgacgccgtttttctcaaccttcgcgccaggggcatggcaggtcgaggtaaacacggaaagtgacaccctagggtgacagattccagtagcgttccatgaccggcacccaatatgccctcaaccagaccagcgacaacgaggacctgcccggcatcgtccaactgcccgcctatgccaagtatgatggacggctgctcgtcatacttggttcctccgggaagcgaatatccttctgtcgtttgcggaaacaagccctgccgatgcccaagaccgccagataaagcaggaacatcacgggcacgacccatgtcacgtaccgccacgggtcaatctggaacgtatcgaagacgatgaacatgacgccccacacgttgatggcgacgatcgccagaatctgggcggccgccgaatcgaacctggattcggccgggctggtatcgttcgcgtcggccggaacgtcaggcgtccgcccggcgcgacgcatgaagccgagcgccgcccacacgatggccgccaccaacgccacggccgccggcaccaccagcttccagaactccccgtcattccagccgtaccggatgacggcgcacgtgatggccgtgacggcggccacgcccaatgtggcggaagcgccgaaaaaccacagcagaccttgattccgacgcccaccatgggaggcccgcacctcatcgtccgcaaccatatcgtccccgcattccataaagtccgacgcgtacgcatgccatctcaattatggcactcaaagagtcaatcagacaacatgctgtcaagcgatcgcatgacaggaatcggctatccgtcaatgccttagggtgctgtcgatgcatatccgattgaccgatgcttctacatgcgtgccgacatgtgccggtccttcgcgtccgcgtacgcattcttacatcacgacctcaaactaatctacgaaaaactttaaacagatatctatttgattttaatattatttatggtatacttaattttattaaacccgccgtgaattgaaggaggcaggtatggatacgacgatgatcccgccgtggatgtcgaacctcgatgacgaggatatgacgttcatcaaacggtttctgctcgcatcaggctccatgaaggaggtcgccgcgcagtacaacgtctcctaccccaccgttcggcttcggctcgaccggctcatccagaaaatcaagttgggcgagcagatcgagaacgagccgtatatcgcgctcatcaaacggctcgcggtcgacgacaagctcgacttcgacaccgccaaaatcctcatcagcgaatatcgcaagcagctcaagcaaggagagtaatcatgattggcgccacaatatttgccgtagtgtttttcgtgtttctcatcgccatctgcatcggcttcatcatattgcagatcaggctttcgaagatggacagcaagtggcccggtctggtattgcccgccatcacattgctgctgtcgcttgtggcggcgattaccgtcttcgccagggcggacatcggtgcgtatggcaacatgtggaacgtcgtgctttccgcattcatcgcgttcctgtccaacaacgtatccaccatcgtgctggccggcatctacttgtatcagcgtgacaagatcaatcgtcgcgccgagctggcccgtatgaacgttcaggacctgtaactcactgtgcaaaacacgcagactgaaccctacgccgcttatgccgactcatcatcttttgcgccgcttcgcgcagcttggatgattaagccggtgacgtggtcgcagggttcgtcgcgcaatcggagccggacgccctgtcatttcggctgattccgtacatcctgttccgccgcgaaccgttcggcgatttgccgtgcgtggatgttcttggcttcgttgacgaagtcggcgcatgccttgctgccgtagagcgcctcaccacacgggtcggcgaaacgcggatcgccgaccagcgcggagcgaatggccccgaacgagccggacagcggcatggcgttcatcacggtcgcggtttgattctgtgccgcccgggtgcgggcggtcttgaccagaccggtctcgtcgcagtagcgcaacgtgcgcgtcgtcacgccgctgatcaatgccgcctgatcaatgggccacaaccggcccgtatccagcggattgccctccacatcgaacgcgccggaaccgttgacggcgttcgccgtgttgtcgttctcgttcatgatcgatcatcccccttgaagccgattatcctctacccgccgtgcgtgtttcgcggcgttgccgtcaggatagacgtttacgcaacgtcaaccgcaatcgataatgggatgtatcgttcaagccaggcaatatgccgtcaagcaatcgcatgacagcaccatgttcggcacataccagatggaagaattggcaaaccttaaaaataccgcggttattgctgtgccgagaacgccaatatgaccatagacgtgctttcccgctacacgttattcacctgtcatgcgccgatatcaatcaaaagacacttgcataaccaccgctacgcatcgccaataacataccgatgagccagaatgaggcccaggccacgatgctaatccgtaaataatactggtcagagtggcaggtacattggtcctatggctaagcgcaaacatatcggcactgttgttattgcaatactggtcgctattctgctgacggtgggcgtttccggctggctattctggcagtcggtacaacgggtgatcggcgaggcgcagcaggcgggcgaatatgcggctgaagcacagcaatccgtcgggcagggcgacttcaagcaggcgcttgagcagatggacagcgctggcagtcacatcgtcacggcgcacgacgaaacccagggcgcgctatggcaggccgccgaatacgtgccatattacggttcggacgtgaaggcggtgcgcggcatgctggatgcggccgccgacgccgcgaccaacgccctgcccaaaatcgacagtgccgcgcagggcacgttggtggacttcaatatcgaagagctgctgtccggcatgaacttctccgacggcacgctgtccattcccaaaatcgcctccatcaagcaggatctgtccgacgccggcgtggtcttgaagcgcgtcaagacgtcgatttatgcgctgccgcaaccccacacagaacagatcaccgaaatggtcaaccagggcaagcaggtagtggaccaaatcgatgaggctttcgacaccttgaacaccatcatcgagaagattccgggctgacgttggttcgttcttgtcgtatattggcgtaacctccgcataaggctagtccatacaaatttacataaataattctttagctatgtaactataagctaaagaattatttatgttaaaatttgggataggaggtgccaatatgccgacacgcacaccaatcccggtcagtcgggcgatgcgtcagatatccgccaacctcgatttggcgcgcagacaacagcgcattcccgtagccttgctggccgagcgggctggattatccgtgccaacggtcaccaaaatgctgcgtacgggtaatggcagctttgagaacttcctccgcattgctcgtctgcttggactgctgggcggcgtacagcaagcgacggaccctcttaacacagatatcggcaaactacgcgccgacgaagacactccgaaacgtattcgatagcacagcaggaggcgcaacacatcatggaagcaatcgtcaccctgcagctcaacggcacagacgtcaccgtcgggaaattattcaccaatatcaagcgcggcatcgaatcggcaaatttcacatacgatacggcctatatgcgctcttcaaacgcagtatccctctgtccagagatgcccctctcccccggaacgttcccggccgagcataatgcgatgcatcgcatctttcaagactgcatgccggatcgttggggcaggaacctcatgcttcgtgcagaacatcaagatgctcgttcggagcatcgcacagcacgcacactatttgagggagatctcttgctatccgtcaacgatgagacccgacaaggcgcattgcgcttctggaacaacgacggtgacgcgctagctcccagtgagaccggcggtccaagagaagtgaccattcagtcccgcatccatagcaatgatgagcagctgctttgaatccggcattgcgcggcttcgcgaagcaaacgcacaatgacttcacattcccgccttgcaccagctggctgcaatctgcgtaggtcatgtatctgtaggccggcacgactgcggctgatgggtgcggcgaatcgtgaggcaccgtctcctctttctacggcggcggcatggtcgccggccagcccatcggcaccatgatcggctctcgcatgatcaacaatgcgcaagccggcttcatcatcggcgccgtgatcatgctggcttccggattcgtggcgcttgccatctgacctcgcgaggaatcctcaaaggacatggaacgcaccaagatgacgctcaaggatctcgctgtctccttccacttcccgaagttctccacctcgcgtgacttctacaaggcgttcggctgccgagtatgcatgttgctcagctcccagatgatctccgtgtaccagctctacatcgtcgaggattacgtgcaccagaccaagaccgaggctgccggcaccatcgccaccatgtccgtcatcaccctggtcgtttccctgaccgcttcgctgatctccagcccgatctccgacaagatgcacacgcgcaaggtaccggtcatcatcgcctcgctgctgttcgcgattggcgccgtgatgccgtggatcatgccgagtgtcacgggcatgtacctgtacgcgggcatcgccggcttcggctatggcgtgtactcggccatcgaccaggcactcaacgtcgacgtgttgccgaacaaggaagaggccgacaaggacctcggcatcctcagcttggccaccacgctcggccaagcagtcggccccaccatcacctccgtggtcaagaccacgaccggcacctacacgccggcgttcgccatctccatcgtcatggccgtgtgcgctgccgtgttcgtgctgcgtatccagaaggtgaagtagccgctgcgagtgcctatctccgtttcaaggggctgattttgactttgcggaacatctacttccgtttcaaggggctgatgccaaagtagccactggttaaaaacggcggaatagtgatagaacaatgccatttctatctgcgttccgccagttgaccagccccttgaaacggaagtagacctccggcaaacgccaaatcagccccttgaagctgattttgactcagcatcatgcagcgcagctatatcctcagtgcgggtatactattccgggccgtcacgacgacgcctatggaacgcacgcatggcaaagagagaaacatgagtcagcccgacaccgacacggcggcacaatcgccgtcctcgcaacaggaaccgcagattcagacggatggccgtcgaagccattcggaacagatgaaccaaccagcgcaaaccagccagtccgagtcgtcacatgatggcaaagacgagcacgccctacataccaacctgaagcgcggcatggaatcccgccacctgcagatgatctcgttgggcggcgtgatcggcaccggcctgttcctgagctccggatacaccatccagcaggcgggccccatcggcaccattctggcgtatggcatcggcgcgctgatcgtctacctggtcatgctcacgctcggcgaactgtccgtggccatgccggtgaccggctccttccatgtgtatgccgagaagttcatcggccctggcaccggcttcgtgatcgcgatccagtactggctcacatggacggtggcgctcggatccgagttcaccgccgccgggctgctcatgcagcgctggttcccgaacagtcccacatgggcgtggagcgcggcgtgcatcacactcatcttcaccctgaacgccttgtcggtgcgtttcttcgccgaggcggagttctggttcgcctccatcaaggtgttcgccatctgcgcgttcatcgtcatcggatcgctcgccatcttcggcgtcatcccggtcgccggctaccaacatgccccgatgttcggcaatctcatcaaggacggcgtcttccccaacggcttcatgccggtgttcgccacgattctgaccgtcaacttcgcgttctccggcaccgaactcatcggcgtgaccgccggtgagacgagggacccacaaaccgccgtgccgaaagccatccacaccaccctgtggcgtctggcgctgttcttcatcggctcgatcaccgtgatgtgcgcgctgatcccgtggcgccaggccggcgtgggcgaaagcccgttcgtgctcgtcttcaacagcatcggcatcccctatgcgggcgacatcatgaatttcgtggtgctgacggccgtgctttccgcctcgaattccggcctgtacgcctccacgcgcatggtgtggtcgatgggcaacgaaggcatgattccgcgctggttcgccaaaacgaaccgtcgcggcgtgccgatgctcgccttgtgcgccgcgatggccggtggcctgctggcgctcctgtcttccgtgatcgccgcctcgactgtgtacctggtgctggtggcgctttccggcctgtccgccgtggtggtgtggatcgccatcgcctactgccagatcgtgttccgtcgccgttggctggagtccggccattccaccagcgaactcaaataccgcacgcccggctatccgtacgtgtcttgggcggcgttcatcctgtgcaccgcatcgttcgtattggtgattttcgacgtggagcaacggttcgcgctcgtggccgagctcgtgttcatcgtggcctgctatggggcgtatttcctgcaacagtgggtacgcaagcgcaaaaaggcgaccgaggccgacgacctcgatacgctttgggtcgcgcgtgactgaacggctcgcgacctaccggcgcaccgctattcgcgccgtgaacgtgcactgatccaacgcaatgccagacccagcaaatccacaccgccacgattgcccatgatgtgggtttgagcgcggccggggagaacggcagcacctgcaggccaatgatgattaagccggcggccagcagcgaagctgagatgaccataccgaacttcttccagtcaaggccttcgcttgcctcttcggcactctgcggaatcgtgtcgaaaccggtgtagaagagcggcgtcatcaccagcactccgggcagaaacgacccgaccatggtaaccgcgccggacgtcgagccgatcggcagcagaaacacggcgcccagcacgaaggcgatcatcgcctcgaccgggccaccgccgacgatcatccagtcaccgaccagcagcacccatacggtgccgatgattgcgccgaatcccatggtgaagtagttccacaggctcagcgatctgaccatgccgccgtcgtcgccgctgccatcggcactactgtcgccgttgccgttgttaccatcctcgtgcacaggaatagcggcactgggcaggccagtcgattccaccaaactggccgtcatcgtgcttgacgggctgaatgccgtggatgcggcgaccatgaccagcctcctttaattcggcctgactgtgatgataacgccgttcacgatatgccgtattatgaacgcagtgagagcccgcttcaccggccctattcggctcatgaataaacttcgcctatctgcggcactgaacacatgaccataatgtgatacacgtcacttcctgaagtacgtagtcgttatggaatcacccgcacgtttcccgtatcggagctgtacgatagctgtgagacagggggtcgtcagatttcggggggagggttccggaaacggtccgactgcaggatgcaccgggccgtgcgacacatgtcaacttgcgtattcacgccaaactcaattgagcaagccgattctcgtaaatggccagaagcggaacaacgccacaccttggatatcgtcgtatggcactagcccattgttgccgtcgtcaagatggtatcgagaatctctggaattggagcgattatcaccaagcacgaacacgttgccgtcagtaacggttacggaaaaaggactgtcgcttggattcacgccggacttaagataagcgctttcatcaatgggtttgccgttgaccgtgatgggctccccggatcccttgcaggcgacggtatcgccgggcagaccgatgacacgtttgattaggtaacgattgctgtcgattatcgacatcagattggtgggaagctgctccccctccatccagtctgcgggatctttgaacacgatgatgtcgccacggtgcagtgcaaagagtctcggagtcaatcgcgaggcaaatacgcggtcgccgatttgcaacgtgtcttccatgctacgggatggaatcacatagacgttgaacacgaaggtgcgtcccagcaacacgaccagcatcaccgcgatcaccgtcagcagatagccgcgaatttcactccaaacggagggctttcgcgcatgtctcctcgactgtccacgcgcttttttgctatgacgccccaccatcatatcctttccgaccggtaacgcaacaccatagtcctcaaaccatgccgttacctacgcccatgtttgagctcagctgtcacaccagcggttcgcgcacgtctagttcacaggcgatgccggtttccttgcgggcccattcggccgcctgcagtgcggcgatgttccataatgcgcacggcactccgccaaggtccggatgcgatgcccagaatgtgaggtcatcagcgtatgcggtgatgaccgattcttccgtgactggcatgatcgtgtggtacagacggtccgcaagcgtggccacgaattcgttggccgcggcgaacgtgtcgataagatgctgttcggcggtcaccggcgggccgaccagctcccaggattcgacgtccgtggcgctccaatgcgcggcttcgccgtccacatcgcgttgcaaagagacgaacagcctggcgaactcatccgaagtcagtcccgtaacccggcgtcgggttgacaattcaatcggagtcatcagataccgttcctttcgcttcgttcattccgttgtctcgctggtttgatttgctgccaaccggtacaaagcctatctcgcacacctcacgatagcccaaaccaccggcatggccatgattgccagccctacgaccagtgaccatgaggagccggcgattccggtcagattggtcatggcggcggagacgtcatacatgccatgagccacgatcagcggtgtaatcatgcccatacggcggtacagcagcacggcgagcactgcaatcagcacgcggtggcgtgccgccggcacaatggccctatcgagcatcgccacatgattcgtgcggtccacaatcgaggcagcatcggtttccattcggttcatgcggccagactatcgcccgttcttgccgattgcctgtaagcaggttcggatagactggcgcgagaacaatgcgagaaagaggcaagaatgacccggaaacggtcacaacagcacgacgcacaacgcaaaccgtcctggcgcgtacgctggaagaccatgagccgagccgtagacatggaaatccgcgaacacaaaagctcattcgcggtctatgtggtgctgcgcatgctggtgctcgccatggcaatactccagttctttaacggcgactacgaaaatgtgttcctgtgcatcctgacgttgctgttgctgttggcgccggcgttcatccaggtgcagttccgcatcgagctgccttcggtgctggaagtcatcgtgctggtgttcgtgttctcgtccgagattcttggcgagatcagttcgttctatgagatcttcccgttctgggacacggtgttgcacacgatgaacggcttcctcgccgcggcgatcggcttctcgctggtcgacctgctcaaccggtccgaccgggtgaagttcgagctttcgcccctgtatctggcgatcgtctccttctgcttctccatgaccatcggcgtgatctgggagttcttcgaattcggcatggaccagttgttcggattcgacatgcagaaagacgccatcgtgcattccatcagctcggtgatgctcgaccccacgcacaccaaccatgcgattcgcatcaacgacatcacccaggtcacggtcaatggccaagacttgggcctcggcggctacctcgacatcggtctgatcgacacgatggaggatcttatcgtcaacttcatcggcgcggtcgtgttctccgtgttcggcttcctgtacgtgaagaaccgcggcaagaaaaactccatcatcagtcggttcgtgccgcgccgcaagtccgccgaccgcgattatctgcgactggtgatcgatggcgggagcgcggctgatgccaaggccaaagccggcggtgccaacgctgacgatagtgctaacgccagtgcggccggcaccgattcagctgatacagccggagccaaagccggcaatgccgacgccgctccgaccgtcaccgccaagccctgagtacgctctacagcactttcgaagcgtcgaaacggtagtgcccggtgaccgtcatgtacttcttgaaggcgaagtagtcgttttcgcgctgccgctgcgccatgttgtgaatcacgtacggtgcacgccccgcaatcggccggcggatagccgccctgatagtagccggaatcgtaagccggatggttttcggcgtccttgcgcgcacccgccacgatatccgcgtaatcgtccacaccattgtcattgaaatcgaccgaactggcgactctcgaatacttgcgggccgcctcgccttgtgattcgatgattcatgaacgtattcggctcacactgtaatcgtccgacccaccgctcgcgcctcccaatccgcccggtgcttgaacttgtgggactttggccgtaccgcgaccgcagcatcgccatgctcatctccagccatcagctcaacgaattgcaggagttgtgcgggcgattcctgttcatcaaaggcggccggcttgcggacgaattcgccggcgaacagaagcggatcacggttatcgagcttggccggccgctcggtgtcgcgaaacgtgcggcggtcgcggctttggatccggccgccgtcattcatactgattctgccggccgtgaacctgttcaactccgatttcatgaaagtcagcggaaagaccggttcggtgagtgtgctggatttcctcgctggcgagttcgtcgtacagaacatgctgatgctgccgatggtggtcatggcctatctggtggctggtgccatctatacgcccgtggcctccggccgcatgttcctgtacaaggatctggaccgcgccacgatcatcaatgcgaaaatccttgccctgtttggtatctacgccgtgtacgtggcattgcagacggtggtgacggtcgctctctacatcctgtacatcgcgcgcttcgactacgcttccggcacactgctgccggccgcaggtgcggacatcgcttcggatgtggcctccatcgccggcatcctgtgcgccggtgtggtgactatactggtggtggccgcccttgccacccggttctcgaccggcagtacgagagcgcggaccacaccgtgcacctcgatgtgaaggtggacgaggatacggtgtggcttaacagaaagcaattggcattgctgtttggccgcgatatcaaaacaatcggcaagcatgtcggcaatgcattgagggaagagctcaatggattttcagttgtcgcagaatttgcgacaactgcatctgacggtaagacataccaagtcgagcattacaacttggatatgatcctgtcggtcggataccgcgtcaaatccaaggaaggcatctaatttccggcgatgggccaactcagttctgaagcagcatctcgttgatggttacaccatcaatcacaagcggcttgacgcacttcacgccgtcgtcaaggtgctatcgaggcccaccgaaccggaaattgctggcaccgcagagatcttggaacgatatttgccgagtcttgtgctgcttaacgactatgacacaggcaatgtccctatacccaagggcgacgagtcccagtgggtcttgacctatgaggacgcgatgctgttcatccggtcgatgccgttctacacgcaatccgatctgttcgggagggaacgcaacggttcgttccaaggaatcgtcgcaggactctaccagacgttcggaggcgaagaactgtaccgttccacccaggagaaagccgcgaacctgctgtatcaagttgtcaaggatcacccgttctccgacggcaataaacgttgtgccgccgcactgttcgtgtatttcctgaacggcaacagtatactgggcgacgatgactcccctgcttgtggagggtaacgccttggcggcgatgacgctgatgattgcgctgtccgcacctgcggggaaggacacgatgatcgccttggtcgagaacttccttatacggcatgaatcgcaggagatcaattgagagaccgtcaatgaagggtgcacatcaatcacgttctagcattgcgcgactatctgtacgagtcgtctgaacgatctgctgggagtgctcttcgcggaaaaccaacagcagaccggaggccgcatccactatgtgttgttcaacccttgggccgtgcgcagcaatgaggcattgaacagtttcgattcgccactgatgaagctgctggcgcgtgccatttacgccattgtgggcgtcagcgtcgaggaggcgattgcccccatcacccacttgatcgacaacccgccgcacaccgcgctgtcagcgttcatcaagaccaaacccgtcgatctcactatgaacaccttcgacaggggcaaggcggtccggttggacgatatcaccaaaagttgctgaatcgctagctgtcatagcacaaggccttagacagaacacccagaaatcgaacgggtagatggatcgcgtctccccttgacttccggcaagcgcacgccaatcatggggcgtatgggtattgcaatcaaacgtatatatgaagagccgactgcgtcggacgggtatcgggtgctggtggatcgcctgtggcctcgcggcatgacgaaagagcgtgcggcgttggacctgtggctgaaggacgtcgctccctctcccctcctgcgcaaatggttcggccatgaccccgccaaattcgcggaattccgcatgcgttacatcgccgagctcgacgccaatgccgccgtggacaatctgcgccacatctgcgcggagcatcccgacgtgaccctgctctatgccgccaaggacccgcacatcaatcacgccctcgtactgcgcgattatcttaactgaatattgactcaggacgaccgtcgtttcagttcatctgctagattctcgccgattttcgtatctttgaatcgaagtgcacagtcgtcactccttggattgccaagtaaagggatgcctccaaaccaaatcaatccgtcatcgattatggcaaaatcggaacacgattcgatggtccggacaatgcacccaatagcacgcagccgattaatattccgttctattcgtgttctggttgccaccgcagcagtcgccggcaaacggacataaacttcgatgagcgctttcctgtcggccagtcggagcaattcatcgtcaattgcgctgagtccctgttgtgatacatattcagccgagataatcagggaacgtgcgcaaccggcaatatcctttcggagtatctctgcataattcgtggctgtaacgatgctgccttcgaataatccgtcagacagggtgtcgagcaacgcatccgcagcatcttcgccctgcgtcgcggccgtcatgcaagcgcgcaacgcttccgtctttgcactgagcatgtccattttctcagtatggtcaggatttaccgaatatccttgatttgcgtatgccttcagccgttttcgatacatgacagcggataaaggcacggtcacgtcgatgtaatcatagacacgaacctcggtcttgccatcattctcgcgatgaagtcgccctacatattgcgagagagtaccctcaaacgagaccggagcggcaagcagcagcgtgtcgaaacgcttctgatcgaatccttctccgatatagctacccgtagccactacagtcaggctctcattattcggcaccaaggatagatcatgcattttttttggttattcgctgtttgcggtggggcgggcatgggctagtgtttcgggttcgatttcctgtcagaaaaaataatcgagtgcgggattacggccggtaaggctcctgctgtggatgcggatgcgcgtcagccttacggtgatgctttcccaaaacgcggattgtacgaggtgtgggacggcacgcggattcggccgttttccgcccgccgtcccacagcgctcgctatgaacggttgtgcataatcatggagctgcagcgagaatcggcgttattccgcggtttctacagtcgtcggtgtgggacgctacggacgttaaacggttgacttgtctgccatcccgcgctcttgagggacggcgcggacgacaaacgattgactcgtctgccgtcccacagatattgggatgtgtgcggctgcctgctgcctatagcgggtgtcggtcaccccccaccgatcgtcccccaccggtcaccaccctgcttggcggaaatacgcgactcgactttctgcaggcatcatggcggcatggcgacggcggacagtcgaagagatccccatgatgcctcaacagccatcgcccacacacatcacagctatcaaccgcaaatatcaagaggccgaaaatctatgagacaagcaaccccggaaagccccagaccctacaaatggctttattgcaagggtatatgccggttcaaactccactaatagaacaaatagaacagccggcttaggtacggcgcggcaaatggcgcaaaccggccgcgatagtagtagcgtggtgcataccagtacaaccatgcgaggagaacagccatgatcaatgaggaatacaaggccatgcttggcggcaagtccgtgattcgcgggctgagcgagtacgccacgagccgcggtgctgaaatcggctaccagaacgtgttcgattacagccttggcaatccctcggtgccggctccgaaatccttcaccgacgccatggtcgacctctacgaaaacggcgatccggcggccatccacggctactccccctcgctcggcatcccgtccgtcaaggacgcgatcgccgaaaacctcaacgaacgtttcggcatggcatacaccggcaaccatatcttcccgaccacgggcgcggcgggcgcgctgtcccacgcgatgcgcgcggtgaccaagccgggcgacgagatcatcaccttcgccccctacttccccgaataccagccgtacgtcaagggcatcggcgccaagctgaccatcgtgccggccgacaccgagaacttccagatcaacttcgaggcgttcgaggccgcgctcaacccgaacgtgcaggccgcgctcatcaacaccccgaacaacccgtccggcgcggtgtattcggcggacacgctcaagcgtctggccgcgatcctgaccgccaagcaggccgagtacggccacgacatcttcctgatcagcgacgaaccttaccgcgaaatcgtgttcgacggagccacccagccctacccggccagcttctatgcgaactcgctgacctgctactcgtggtcgaagtcgctgagcctgccgggcgaacgcatcggctacgtcgcggtgaaccccgcagccaccgacgccgacctgctcgtgccgatgatgggccaaatctcgcgcggcaccggccacaactgcccgccgagctcgatccagctgggcgtagccaaagtcatcgaccagaccgccgacctcaacgtctacgagacgaacatgaacctgctctacgatgcgctcaccggcatcggcttcgacgtggtgcgccccggcggcacgttctacatcttccccaaggcgttagaggacgacgccgtggcgttctgcatgaaggccaaggaatacgacctgatcctcgtgccgtccgacagcttcggcgtgcccggatacttccgcatggcctactgcatcgacaccgagaaagtcaagcgttcgatccccgtgctcgaaaagttcgcccacgaggtgtatggcctgtaaacacgggccgcaagtaacaaacacaagaaaggggttgccatggaatacaccgaagacgccgatcatcgcgaactgctgctgcacagcgcctatgactccgatacggtccgggccatggagcgacccctgctggacaaaggcgtgccgctgatgcgcatggccgcccaggccgcggcccacatggcggccggcatgctggacgacgaggatctggcgctggaggacacgtcgatcgtgctgctggccggggccggagacaatggtggcgatggtctgttcgcggccgccgcgctggcccaggagggcgcgaacgtcactgccatcgccgtgggccggtcgctgcatgaggccggattcgccgcgctcgtgcgcgccggcggcaaggtgctggtgcttgatcccgcggctgatattcccggctgcgcgttcgggttttcctccggtgaggccggtgagcgattgcagaccgccatcgccgtggccaggaaatcgcatctgatcatcgacgcgatgaccggcatcggcattcaaggctcgctacgcggcattcccgccgcgctcgcctccgcccttggtctcgacggcgagtctcccgatgagcccgccctgccgaaccgtgagtcgtcaggcgattttccgctggtacttgctgtggatacgccatccggcgtcggtgtgaacgatggttctctgcccggcccgtacattccggccacggtcacggtcacgttcggcgcgatgaagccgtgcgcggtgctgccgcccgccacgttcgcctgcggccgtatcgagttgttcgatttcggattcgatatcgacgacaaggatccggacgtcgaggtggtggataattcgttcgcgtccgacgcggtccgtctcccccggttcgaggattccaaatattcccggggcgtggttggtctggtgaccggctcgcagcgctaccccggtgccgccgtgctcaccaccggcgccgccgcccgcgcgaacaccggcatggtccggtatctgggcccggagcgcgcgcagaacatggtgctcaccgcactgccggaagccgtgatcggcaagggacatgtgcagtcctgggtcgtggggtccggcgtgcccgaggctagcgtcgagggcgccgacggcgatatgcagcgggacaccatcgccgcattgctcaagcattacgcgctcggcagcgaggatgagaacaaggacgcctacgacatgccgccaatcgtggtggatgccggcgcactcgacctgctgccggagcgtgtgcccggccaggtggtgatcacaccacatgccggcgagatggcgaaactgctcaaccggttcgaaaccaccgccagcaccgcggagcatgccgattcgcacgagccgtacaccgccgacgacgtgcggttgaacccgttggccagcgcgaagcgcgcccacgagctcaccggcgccaccgtattgctgaagggcgcggtgaccatcgtggtggatgaggaccacgtctatgcgtcgggcagtgcgccggcctggctgggcaccgccggcgcgggcgacgtgctggccggtctgaccggcgccctactcgcccagcaggatgacgtggccaccacgggcgagaccgtggcctcggccgcctacctgcatggcctggcggcggcgatcgcctccgaatccgagcagcagggctggcaggagccggaactgatcggccgcgagcatcgccagcgcttcatgacgctcggccacccaatcgtggccggcgacgtgatccacgccatccccgaagccatcgccgacgtcatcgcataaccttgttgacctccctctgacgagggaggtgtctcggcaaagccgagacggagggagagaaacataagcctcaaactccacataccccgacctatacacaaaccccgtacactaaatcgcagaccccacccaacgacccaaacacacaaggaaccatcatggccaactcccccatcaccgacgtgattttcgacttctgcggcgtgctgctggactggaacacccgcgcatgccttgaaggccgattccccgatgaaatcgtggaacgcatctgcgccgacgacgacccctgcggcttcttccactacgaggaccgcatggacgccggcgaggatttcgcggacatctacccggatgtggtacgcgaacaaggccaggaactcgccgacatcttcaagttctacatcggccactacgcggacgcgctgccccgcacgctgccgggcatggtcgaactgctggcggatttgaaggcccacggctacggcgtatggggtctgaccaactggtcgcatgagaccttccacctggccttcgagaagtacccgcgcctcgaacagctgctgcagggcaccgtggtctccggcgtggagaagatgcacaagccgaacgccgacatctacgagctggtcctgacccgcttcggtctcacggccgagcgctgcgtgttcttcgacgacaccgccaagaacatcgtcggcgccaacgaggtcggcatccacagcatcctcttcgagaacgcgtcgcaggcgcgcgaatcgctcgccgaactcggcgtacgcctgtaagtcgccaaatattgcgtcgcggcagttgaagtctatggacccgtccttgacgacggtgaccggccgtttggcgaccggcatgtcgcactgttcggtgagcacttcaacgacgcggcacgcggcaccatgcgcagaatcatcatgaaggcgttctggatgttcatcacgtcggcgccgagcctggtcatcaggctcggcgtggagaagcggtcgatgctggagaaggagaaggtctggatggcatcgtactggtcctgcctcaggttaccaatgtggcgcatatcccgttacacagcgtccgcgatatgcgaggcatctcatattgtgtcgccatagtggattgatgaggttataaacccgtgtggcgaccatccctagcgatataaatagactttatgacactgctgcagctgaaatacatcgtcaagatcgtcgagtgcggctcgatgaacgaggcctcccatgccctgtacgtctcccagccggccctgagctcgtcggtcaaggaattggagaacgagctgggcatcgagattttcacccgctcctcgcagggcatcgccctgaccgtggacggcgcggaattcctgacctacgcccgccaggtgctcgaccaggccgacctgctcgaagagcgctacaagcacgccaaaccgcgcaagcagctgtgccaggtctccacccagcactacatgttcgccgtcgaggctttcgtggagatgatcaactccatcaagtccgacgaatacgagttcacgatccgtgagacccgtacacgtgacatcatcaaccaggtggcgaacatgcagtccgagatcggcatcatctacctgtccgacttcaataaggacgtgatcggcaaactcctgcgcgagaaacaccttgaattccatccgctcttccgcgcccccctgcacgtgttcatctcacgggacaacccattggccgccaagaagatcatcaccatggaggatctgaagccctatccgttcatccagtacgaacagggcgaggaaggctcgttctacttctatgaggaggcggtctggccggaatactcccccaagcagatcaacgtgaccgaccgcgccacgattctgaacttcatcatcggcctcaacggctacacggtgtgcaccggcatcgacaacggcgacctcaacaacgagaagatcgtcaccgtgccgctcgacaccgacgaaacgatgttggtcggctggatcacgaacgagcgttccaagctctccaaggccgccgaaacctacctcaccaagctcaagtccgtagtcgccgatcacggctacaagctcattgattaggagtaagtaaaacagacatggtcagcagtgagatatactgcgattaagccaaccccgctggggaaatggaagcaagagccggcccctgagtatctcaggggccggctcttgcgctattgagactgactggcaaaaccagtttgatggcctccgactacttggccgagattaccgacgtggcggctgtcgcggcgaagcctttgagcacttcaatcatcacgtcgcgatcttcgacatcaatgttgcgggccgcggcgagcattaccggcagtgactgtgtcaaatgcgaagtgaggtcgccgaatgtgtcgtatccgccagcctcgaagatggcaaacaggttttcgatgaacctgcggcgatgctcatcatcgtatttcgccatccatccgttgatcgtgcgcgccagatactgcgcactgttggcgagcccatcagcctgtacgaattggccatgatcgacctgccagtgcagggcaaaatgctgcatgatgctggcaccgtcgctgctgaccaccgtatagccgtcttccacatgctcgcgggtctcaaacagcatgccgatgatcgacgatcccggtaccgatttatggattttcggcgcaatgcgcgcgtacccatcctcatcgaagagcgcctcatcgaagcctggaccatcgtgcgaatacacggccgtgatacgtccctgaatttcgccgggcacattggccgccgcgtataccgccagattgccgcctttggaatggccgccgaccataatcggcccggcccagcggccggcaatatcagtcacataccgcacagcggcctcctgcgaggcgaccggacggcggaaggccatcgtgaaatcctccttccacccgacgatcgaactgtcggtgccacggaaagccacgtacagcgtgccgtcgcccagttcgaagacgcaggccgagaactgtttggtggtttcggcgtcgaattcatccacgtattcgccgacgcgcaggtcgcgccagcgcgggctctcccccatcgcacgcagcagatcgacgttcatctgcggcgaccacaccttgccgaacatgtcgtcatagcattcggcacgtagcaggtcgcggatggagaccgcgggaatcatgccgctgacgtccgccgaatcctcgtgatagcgcggcacgttatccggcatgcgcgcgtaggccagctgggacagggcgagactgtccgcctcggtgaacggcagtgcggcgaaggtgtcgaaatgttgccggatatcgtcggtgatgttccccatggcggccttccttgttcgaatgtattcgagagaaacgaacctacgacaattctacgccgcgcgagtttccaccacgggcgaccctaccgtctagatgccgatctcgccttcaaggggctgatttggcctcccgggaacatctatctctgcttcaaggggctgttcatccgtcatatcccaagtacaaacggcaacatgtcaacgtcattccgccattttcatgctgcctctacttgggcaccagccccttgaagcggaagtagacctccggaaatcacgaaatcagccccttgaagcggagatagcatccatttaggcccagattgcccgttacagcatcgggtaatacttaccgtgatcgattttggcggcgatatcacgtaattcggcagcatctcggcggtcttcttcattaccttgcgacaacttgttcgctttactgtccagatgatgctcgatgccgaagtaactgcatatccccacgagcgcaaacagccctataccaactaaccagttcatagcacgctccttgccaaagcttctgccttaatatggtactgctgttcatggatcgtaataaaaaaagcgggctcgcaagcccgcttttggttttaggttgaagacgatcaggcgccgtattcctcaaggtaggcggcggcgcgctgctggatatcgtggctgagcaacggggtgccgtcggagttcttcatcttggcggcggcgtcgaagatctcgcgcacgttggcgatggagagcaccgggaagccgaattcggcttccacggccttcacggcggacaggtcggagtccttggtcttctccatgcggtccacggagagcacgagacccacgacctcgacgttcgcctcggccttgagcttggggatgacttcgcgcacggcggtgccggcggtcatcacgtcgtccacgagcagcaccttcatgccgtcggtcagcggggtgccgaccatccagccgccgtcgccgtggtccttcttctccttgcggtcgaaggtgtatccaacggtcatgttgtggccggcgttcagcgcgatcgcggtggacacggccagcggaatgcccttgtaggcggggccgaacacggtgtcgatgttgcggggaatcgtgttgtgcacgatggcctggctaatcttttcggcgtagaacgtgccgagcgcggcgatcttcttgccgtcgtcgaaggcgccggcgttgatgaagtacgggctcttgcggccggacttcagcgtgaagtcgccgaacttcagcgcgttggattccaacaggaattcagtgaagcgatgtgcgagtgtttctgccatgatgttccttacctccaagtctgtcctgcggccagtttagcagcgagttcgggacggctgtccagcaggtcgtcaagttcgcgggcgacgcgcagcggggccaccgggtcgaagagcgcggccgcacccacttcgacggcgttcgcgccagcgtacaggtattcgagcgccttctcaccactgtcgatgccgccgagtccgatgatcggaatctccggcaatgcggtgcgcacccgatagacggctgccaggccgaccggcagcacggccgggccggatacgccgccggtgacgttggcgatgatcggctggcctgtgcgaatgttgatgcgcatgcctttgagcgtgttgatcatgctcaacgcgtcggcgccgtgttccacggccgcgcgcgccggcacggtgatgtcggtgacgttcggcgtgagtttgacgatcatcggcttgtcggtcatcgagcgcagccggtccataagattggcgagggccaccgggtcggtgcccacgctcatgccgccggcggaaacgttcgggcagctgacgttgatttccagcatgtccgcgtcggagtcggcgagcttttccacgaccgccgcgtaatcgtcatcgcaatgtccggcgacattggagatgacgaacgcgcccgcggccttgagcttgggcaggtcttcggccaagtaatggtcgatgccggggttctgcaggcctacagcgttgatgttcgcggccggcgattcggcggtgcgcggcgaggggttgccctcccacggcacgggcgaggcgcccttggtgcatacggcgccgagctggctgacgtcgtagaaccagcgtacggcggcgtactggaaggtgccggaggcggtgccgaccggattcttccattccagaccggccaccttggtgtggtgcttccacacgtggggctcgtacaggttgatgtggttgtcgatgccctgcgcggactggttgtttgcgctcatcgtcactccccccatccgagctgttcgcgagtgaacacgggtccgtcggagcagaccttgagccggccgtccacggtgtcgatggtgcacagcacgcaggtgccgtagccgcagcccatgcgctgttccatgctcagctgcgcggggatgccgcgttcggcggcccaagcggccacggccttcatcataggcagcggtccgcaggacaagatgatcggcttgcgatcgtaggccttcaggtcgtcgccttgttcgagtttgttgagcaggtcgaccacgttgccttcggcgtcgtcgatgctccacgaccagtccgcgtaccgggagacgtattcctcagcgaagtggtcgttgcggtagccgaatacggcggtggcaaaggaggcgtcgtgttcggcgagcttttgcgcggcgtagattagcgggggcacgccgagtccgccgccgacgagaatgtagttggcgtcttccttgaggttgaagccgcggccgagcgggccgagcacgtcgacggtgtcgccggcctgcagccttgccaactgttcggtgccgtggcccacgacggcgaagatcacgctgacttcatcgccgtcgacttcgctgacgccgaacggacgcggcatgagcatgaagtcgtcgtgcgtgaacaggttgacgaactgggcgggcttggcgtgggaggcgatgaacgggtcgcggaatgtcagtcgcatcacgcggtcggtcagttccgtaacctgcgtgatttcgacgttgtggcgcggcgggaagaatccggccgcagtcgcctccgcaaccacatcatgggtgggggtgaaagttgtcatttcattcctattcagcacatcaagctcccccctatcaggggagctgtcaaccgcaggttgactgaggggtagttaaacacactcggctccggtttccagcccacactcacgtatagcccacagccggacaatctacctacctatatacggcaacccgcagattatcgcgcatgtcgagcgccgcctggcgcgcgctgctcgccacaaggtccagcgcctcgtcggcggtcatggattcggagtacttgccgctcttcttccatgcgccgatgatgccgcgcgacgagttgacgatggcgccgctgccctgcttgtcgaacatgcctgccacgtccgcggccgtgccgccctgcgcaccgtagcccggcacgaggaagaacgtgtgcggcatacgttcacgcaacgccttgccttcctcggggtgggtggcaccgaccaccgcgcccacgcgggagtagccgtggctgccgatggtctcggcgccccagccttccacgagatcggccacatgctcgtagaccttcgtgccgtcggccaggtcgagcatctgcagttcgctggaggacgggttggaggtgcgcacgagcacgaagatgtccttgtcggcttcggcggcggcctcgacgaacggggtgatgccgtcggtgccgagatacgggttgacggtcaccgcatcctcatgccacgggtcgaagtcgcccacgccgttcaggtggtgggcgtaggcggctgcagtggagccgatgtcgccgcgtttgatgtcgccgagcacgtagaggccctgctgggccgcgtattcgcaggtcatcgtgtagatgtccacgccggcggggccgagcgcctcgtacatggcgatctgcggtttgacggcgggcacgatgtcggcgatggcgtcgatgatcgtgcggttgtattcgaagtaggcgacggccagctgcgcggattcgatttcctccggggattcgaccgagtcacgcacctcgtcggcaaagctcgccacgacctgcggcggtaccaacgcctcggtggggtcgaggcccacgacgctggggttctgagtgttgtcaatcgcttcgatcaggcgatccatgctgctccttatgttatctacagacggctgaacatcagctgggagccgatgatcgtggcgagggggcgtccggtgacctgccagccgccgaacggggtgttacgagccctggagtggaactgttcagggtccacggtccattcctcagcggtgttgagcaccacgaggtcgacattgtcggcgtcatccacgcggctcaggtcgagcagtcggttgacgccttcacgctgcggctgagcgtcgctctcccccgcaatcacgccatccggatcatccccagtgggcgcgggttcggcgtagtcctcgaccagcgcggccacgtcggttggcacatgccccatgagttcggcgggtcccacggacatgagctcgatcagacgctcatcggaaatgaagccgccgtcgacgagcaccttgtggcacacgccgtacgcgcattccagtccgatgatgccgttgggcgcctcaaggaagccgagttccttctctgccaacgtgtgcggcgcatggtcggtggccagcagatccacggtgccgtcggcgatggccgcgatggtggctttgcggtccgcttcggagcgcagcggcggattcatcttggcgagcgtgccgtacttgagcagcgcctcgtcgctcaacgccagatagtgcggcgcggtctcgcaggtgattggcaatccttcggccttggccttgcgaatcgcctcgaacgagatggcagtgctcacatgctggaagtgtacgtggacaccagtgcggcgggccgcttctatatcgcgggccacgatcttgagctcggtgtcttccggaatgccgggcacgccaagttcgcgcgagaccgggccttcgttcacggcacctgtatcgtgatgctcgcaatgctcgattaggtacaggtcggaggccttgacgttctccagcacctggtccaggatctccggcgtcacagcggaaccgtcgtcgctaattgcggtgatggggtgcgtgagcatggccggcgtcttggcgtcgtcctcgaatccgggcacgtacctgagccagtcggcaacgtcgcttgcctcatgaccggcgcgatccttggacgcgcacacgcacagatcgtaacgaaccggcaattgaacatcgtgcgcagtatcgtactgctgcaggaagtcgatgacgttgtcgaagccggcatccagaacctctttcgcaccggccgcttccaggtcagacacggtctgcccatccagtgccggcaacgtgttcggcatgatgagcacgttcgtgtatccgccggatgcggacgcgcggcagccggagaccatagattccttgtaggtctggccgggatcgcggaagtggacgtgcgggtcttcgaaaccgggggccacggtcagtccggtggcgtcgatatcggcaccgtcagccacggcggaggtgtcggcgaagtaggcggcagcggtcccgggcaccacgaggtcgatgacttcgccggtgttccagaccttgatgttgcgtagggtgatgctcacagtttggcttcctcgtcgcagtagtcgcagcggtattcgagccgttcagagtgcacgaggtggaacatctgcttgatgccgggctcggtggtggtcacgcagcgcgggttcacgcaggagatcacgccgacgatgtgctcgggcaggttcggctgcttcttttcgacgatcttgccgccgcgcaccacgtctacggtggcctggcaggccacgaagccgagcacgtcgaggtcgatgtccttgtcatcctcgattttgatgatgtccttggagccgtaacgcttggagttggcgttcatgatgagcgcaagcttggttttggccggttcgattttcaggtattcgagaaccttcagcgaggttccggccggcacatggtcgatgatgatgccgttctgaatgctggtgacttccatcaggcctgaacctccttggggttgagcggttcgtatccgggtagttcgtcgcccaccacggtgctttcgagggccatgcgcacgagcatgccgttcttgacctgttcgaagtaggcggcacgcgggtcgtcgtccacgtccacggagatttcgttgacgcgcggcagcgggtgaagtacggccatggacggcttggcgagctgcagcttttcttcgtcgagaatgtaggtgtcgcgcaggcgcaggtagtcgtcttcgttgaagaagcgttccttctgcacgcgggtcatgtacagcacgtcgaggtcgccgatcacggaggccaggtcgcgcacttccacgtaggagcagttgtcagtggcgttgatgcggtcgatcacgtactgcggggtcttgagctcgtccgggctgataagcacgaagcgcacgttgccgaagcggcacagggtctcgatcagggagtgcacggtgcggccgaaggtcaaatcgccgcacagtcccacggtcaggtcggtgatgcggccgaagcgcgactgcagcgtggccaggtcggccagcgtctgcgtgggatgcatgtggccgccgtcgccggcgttgatcaccggcacggatgcggcgcgggaggccaccagcgcggcaccctccttcgggtgacggatggcgaccacgtccacgtagttggacacggtcttcaacgtgtcggcgatggattcgcccttggtcacggaggccagctgcgcgccggcgaatccgatgaccttgccgccgagacgcagcattgccgtctcaaagctcaggcgcgtacgggtggagggctcgtagaacagcgtggccagcactcgcccatcgcaggtatgggcaacctctttgcggtgggaatcgatgtattcggccttatgcagcaggtcgagaatctggtttgtagacaggccgtccagcgttacgacgcttttgccgaccattggcgtttcttcagacaaggctcaccttttcgctcgtggttttcaggtggccacccttgtgtgacctaatataacttacgccatttttcggacagccgcattcaccgagtgttcacctgaaaatccaacgaatatgctgtgtctgtatagctgatatctgctttggaacgccagagctcattcattaggtcgatttgacgttcattaggtcactgcaccctcgtatctgttgttggaatgccgccattccaacaaggtatgcggcggcggaccgacctaatgaacgatgaatcgacctaatgaacgtagtgaacgcaatacaagaaaggtctatcgctgcgcgcggcgtcggttccgctccagtcgcggtgcgatcacgtgcatacgcgggcgaagcgcggtttgcggctgctgcgttgcggcggaggccgtggcggtggttgccgcagtcgcctcgtcttcggcctgcccgtagaacaggcgctggcatacgtcacggcatttgcgcatcacggccagcaggtcgttctcgaaatgctggccgcggtgggcgccgtagccgaggtagacggcgatgccgcccagcgaatagatgtcatcaggcagaatatcggcctggttggcgcgcccgctccacagatagttgccgttgcgggccgcg

SEQ ID NO: 2288 - DNA, 5549 bp, Unknown
  R119_18m  MAG No. k141_16059
agatttgcggcggccatggcccaggagagacgcccggtcccattccgaacccggaagctaaggcctggcacggcgatggtactgcacccgacagggtgtgggagagtagcacgccgccgcaccacacgtacaggaagccccgatacccctcaaaggtaccggggcttcccgcatatcaggacacttgcgcgtggggggtgtatctcgcgtccttgggccccggcaggagtatcccgtcggggcccagtgcgttttgggcggcaacccgctgaatacccggtaagatgtctgaggtatcaacaaacaggtcaggaggtgacgcgcatggtggcgccaagccgtgatgaccgtagcgtagatgcattggtgaaatccaaggcagtacttgatgtattggcggaactgggaccaagcaccgcaaaaaccataagcgaacgtactggtgaacccgtaagctcaacgtatcgtttgctggataatctcgtcgcagtcggttgggtggaacggggcatcaatcgtggcgagtatcggcttggcatcgattgcgtacgtatcggcggccaaatcgaaagcagactggacattcagcagatcgctcgccgtaccttccgcgcccatcacggccagttcggcatctggggtctgttcgttcggaggcgattgcgcacggtgtgcatcgagacacgcacccgtgagacattgcaaagctatgcacagctggtgggcaatagcttgcctctgagcatgagcgctccctctcatgtactgacggcctggcttcccccggctcgctacgagcagctgttggaacactatgcctataccaacgagctcggcggcacattctccacgatgcgtgccacagcaatgggacaggctcgtcatatacgcgaatgcggcttcacctatgacgtcggccagaccatggccggctccgtgactatcagcgtaccggtattcaatcacgccggagagattcaagcggcaatcgccctgagtggcctttcccgctccttggaacctgagctggcctgtctggtagatgggcaaccggcaacggcatcggctcaagacatggtgcgattggtgcagactgccggccgtgaggtgtcgcgaggccttggatacagtggcgatcatcttggcctgaacagttgaatatgatgagtcagggataagtcaggggaaggaacgtcgacgatggcggaagacaaacgtgaaccgacccgcgctttagacaaggcgagtcgtgtgatggacgcattggcggcggagaatggcctgtcgccggcagatatcgccgacgcctgtgatatcccgcgatcctccgtataccgcgtgctggatggactggtcgatgtggggtgggccgtaacggatacggatggtaactactcattatcactggactggctgcgattggctgatgccgctcgcacgtctcgtaccgaatggcagcctgcgattgcggtcatgcatgccatcaccgcgcaaaccggcatgacctcattcctcagtgtggtctccggcactgaattggtatgcgtggaatgtgcgcaaggtcatgccatcgattcgctgatcctgcgcccgggccgcgtgctgcctctgcatgctggcgcggccggccgcgtggccttggcgtatttcgaggatgccgatgtcgaacgctatcttgcaggagtgccgtttccggcatataacgagaacacgctggtcagtgtggaacagttgcgcgaggatattcgcttgactcgcgaacgtggatatgcactgtcggatgaggatgtgacgttgggtgtcggtgccgtcggtgtaccgattgtggacaatgagtccggtcgcgtgatcgccagcctgtccgccggtggattcgtggacgaagtgttagccactcaagaatccttggccgcgttactgcgcgatggcgtacgcgaaattcaggcagcctgattcggcccgctaggctgtcgggctggacggttatgtccggtcagctatggcctttgccggctacggttctgctggttatgcttctgcccgactacgctgcggtccgttacgcttcggccacacgacccaacgcgatggcggtgatcagcacgtacgcctcgcgcgggtcggtggcatcccagccggtggattcggcggcgcgcttcaaacggtagcggatcgtattgggatgtacgttgagctccttggccgtggtctcgagcgaaccgccgaacttcaggaatgtggagacggtgagcagcgtcggatcatccgggcctgctgctgtcaggcttccgtagaccacgcggaccagttcgtcacgggcgtccgcgtcgccgatcaacgcacgttcgggcagggcgtcgtcggtgcgtaacgggcgcggcaatggctgcacggtggcggccagggccggcgcggcctgaagacagtagagcgtggcctgaatcgaacgcatcgcgccatcggcaccggtgcgctgtggacccaaggcgattggccgatcggcggcgaacgacggggcgatggtattgcagatgatttccggcgtggccgcaccgaccggacgaatcaacgccactacggcggtgctgttgccgatcgggcgcttggcggtcagacacacaccgccgaaatcggccacgattttctcgatttccttggccgtacgtgcggcggaccgggcagggtatccggcgatggtgtaacaatcgaagtcatgctcgaaaccgaggatggtgaacagggactccactcgttcgtcggccagatgattgaacaggcactcgaacagcacggtgcgtacgcggttggtcgcggtgatgccgggtgcggccgaatcggatgaatcgggtgcacccggcataccggatgcaccggacgaatcggcaacgtcggcagcaagaagttcgagaaaatctgacatagtcactagtgtagcgtcgctgattggcgttgcctttcagccaaagactctcgccaatacgtcagcaccacgaatccgaatacaaacgcaaccggcaacatgtgccgctcgaaattattggccggcgcggtaatcatcacgcccatcagcagtagcagcggaatatgggtcatgagggtgagccaacgtcggcgaatcacctcggccgcgccgatcagcaatgtcatcaccacgtagaaattgccgtgcgtaggccagccgaacacgggaatactgccccatacgcgagtgaagccggcgatgtgctcacgccagtcatggttgtaatccttgatccatgtggagtttttctgcacgtaatcgctggccacgtaataatccatcgatacgtacggctgatcgttcacattgaagtatccgaagcatttggccagcaacgcatccagcgcgatgatcggattgtccttgacgatttcgaaccatgccttgttgaaattggtcatatcctcgggcgtcaccgtgcgccacttgtagctgaccttcttggcctgaataccggaggatttcaccgggtcggcatcctgctgggagtaagcgtcggccatctgatcgagattgaagacgggcgcgaggttctttttggcttcgtctgaaataccgtccggattgcgctgagccacgcgggcgatcatttgcagctgtacgccgcggctttcgattggatcgccgccgatgatcgcaccagaggagatggcgaaggagatgccgccgtgaatcagtacggtggggatgagcagcgccacgacgtaagtcgcccagcgtttgcggtcggcgatcagagccagcacgatttgcagagcgatgatgtaccacgcatatttcgcggaaatcagcatcaccgacgtggccaggatgaaggcgatgaagctgtggcacggcaagtggacgggcgtggcgatggcaggggtctgaggatgtttgcgggtgccggcggggtgccaggtctggacgagttcataccagacgctgaaccaccagacgaacgagaacgcgaacagcggcgatttggtgatggagatagtggaaaacacggccagcgggcagaccatgaagaacagcagaatcaggaatctggccaatcctccggcctgtgggggaacggcggaatccgttgccgtttttcctatccaaggccggttcaggaatcgattggcggcggcagcgcagcagaacacggcgaacagcgtctgcagggcagccaacgtcacgatgccggcatcgtttgagccggtcagatgcctcgcaaacgtgactatcgcgccatagaacacagtgagtaccacattgtgctggtcggtcagatacgtgggatcggacggccacatgtagtgcgcggtggggtagatgtccatcggcacgaaggagaagaagccgatatagggctgtttcaggccggtccactggttccaggcccagctgaattcgcggatctgtgagcggaggtccgcgccgaatgcggccagcagagtggtcggcacccagagccagccgacaaaaaacaccagcataagcttccagaaccggttcgtgccgcgtgtgatccagcggtccagaacagtgacggtggacgtgacgatagcgcgaacggtacgacgggtcttggctggttggctggcctgctgatcggcggcgggccgtgatgtttcgctattccgctgatggtggcgtaggcgctcgccgatggtcttcggcagtatgcgctggcctgctgcgaatcgcgccatcagcgtgatgattccgagatatatcaggaacgacacgacgaatattgcggtattggcccagttccaatgggcgagggtgccgttctcctcgtcccggtacagcgggccgaccgccgagcacagtgcaagccacaggcaggccagcacggccagtgtccagcgcgcggcagcgcccacgcgcgcaagatgcgggtgggactggcggctggatacggcggcaagcttcgcggtggctggtgacgtcatgacaatatatggtagccgcacaggtcaacggttgatattcgatgtctgccgggcatcgccattgttcgcaagccaatacgacggccgggtgcatgcgtggggtcggcgaatgcggaatttccgaagttgtgaacgttaacacgggctgtccggcccaaaatggttgattttgtgcgcttttccgtggaatatcgcgggcaaaaaacggcgcaaccgaggtaacgtagtgcccatgatgattgcgttgaaagctgcaacgccgcagctacccagaactacagccgtcgcggatcatgtggtcgccgtggacgaaaccgattcgaccaacgcgctggccgcgcagatgatcggcgacgggtcgttgacgctgcccgaccaccaggatggcgaactggcggtggccgtggtggccgccgaccggcagatcgccggccgtggccgcaatggtcacaagtggatcagtcagcccggccgttgctcgacgatgtcctatgccatgcgcattccgcgcgcgatcgccaccgacgaatccgtcaatggctggctgcagatgatcgccggactggtcacgctggacgccctgaacggcatgatcgagg

SEQ ID NO: 2289 - DNA, 37826 bp, Unknown
  R119_18m  MAG No. k141_17592
cggtttggtcgatcccgtaccggttgcggtgccggagacactcgcttgcgggtgattggcggtccggtcagcatcgggttcgacttccggggtaagatccacgtcgccagcggccacgatgtcagcggaaccggtgcgatcggggtcgggcgtgtcgtccgagacctcggccgccgcggtaccggtgtcggactgctgcggttgtgcgggtgcctgatggcggtcgtcctgcaacaatgtgccgacggtgattgtggagggggaaccgggcttcgtcgacgcggcggcggccgaccctgcggctggggccgatgccggagtgtgcttgatcacgcccaactggtgtgcgagtcgttcgacctgtgccttgaactgcatgatgcgattgttgtccgcacggttcaacgcctgaatgaattcgcccacctgttccatctgcagccacaggttggccctgagcatgatgagatcgtcaagtcgagagcccatcatgcggccgtatgcggagagcacggcgttgcgatgggattcgtcgagcttgccgaaaatccaggcaaggtctcgtgccggatcgttgacctgcatatcctgccagttggtcaccgtggtgatggtggaaccggagaacaggaagtcgccgtcggagaatccgccgtgaaccgtgcaggtggagaacgaccatagtccctcggtgtccatgatgcgcgcccagctgtcggtgatttcttggggaacatggccggcggagcgtaagcggcgaatccaggcggtcagctgcgaacgaatctgaccggtggtgactaccggatatttggcattggccagaaaagtcgaaggcagacgatgaatggctccgatggaggtgccgacggccgcgcagtcatccaatgtcaacaggtcgagaggacgtgcctgaccatcacggtggacggcgatcatcacggtcgtctcgcctgtgggaccgggcttgcgcggggtcagcggtgtggactccgcctgggcctgctgccccacggcctgtgcggtggtcgtctggccgggttgggaaacgtctcccgggacgaatgcgaccacacggtccatatcgaagccgaggccaccaagctcgcgcgcggctgccagtgtctgcgccgctttcacacggcggatcagacgtgtacgcccttccttgctgtcagtggcgtatacgtcgtacaacttgcccgaggcatcttggatcacggtctgatcgatgcctttggcctcgtcggttgcgctggcctgcacgttctcgcgtacaccggccacccccagattcggcaggacggctgaggcgagtgccgccaacatataatcgctacgtttcatcacccttccacactaatacatccgtggcgattcgcaccccagaatgacacgcaaaacgcatgattctggcgatgttttatcgtgagcccgattcagccataggcgtgagtcgtgccgtgagcgcgaatcgtgccacaatggacgcatggaacaggcgcaggggattcttgaggggctcgatgagcggcagcgtaccgccgcgactacgttgcaagggccggtgcgcatcatcgccggcgcaggtgccggtaaaacacgcacggtcacgcggcggatcgcctatgcctgcgccaccggggcatggaagccggagcgggtgcttgccgtcaccttttcggtaaaagcggcggcggaaatgcgcgcacggttgggccagctcggcataggggaaggtgccggacgttccggttcgggtgcgggaactgccggagtcacggccgcgaccttccactcagcggcattgcatcagctcaacagcgtctgggcggacatatgcgaggctccattcccgcatgtgatcgaagatcagcgtgacgtcgtctcccgcgcgatcatccgcgccaccgcacgtaccgatgccgatccgctgaccgttcgcgatgtgctcgccgaaatcaattgggccaaaatctcgttggtggcggtggaagattatgcccgggcctgtgccatcgcccatcggcagccgcccgccggacttgacaccgcccggttcgccgacgtctacagcgcctacgagcaggaaaagacctcgcgtggcgaaatcgattttgacgatattctgctgctcgtatgccatatcatggatgattttcccgaagccgccgcccaaattcgttccaccatcggctggctcaccgtcgacgagtatcaagacgtctcgcccctgcaacacaggctgctgaccctgtggctgggcgggggagggcctgacggcaagagcgcgatgaaccgcaacgtatgcgtcgtgggcgatccggcccagaccatctactcgtttgccggtgcctccagctgggatctgctgcgtttcgccgatgaattcgggccgctcgccgccgatgtcaatctcaacaccgactatcgttcgacgccggaagtcgtgaatctcgccaaccgggtgcttgcggccgcgccgaaccgtgaggattacctgaaactggtttccgcccgcgaatccggcccgcgcgttacccgaaccgcttatgagagcgatatggaagaggcgcagggtgtggcggcacgcatcgcccggttggtcgccaacggagccaagccgtccgattgcgcgattctcacccgcatcaacgcccaacagctggtattcggtgccgctttgcgcgctgcaagactgaaataccgcgttcgtaaggattcgggatggcaatcatccgcgctcgccgacgatgccgcgtccaaacgtgcgctattggaggcgatgggtttggacgccaccggacttgccgcaaacgacgatcccggcgttacgatttccacgattcacgcatccaagggtctggaattcaagcacgtgtttctgatcggctgttcggaaggactcttgccgtacggttcgccggaaacgggggatgcgctggaagaggaacgccggcttatgtatgtgggcatcacccgagctgaggattcgctgcatttgtcgtatgcgcggaccaaggatggttatggagcgcaacacagacgcccatcacgatttttgtgacgggcgtcggtaatgaatgtgaatgttcctgaacgttcaggaacgggaattggctgaaggacggttgactatgcctgcgtatcctccgagttgccgttgccgtcatcttctccgtcttcgccgagaagcttggacagttcggcatcccaatcgatatcgccggtcttgccatctgcggcagggtgggaggcggaaccattggcatcggaagaggagcctgaaggggcgtcggatgacggagacgcgccatctgcgggcttgtcgctaggcagcgaaggcagcagatcgggatgcgaccacttggcgtcacggccttcagggccttcggcggcggtgatcatctcccacaatccggcggcctcgcgcatgcgcttggggcgcagctgcaaaccgagcagactttcgaacgtacgctcggcggggccacccatcgcgcgctcgcggcgcatcatctcacgcaactgttcgatatgaggcagatgggccataccggcgcgccacaccacgcaatccacccagccctcgaccatcgccagcagcgattccagcgaagccagcgcctcgcgctgttcgggagtgtcggggatgccgaccttggtgagattcaccgcgccggaaatcgactccggatccatcgacgtggcgtcacgcagctgttcctccatcgcatccagatcgatggagatgccgcgtgcgtacttgccgatgagcgcctcgaaacgcggcatcagccacggtaccgaggcatacaggcgggcgtgagccatttcctgcagggccaggaaggaaagcacttcagattcgggaattttctcggtggtctcgaatccggagagcgcagcctcgaacgcggcggcgtcggcggaagcatcggagccggagacttgggcggtaccgtcagttgccggagtatcgctgttgccggccgaagtgaagccaatgggattggcggaagcgtcggtggatgtggagaacggattgaccgagtcggttgaagtgccggccgtatcggcctcgggcgcaggagtctcaccgttcagcatcttcgcgtattcggtggcgttctgggcaatcagtccaccagccggattcttcagcaatgcgatgccctgatcgaaactgccatgcacttcatggctcagattgccggccgcatgccccaactgcatggcaaaggacgtgttgcccagcagcttcatcagctgggctggatctttcatgccgtcgggaatcggaatcggcaccggtccggcgaacatgccggcaatctcgccatcgccgaacgcgccgccaagacgctccgaaatcaccgaagccaaagcgtcgttcatcgactcggccacaggagctgcgaacttcgcccactggtcgatggtgccttccacccagccggcgcgggtcagcacatccggatcgccgggcgcgggattgaactcgcaggcggtatccagccacaggttcgcctcactcatcgcgcggcgagccgcctcgccatccacggcggacacgctggacgcggaaccggaggcgttggcctgctgcaaggcaatcgacttggcgagcttgacgttgatcggcccttcctcgacagtgcgctgcatatcgcccatcgtgttgagtccgccggcgctgaacgcggccatcatctgctggacttcggatggattgggcagtcggctggggtcctgactcatcagctgttcacggatctcctcaggcaactggctgatctgctgccaggccatctcgccctgaatggggccgaagcatttgatcagccactcgtgaatcgcgttgtcgtccatgcgtatccttctttgccgcggtgtgttaccccaagtgtagggtctgcccgggcctgttcgctcgtggccgagcaatattttcggtttatgttcgttttcggctgatttcggccctccgcttacactgtagggtatgtttgcacgccacaggaatcaggaaccagacttcgtccaggagcagaagagcccgactgcggattcggaagcgggggatgggcgcatgccatcgttcgaagtgaagcatgattcgcgcctatctcgtggaatcagccgtgctcgggcctatgcggccgctcgtccgaaacgccatttcgtcggtgcattcgccgtgttgcttggtgtggtgattctgctgctgcccagcccgtacgtcatcgagatgcccggacccacccaagacgtgctgggcaaggtcgaggatggtgcggttatcgacatcaccggtaccggcgtgacgacgtataaggattccggcaagctgctgctgaccacggtgaacgcgtccggcgtgcccgggtacccgatcgtcaacgcgcaggccgtctggggttgggccaatccgcaggtggaggtcatgccgcgtgaggccacggtaccggtgggccagagtgcggaccagtatcagaagaaagtcgaacaggacatggccggttcccaggattcggccagtgccgtcggtctggcgcatgccaaagcccatgcggacgaactgggcattgacgccagtacattgcaacacgccaaggtgacgatgcacgtggacagcatcggcggaccgtccgcaggcatgatgtacacgctcggtctcatcgacaaactcacccccgccaacgagagcggcggcaagaccatcgccggcaccggcaccatagacaaggacggcaaagtcggcagaatcggcggcatagagctgaagatgcttggcgccaagcgcgatggcgccacatggttcctggctcccgcatcgaattgttcggatgtggccggccgcgtgccggatggtctgcgcgacgtcaaggtcgccacgctggacgaggcgtatcaggcgttggtggccattggcaaggggcaggccgacgatttgcctcattgcgaggcatgacacgcgcggccagtcgttgtttctggtgagacgactcgcatgggtctgcccacaatgcggcgattttcggccgcgttaacgcatttgttcgcgaagacttgctaatgtgtcccctgtgaatcaaacggcatcacagaacgctgaagaatttggtttcgagcccggcgatatcgttcaggagtggctctgggacgacgatgtggacgattccattcgtgcccagattgaagagctcacgggcgaggatctcgtggacgaggactacgactccgctgtggacggcgtcatcgtatggtggcgcgacggcgatgatgaggacgaattgtccgatacgatcgttgacgcctacgcggtactgggcaatgacggcccgctgtggatactgactcccaagcccggccgcccgggtgccgccagctcctccaccgtgcagtccgccgcacagaccgccggtatgaacgccgccaccccgctgaccgtcagctcggactggaacggcatccgcctgcgcgcattcggcaggggccgctgataagcctcaatcaatacgcttgactttaagcgtgttgactggcgtcgcgtgctgcgtagtgctgctgggcgtgactgaatgtcatcgcgattgagcgctacggcacgcgtatgcgacaccacgtgtcgcgcagtgccggccatacgctattgttgtcatttgcgggcaattagctcagttggttagagcgccacctttacacggtggatgtcgggggttcgagtccctcattgcccactttcatttttcatcacttcgtgcaatcccctcattccacagacatgggctgtgacgatattccctgacagtcttcggcaaggggttctgaaatctcagtgagatgcgcgcagaaggaaaccggcagtactgctacaaaatcgtgaatttcggtcttcttggtcagatgcgtctcaatagtcacgtaaagttgtggcagagtgtttatatccagcaggaggtcgaatagccgatggcgcaggaacttcgtgaaggggacggcaagtcgggcatcgcacgtgcgggcaagcgcaagtgggggtatgaccccgctcaggtggacgctttcttggagcgcgcccatgctctgtatgacagcgagggcatgaatctcacccagcatgacattcagaacgtgtcctttgatttgcgcaagaacggctatgtgatcgcacaggttgacgccgcgcttggacgtctggaacgtgccgtggtcgataagcagaccacatgggagatcgcacagcatgggcgtgtgacgtggaaggcgaagaccgagaagctgtatcacgaagtccagaaccatgcggagcgtaacgagcgcgaacgcttcaagtccggagcgcccaagcagccttcgtacgataagaagcaggtggatcgtctggtcgaccagattgtggacaaggcggcggccgcattgggcgttgacggcgtgaccgaagacgatgtacggtctttggccgatctcaatgcgaatacggtcaacaatgtgatcttcacccagcgcaagggcaagaaaggctatgacgagcgacaggtcgattacttcctgaacgcctgcgtgcagttgctgagtcgcttggaatcctatgcacgtgtggccgatttcgtgtccggcgagcccacggctcctgcccagaccgccacgaacgtgaccgttcaagcgaacggcgtctcgccattgttcgcttccggaacgcagcgcccggcaactgacgaacgttttgcgccgtctgccgttgctcatgacgaatcattcgatgccctgcatcaggccgagcagagcttgttcactgctccggctccggttgctcccgcggcgccggccgcggcggcaccgatcgcctatgcgccggctcctgcatcgttcgatgcttccacaagcaccaataacaccaatgcggaacagccggtttcctttgctcccgcagcatacccggtgcatacgtccaacgagtctgcggcgaagcccgtctccgagacgccttccgtggctcctaccgcagctgttgcggctgagcctcccgccagtgccccgtccgcgccggtttccggtgtgaccgctggcagcgccccctcgtttgctccggcacagtcgtcatacgaatccgcagctccgtcatcgaccccgtcggtgttcgcggaacagcccgtggatatggtgcaggacggttcctctctggccgctctcgcccacatggctgcggtttctcaggaacttccggcggtggatgcgccgtccttcgctcccaagatgcccagccttgatacaccgaatgcgctgaaattgaatgaggtaccgggttcggtttcatccccggcaccctccgccccggcagcgcaacctgtgaatagcactgccgacgaggctgcgtccgctgccatgccggtctcctttgctcccaccagcaagccggatcgtaacacgaactccattccggttcgcgtatccgatagtcagcctgcagacagcacggtctcccgtccggctgtggaatcatctgaatacgttgccgcctcccacgacacggaagcagctcagccgtcacaggataaggacgattccaacgattcgttcccgctgctgttcccgcttggcggtaacttcgattcggatatccccgacctgtcgttccccacactgaacaatgacgatacgaagaaggaaaagtgagcatagcctccaactccaccgtcatcattctcggatccaccggatccatcggcacccaaggacttgacgtcatctcgcgtcaccctgaacgatttaccgtcaccggtctggcggcgggcggagcacatatcgagctgctggcgcaacaggccgcacagttccatgtgcccgaagtcgcggtgtttgatgagaccaaggttccaacactgcaagcggctctcgcacaggccggcgcacaaggtgtccgcgtgaccggcggtccggattcggtcatcgccatggccggatccggtgcgaatgtcgtattgaacggcatcaccggctcgatcggcctcgaaccatcgatcgcggcgctcaaggccggttcccagctggcattggctaacaaggagtccgtagtcgcgggcggtcatctgctgttcagcgcgcaagtgcgcgagaaccagatcaacccggtcgattccgagcattccgccatctggcaatccctgcgctccggaacccacgccgaagtcgccaagcttgtggtcaccgcctccggcggcccattccgcggctggaaacgtgtcgacatggagaacatcactcccgagcaggcgctgcatcatccgacgtggaacatggggccggttgtcaccatcaactcctccacactgatgaacaagggcctcgaagtcatcgaggcgtcccgcttgttcaatgtgtcgcctgaacgcatcgacgtgaccgtgcacccgcagtccatcgtccattccatggtcgaatttgtggacggcgccacgatttgccaggcttcgccgccagacatgcgtctgcctatcgcgctgggcctgtccgcgccggaccgcatgaccaatgtggccgccgcgtgcgactggacgcaagccgcaacttggacctttgagccgttggacgatgaggcgttccccgccgtgcaactggcccgccactgcctggccgcctccgagaagcatacggcggtgctcaatgcagccaatgaacaggccgtgcatgcgtttcttgatcatcggctgccgtacctcggcatcgtggacacggtcaaagccgtgctggaccagatggacgccgagcttcgtggtaatccgctgttcacggacgtggaggaaatgaaccagcttgagcttgaagcccgccgacgcgccgacaacctgataaacaagcaatgatgaataccttgaatacggaaaatcccatcgaaaagccgttccgcaaaaccggtgatccggtcgacctgaccagcgaatcgcccttgcacccgcgccgcaagtcccgccgcatcatggtgggcccggtgccggtgggcgggggagcgcccatctccgtgcagtcgatgaccaacacgctcacggccaacgtacctgccacgttgcagcagatcgccgaactgaccgccgccggctgcgacatcgtgcgcgtggccgtgccgagtcaggacgatgccgacgcactgccggaaatctgccgcaaatcgccgattccggtcatcgccgatatccacttccagtccaaatacgtgttccaagccatcgacgccggctgcgcggccgtgcgtgtgaaccccggcaacatccgtaagttcgacgaagtcggcccggacatctgcaaggccgccaccgacgcgggcatctcgctgcgtatcggcgtgaacgccggctcgctggacaaggaactctacgccaaatacggtggcccgactccggaagcgctggtggcctccgccttgaaggaagcgcacatgttcgaggacgtcggcttccacgatttcaagatctccgtcaaacaccatgacgtcatcaccatggtcgaaacgtaccgactgctcgcatccaagggcgattggccgttgcacctcggcgttaccgaggccggccccgcctggcaaggcaccatcaaatcctgcctggcgttcggtgcgctcttggccgagggcattggcgacacgattcgcgtgtccctttccgcgccgccggtcgaagaggtcaaggtggggtgcaaactcctggaatacatgggattgcgcccccgcaagttcgacatcatctcctgcccgagctgcggccgcgcccaagtggatgtgatccagctcgcatccgccgtcaccgaaggcctgaaggacgtgaccgcgccgatccgtgtagccgtcatgggctgcatcgtcaacggtccgggcgaggcacgcgaagccgacctcggcgtggcctccggcaatggcaagggccagatcttcatcaagggcaaggtcatcaagaccgtgcccgaagaccagatcgtcgacacgctgctcaccatagcgaacgatatcgccgcccaaatggaggccgacggccaagtgcccgtcaattccaccggcccggtcgtggtcccaatccagcatcccggtcactgattcggccgaataggccctcggcgtaaatatcgcggtcagattacaatagcgcacgtgtcgcaagaagaagagcatcgcctgactgttcgatccaagccgtggaccagcacccaccggctgatggtcagcctgcccatcttcattatcctgatcggcgtgctggtctccatttccaacctgaccacggtgccttggaacatcgaacccaccggccagtcgatggccacgctcaccgacgataccgaagtcaccttcgataacccgtccggagaaacgctgccggcgaaaggcacgtatgaggtcaccgagcgatacatcacgctgaacatgaccagcgacggcaatctgaccaaggagcctggtgatcggggcaaggccaatgcggacggcgtccaagccatcaaggtattgattcgggaacctcagaacgcatcaggcaagcgccccggcgtggtgttcatgcacggtgccggatacggcacctgtgacaactcctttggcgatgtggcctccgatatggcttcggccggctttgtgaccgcagtgctcgacaaacccgtctggagcaccaccgacatcaaccgcgattatccagcctcagccaaggcatatgatcaggtcatcgaatacctacgagcccaaagcgatgtagacgccgccaaggtcggcatctatgccacctccgaatcgacatggatctcctcatatctgctcgaggacgatccggacgtcgccttccagattcttctgagcccgatggtgttcagcccacgccaatcactgggatttttcgtcacccaggacttcactcttgtcggcgcgaacgagggctatcgatccatcgtccaacgcgtgttcagcgcggacaccggcctgttcggactgaacaattccgacctcgccacgctcaaacccgccgcttacgccgtacccacctatgtggcttacggttcaaaagacgtgatgacggcgcaggtcgacggcgtgcgtgcgattctctacaacgcccacaaagccgataactggaacgtgaccgtgcgcagctatccggtcgccaaccatgtgctgcgtttgggggatgagtccgaagcgggcaccccgtttgcggacgcctatgtggacgatctcatcgattgggccgtcggcacttccgccggactcacgcagaccagcgaaaaggtggccggcaccaatctgtaccaatcaatcggtctgccgggcgctttgaaggcaagacgcgtcggcaccatatatggtgtgatcctgcacgtcacggtggtactgctgctgctcgcatccatcgtgctggcactggtggcgctgggccgcaaaatcgcggcggatgcccgatggcggcgcgagaaacgcgaggccaaacgtgcgggcatgctgataccggaacggcctgtgatactcggtttcgcacatggtttcggcaacgcgctgctgactttgaccctcaccactcttgccacactgctcatcttctttgccggacttggacaggtgattatgggtgtggtcaaacttgcatggggcagcgctcctaccgagacgccgggcgtcatgtattggagctggccggtcatccaagtggtgtccgtgctggtgctatgggcttggtcccgcgtctttatgcatctgatagaggtcgcttccgcccgcggactgattcagataccccctcgtcgtgaatccgttcgagacatcgtcaccggtgccgacccggtactcgcctccacccgtctgggccgagtcctgttctggctggtggccttcaccatgctgtacatactgttggtgttcgccttctggggcctgtttatttactgactacttcattgagtagagtctgccgggcgtcgcggggaaaggagatgagatgtcgctgtaccgagacgaaggtgtggtgttgcgcacctccaaactgggcgaagccgatcgtatcatcaccatcctgacgcgtgggcatggcaagattcgggcggtcgccaaaggcgtgcgtcgcaccaaatcacgctttggtgccaggctcgagccgttcatgcgagtcgatgtgcttatcgctgaaggccgctcgcttgacgtggtctcccaggctgaagcggtcgccgcttacggtgctccgatcgcggcggattatgcggcgtatgaggccgccaacgtcatcgtcgagaccatcgataaactcgccagcaccgaacacgagcagctgacgaaccaatatcggctgctcatcggcgcgttgaacgcgctcgccaaacaatcccacgccccgcaagccataggcgactcctatgtgatgcgcgccttggccttggccggttggacgccacgattgggtacttgcgtggtatgcggcaaggcggagccggcgtacctgtccatcgcgtccggcggcgtgatgtgcgaagccgaccacactaccgatgcgcgccgtatcgcgccgttcgtgttaaaccagttcgatgcactgattcgtggcgattggtcggtgcttgatgccgcgcctgtggagagggttgtgcaggagttggttgaagattggggggagtattacctcgaacgcccgattcgttcgctgcgcttgatagattcatgagtatggcttttgagaacgttgattacacgtcgttggacattcccgcagctccgttcagcgaccttgcccgtattcccgacttccccaagaacaaggtaccccgccatatcggtgtgattatggacggtaatggtcgttgggccaagcagcgcggcatggtccgcaccaatggtcatcaggccgccgaaccggtggtgttcgacactatcgccggtgccatcgaagccggtgtgcggtatttgagcctgtacacgttctccactgaaaactggaagcgttcgccccaggaagtgcgcttcctcatgggcttctcgcgtgaaatcatccaccgccgcgtggaacagatggacgagtggggtgtgcgcgtgcgttggtccggccgtcgccccaagctgtggaagtcggtgatcgacgagcttgaggccgccgaggagcgtaccaagaacaacaaggtcatcgatgtggtgttctgcatcaactatggtggccgtgctgaaatcgccgacgcctgcgccgccatcgctcgcgaagtgcgtgatggcaagatttccggcgaccgtgtgactgaaaagatgattgccgaccatctgtacaatccggacgttcccgattgcgacttggtgatccgtacttccggcgaacagcgcacctccaacttcctgccgtgggaggccgcctacgccgagctcgacttcgtgcccgaactcttcccggactgcggccgtgacgtgctatggcgctccatcgaccattacatccaccgcgatcgacgatttggcggcgtgaaataaagaacagtcctgtggactgttcgttcacgccgcctggccgaggccgataggacatgaccaggtaatgatgagtccggcgaagccggtccttgattgctgggggtgtgaaatagtccttgttaagcccctcaaaattgagggggctgagccgtaaaacaaacagcccgatgggctgtttgtaggcgaaggcgagacgagagtcgagccagaagaatgcgagcggcagcttgtccgtaattgcggtcgagctgtccgtgtagcggactgaggggagttaccggcacacctcagccatcctctctgcaaactcatccaaaaaacgtcccgaatccgcaccaagtgccacatgcacatgcggcatggaatgattcaccagcccaaccgggtctccggtggtccggcctcgtattccattgaaatcaccggtattggtctccgcgcgcaacgcaagatcaaaacaatcgaccagtgaagaatcaagtgcaaccgccgccgccaacggatcatgcaacggcatgccgccagagaacagtgcggggtcggcttccaaatttgccttgatggaaaagtccgcgagatcagccaagaaccgcccgcgcttggtccccgtcgcacgccactggtcggccgccgatcgcggtagcaaacactggtgagtcacatcaagtcccaccattgtgatgtctgcgccggaatgaaatacacgattcgcggcctcagggtcttggatgatattcgtctcggccaccgcatcccaacaattgccgggttgggtaagcgtaccgcccatcatcaccagcctgagtttcggtgcaatatccggtgcccgagtaatagccgcatccacatccgtcaacggcccggtagccagcacggtaacgtctcggccaaactcacgaacctgctcaatcagatactcaatcccatccgcagcatcaacggagcgcctccttttgccccagctggcgagagctgtcgatgtagccgactggggacggtccacaggccgagagcgacccacacgagaacaagaccccgacgccggatgagcatgagcgtcccctaccaaatacccgccaacagaaacaaccccatcgggcacatcctcagacatgtcatccccagacatgtcatcaccaggcacaccagctccatcagccagagccccggcccctgccagccaagtattccccagtccatccttcccatgaaactgggcacaccctgcatcgggaataaacgcatcagcccaagaaggatgctcggagcccaaaaacaccggaatatccgcccggccaaacaaatcaagcaccgcgcaagtattggcataagccgtgttcgcatccacattgccataactggcgatcacaccgctcagctcgcactcatccgccgaccccaacaaatacgccaacgccaacgcatcatcaacaccggtatccatgctggcaataatgcggtcaggacgttgggccatggaatcgcctccttgttagcatgattcgctatgaataaccttatcggccgatacgcaaaaatgcgtcctttcctcatgggaaggacgcatttttgcgtagattcaaactcggaatatcggaaattacttgccgaggaattcgtcggtgccaaggtccttggcctgcggggcctcatgaatcaccttgtcatgactgtcagtgtaggcgtcttcttcagccaggaagtcgaagtattcctgagtgcccttgaagtcgttggtgccgagcacgaaagagccgtccttgatcttggccggatcgccccagtactggccgtcgacgataacctgcatgctcttcttgacgaattcgggcttgaggttggcgtcaggggcttcgtccacgagaatctgcgcggcgtcatccgggttggcgtacgcgtactcgtaacccttctgagtggcctgagtgaacttcttgaccaggtcgggattgttcttgatggtcttgtcattggtgatgatgccgatggcgtcggcgttgccgggcacgccgtagtcaggctcggtgaagcagttgagcttcgggccgtacatgtcggcctgcacgccttcccacgtggcgtagaagccgccgaaatcggccttgccggattccatggtctggaaggtggaggtgccgacggtcaccttgtcgaactcgcccttgccgccgtcggtctggatcatgcggcgcaccacggcgtcggactcgttggagccgaaggtggcgaaggtcttgccatccaaatccttaggggacttgatggcggtgttggacgccagtgcgcaccaaatggcgctcggcttctgctgcacctgcagcacctgcttgatgtgagcacccttcagcgtgtagatgcccacattggtcaagttggacagggcgaagtcggccacaccgttgttcacggcctgttcggcaccggcctgggccacggccacgatatccacgtcaagaccggcgtccttgaagtagcccttgttcttggccacgtacacgccgatgtggttggtatcgggcgcccaggaaagcatgaaagtgaccttcttgaggtcggaggtgttggagttggaggagtcggcggtgttggtctgaccacatgcggcgaaaccgaaagtcatagcaagggcgcccacgagggcagcggccttggatacaaggcttttcttcataatgatggttccctaattcgttgtctctctatcgttctctgggattgcttcgaacggaagtcggcagaaaacgatatggagggccttgatttccgttcgaccagcgcccccgacattccctatgaaagctcaagaaagccggtttgccacacgctggtaaagctgttccattatagagacagggctggagacctcatgagaagccgccccgttcagtcggttctggccgccggcttgtgtctttgacggtaaaaagaactactggtccgcgtcggggtcttcgtcatcgccggccgggccgagcaggatgcgctcgctggcgttcaccgccagcatcagtacgcatgtcatcaggataatgacgatggtggcggagaagatcagcggcgtgcggaacgaattgtaggcagcctgcagccagatgccgaggcccttgcgcgcgccaagatattcagcggtggatgccgtggcgaagatgtatgcggcagatacgcggataccgccatagatctgacgtgcggcaacgcgcagcttcacgtgccagagcgtccagaccggggtcgcgccgcaggtcaatgcgacgtcggaatagaactggggcaccgcttctagtccgcgcacggtctgcacggcgatggggaagaggccgaataccgccacgattacgattttgccggaaatctcaaagccgaaccaaatcaggaacaacggggcgatggaaatcagcggcatggtttgtgcggcggcaagcagcggatagaacgccgcgttgaacgtgtgcgagcagtacagtgcgatgccgatcataatgccgaagaacacggcgaacaggaagccgaccacgccctcatagccggtgatcgccgcggccgggccgagcgtgttccacgtttcgatggtggcggcgaaaatctcgcttggcgcggagatcatcgtgggggagacatgtcctagatccacccacgtttcccagactgccagcaatacgatgacggcgatgacggtgggcatgcggcgcttgaggcgcttggcgatggacatgggatgtcaccttgctttccgcgccagtccggtttgctggtggcgcttgcggccggggcgtggaacagtaaggtgaggagcctgcgcgcctgccggtcgtgtgatggattgtgttatatgccgtccatcagtataggcgaaggcgaacgacaggggcacacaaaaaacctccctctgtgagggaggtgagagagctactccagtccgatggacttcatgtggtggagcttcagggaatccaccttgagggagccggactcggcgacgagcttgatggcacgcggtccttcggaggcgtaggagtaggagctcagcacttggtggccaccgttgacgtagacctccacggagccgcgatccacgaacacgcgcaggtccagcttgccggaggccagttcggcgtcggtcagtggggcggcgcggtagccgtgatcgccgttggccatggcctggcgatccaccaccacgcggccgatctggtcgtcataagccacgtaggtgtaggcaccgtcctcagtggcatgaatcttcaggcccgcacgctcggcagtggaggcagccaagtcgatggtcatttcgatttccacggccttggcgtcatcggcgatgacctgctccccatccatatcgagcgtgatcgaaccatggtcgagggtatcctcgcgcaggccttccatttcggcgaccggcgcggtgaccacgtcgccgtcatcgtcaagggtgatctcgcgcggcagggtgagctgaccacaccagccgtcatcctccatgggaatcggctgcacgaacgggctcatccagccatagacgatctgacggccgtccacgttgaaggactgtggggcgtagtagttgtggccgcaatcccacaggcggaactcggtttccggcttgaattcgccgcccggctcccacgtgccaatcatgtagccggcgttgttgacgttgcggttcatgaagccgctgggcttggaccccatggcggagaagccaatgacccacttctcgttgccgtccttgtctttgatggggaagaagtcggggcattcgagcatgaacacatccggatccgggtgctggaagagcacgcgctcgtattcccagcggaccatgtccttggaggagaacagccacatctggccgcgcttgtccgcagaggagacaccgaaggtcatgtaccaggtgtcgccggtcttccagaccttcgggtcgcggtagtgatggtcgaccttgtcggtcgggcagtcgatgatcatgccgcgcttggtggcgctggtcagctcgtcgttgtccggctcggcgagcatctgcacttgccagtcgccgccggtgttgtcgtggccgttggcccaacggtggccggtgtagtagaacttgagcttgccatcgtcgccgattactgcggaaccggagaatacgccgtccttctcctcttcaagggtcggggcgaacatgattggctcacgcttccagttgagcatgtcggtggaggagacgtgtccccagtgcatcggaccccactgggtgccgtacgggtgcagctggtagaacacgtgccagcggcccttatagaagcacaggccgttcggatcgttgatccaaccgccgttggatgcgatgtggaacttcgggtaccagcggttgttgcgttcggcggccatggctgcaacgcctgcttccgcctgtgccagagcttcgctgtggttcttgatttcgtggaggacgggtgcatccggagtgaagccagtcatcgttgaatagcctttcttaatgattgatgaatcttgcgattgttgaattgttgcttattgagtttttagataaaagttttaagaatgctgcccgaaacggaaaaaggggaaacgcttcgggcagcacgatttagttgtgtttttgccgattttggcggttgcgctcaggcgtttgctttagctgcggcttgggccttgagctgcttatcggtgtagaacggatcaccgccgacttcctggtcgtccttcttgatcacgaagaagccgtagattagggcggccagcacgatgccggagatggtgaagaaggtcggacggtcgcccatggcgtcatgcagggcgcccatcggggtggagaagatcacctggccgatttgggaagcgatctggaagcccaccatgtacagggttgccgacagtttggtgtcgaagtgcagggtgaagtagcggaatgccggtaggcagaacagcggaacctcgatggagtggaacagtttgacgatggagacactgaccggatcgtggaacacgccgcacaggccgatacgcaggaacatcacggttgcgccgagcagcagggagttacgaacgccgatcttcttcatgataatcggaacgacgcccatcatggcggactcgaggaacacctggaaggagttcagggtgccgtaggtggcgttgccgatttcggtggtcgggaagagggaagcgtagtagttagggaacatctgctggtcgaacacggtgtagaaggtgttggtgaacagcatgaagacgatgagcacccacagagtcggcatcttcagaacggagatcatctctttgaaggatgggttggttggagccgcgttcggatcggcttctttcttgagctcttccttttgcttggccggaacccagaaagcgtagacgcacagcatgccaaggccgcagatggagccgacccagaagttcagcagcgggttgatattgaacaggaaacctgcgcacagtgccacgatggcgtagccgaaggagccccaagcgcgggactggccgtattcgaagccgaacttacgggagtagcgttcggtgagcgcttcgaacagggagcagccggccatgaagcctgaggagagcacgatggagccgatgagcacgccgatgaaacgggtggtgccgccggcagtcagcatcggggcatacacgaactgtacgaacgggccgacgagcgctgcgatggcggagacgaagatcacgagcttgcgcttgatgcccagctgatcttggatggcaccataggcgaacatgatgaccagggttgccaaggagttaatggagtagatctggccctgctctgcggaggtcatgcccagaccgtgggtcgggtcggtgagccagcgggagaagaaggaccaccagatgccccaggagcagaagaacatgaagatgccgaaagagctctgcagataggaaggattcttccatgcggatttggttgcacttgccataatcatcctttgattactacttggttggttattggttatgtgacgctcctgctcgggcggctgtgcctttgtagaagttgttgtgtagtaattactatgcgacgtcaatcgatttacgtcaatcgattgacgtcatcggcgtgtcgtacccgttcgagacgcaaaaaggcctccgtgctgaacggaggccttgagaaatcgcgtgggcctcggttacttcaccgaggccttttcgatcagcgtgcagtggatcttcgccggaatcggcgcgtcgatcggcggcaggggagcggtggtcgctggccgtgagacgtcgtccatcgagcgtccttcgataattgacaccagcttggccacggcccagtagcccatctcgaaatgcggcagttccacagtggtgagcatcggttccagcgtttcggcgaacacgcgatggttgtccacgccgatcacggagatgtccttgccgaccgtgagtcctcggcgtgcggcgcattcgtacacataccaggcgcgggcatcgttgaagcagaagaatccgtccggatgctcggcgtcgaacaaatcgctgactgcggtcagtgccggcccgttattgagcacattgacgaccagacgatcgtcatagtcgaggcaggcgtccctgagcgccgcctgatagccttccaaacgaccatcctgcgcaatcatcggttccgagcaacccacataggcgatacgtgcgcatccggccttaaccaatctggtggtggcgtcgtagccgatttggaactcgtccggttccacgctcgggattttgccaagcgagtcggtggcatccaccaacaccagtggcgtcttggccagcgaagaaggcgcatgggtgatgcggttcgacatcttggcgtacaggaaaccgtcggtgccgtatcgcttgagtgcggcgatttcctcgctctcgctgttctcaccgtcggtgctcacggtgatgagcatatagccgaactggcttgcggcggtctgcgcgcccagaatcataccgccggcgtacggggtggtggccacctcctcactgatgaaaccgaggatgtgcgtcttgcctgtacgcagcgaactggccagcggattcgaccggtagccgagcttggtggcgatggcgcgcacattgtccgcaatttcggactttacgcgcccctcgtcgcgtccgttgagcaccagcgacaccgtagagacggaaacccccgccttgttcgcgatttccttcatcgtagccatgcgtcaaacgatacaccctaattgacggactgtcggaaaagtatcagtgttctccaccgactccgccgaggttgcgcaccgcaccgatgaataatggtatgccgtccggggtgacgtacgaatacaggaatgggcgatccaccgtgaactcgatgttgtccaccggcgcgctagtgaagtctgcgccggctttggtgaaggacatggccttggcgccggcctcgttcacctcgatgcgcgtgccttgcagaatcgaaccgatatacagattctcgccgtgcgaatcggtgtcgaccatcttggtgaagtcggcgtcgcctgcactgaacgcatcggtcacccccagtttttcgaatgccttgatggtggcttccgagtcgaacatgctgtcgacggtgaatcgtggcagcgagacgttcaccgtggccgagttgacggagacgccccatccgggcaaactgtccgcggtgcaacccattgcgtcctcgccaggggatgccgacgaacacgtgccgaacgcccatccgagtttctcggcattgccggccagctcgtcgaaatgccctttggccggcagcacgatggccagattgccgctgttgtcgaatggaatctccacccgctgccaagtgttgtactcatcatggctgtaagtcatttggctgaaggtccggtgcatcatcggcacctgagcatctccggcttcgccgtggaaggtgccgtcgccggtggactgctcttcgaacggatccttccagcggccatccgcatagacagtgttgatgatggacaggacttcacggtcacgcagcgtgatcttcggcttgagcgaaccattcgtatgcttggcaatccaatcggacatcttggcggcggcctgatcgtcgaacggtagcgtggtgacttcggcctcgaatatcttcttgacggtggattggtaatcgctggcaagagagtagtcgttatcgatccacagcgagttcgcggcgctcatctcggatttcgcccccgaatattgcccgttgatcgaactcagcagcgattggtagtcgctgtcggccagcgaaccggagcccagcagctcattcagttgcgagcgggtcgtgccattggcgccctgcgcggcgatggccaacgccatccacatcgaagcaggggagtagttcacattaccggtgtctcggtcgccggctcccatcgccaggaattccggtgcggtgcggtaggcgaaggctgcggtgctgtcgactaccggctgtgtggcaggcgtggccttcggcttgaacatattgcgaaccagtgcgctgccatcgccggccgtccaccatacgccgccggcgacggcaaggacaagcactactgtcacgatggcggcgatacaagcgttacggcgtttgcgttgtttgcgcaaccggtactgttccatcagtttctcgctcatggtcagcccctttgcttggatcggctcgtgcatcattgcacgaagcccctgattccagtatattttggtctctcttattttgtgcgacgagccacaatccaccgcacggcccacaccacgccgaatccgaggaagctcgccacggcgaacacgatgacgaaatgcaagacctgatccatcgagccccaggagaggtatcggtcgccgatcagcgtgcaggtacttcctatcgggcacgtgtcttcatacaccgtgatgagcgccatgagcatcggcgcaggtaccagtgtgcacgccaacgggaacagcaggcttttccacggatacgtcagtgaggccgggcgtagcgcgtagatgccgttgatgaccagcaaggcgggcggaatcacaaaattgattagcaacgcggcggccatcgcagccatgccgccccgtaaggtcagcgccaatagcaagccgtacatgattgccgtcgccagccagcagccgaagcgaatcgcatcctgacgaatccatgtgagcagtcgtccgctcgccgtctgcggattcggatccacaaacaattcgcgcagaccgtagcgtccgattgcatagcagatgaacgcaacggccgtataacagatcaacagcatggccgagccgatcaacgaatgaaccaatagctgatggccgctttcagcgtgcattagcttccaccactgagcccaggaacggtatgggaaccccggccgtaagcgaagattggtacagccgaatgccagcggtccgatgattgcgctcgccaatgggaaagacagactgccggatcgtatcgaaccgagtatcaggttggtgattcccaacaccaatggccagtgcagaaccataccggggaaccatacgaacaggtttttggcagccctgtcaaggacctcgtcgggcatgagatacattgatgagctccactgcagcagcaacaacaccgctatcagtacaaccatgccaatccaatgcgcgcggttccacgcgaatattcgttgcgtcccgcgctcggcggcggcattgcgcatatcgctcctgttgagcttgctgagtgcttgtgcacggttcattgcagtcctcctttaccgccttgtcaaggattgatgatgattccatcgtaaatcgcgcaggaaatgtggaatgatagttgtcatagtgaccatgacatgtcaggacggagcagttcggcgtcgggcacactgaaggggtgaatgtaatgggagaagcgcgcaaccgcaacatacgcatcggcattgtggacaatgacccgtatgcgctgaaagtgttcggcgcgctaatcgagcgcatgtccagcgattttgccgtgatatggacctgcgatttgggtgccgtggccatcagccgatgcctgagccccaccaagcggcctgacgtgctggttacggatatgtctatgggcgacgtgcccggtaccgaagtctgtcgtgcgattcgtaccaaaacacccgaggttgggctggtgggtgtcacctcatacgcgctcgcgtcatttcacgacgaggcggctcgctgcggggcgcaggccttggttggtaaaaccgatttgaacggcattgcgctcgctattcgcaatgcagcccaaggattgtcgaccaatgagctggtactgggagatgaggggagcggtaattcgctgtccttcatggatgccgcaaccgcctacgcggtgctcgaagatacgtcatacgcgcaccgtggcgcgctttccggcaaagaacgcgacaccctgcgtatgtatgcggatgggtcgaccaccaaggaaatcgccgagcgattgggcatcagcgtggccactgtggcgacttttgaacgccgcgcactcgccaaactcggcgctcgcagtcgcgctcatgccatatcaatctgcgtgaaacggcatgagatttaagagttggcatgggcggtatgtgcaacggcatggatggtaggaaaggaactgctatgaaagcgttacgacaccgattggccgagctggatagcggtgttcgcaatgcatggctgttgattgccatactggttgttgccttgatatgcacgatggaaaccatggcgggcttggctgctgacagtgtctcggcggcggactgccttgcggagttcatattcgttgccattgtggggtggatggcgtttcgtccggtcaccggatgcgtggcggtagcggtggcttggatagtgttgtgcatgagtccgatctggatgccgtcgggtgcaatgctcgccgtgttattggcggtgggtattgccggatacgccgataagcgattggcgctggcggttgccggcattgccgttgtggtgtggatgttgtcgcgtggtggcgtggccattccttggcttgatggcggctcagacacgatgagcggttctgcggatggcgcggcgagtagtagtgccctaaacggtagtgttgctgatggtggcgctgctgatggtggcgctgctgatggtggctcttcatccagtgggtctgacagcgcagggcagtcgggaagcgacttcaccggaagcgcctatgaatcgagcggttcttctgccgagcatcgcactgggcaagtgattcttggtgcgattgccctctatggtgtgatgccagtggccgtgttgtttattggcttcatgcttggtggcatggcggcgcgatggaatcacgaacgcagcttggctcgagcggagttggctcaccgccgtcagcaggaacgcacagctcaggacattcacgattacgtatccaatgatttggcatacctgattttgcgattcgacaaggatattgccgatggcaagaccccttctgaagaagaattacgcgaactgcgtagcgtggctatgggcgcattggatcgcacgcatcaggtcattgatgttattgaaggcaggggagaagcggcgcacagtgcagtgactccgcatgattcgaccgttgatgccgcttctggcattgcatgtggcatcacagacgctgattgcccgctagccgagcaaattcgtgatgttgcgagcaatggtgaccgccgattatcagagcttggctttgaaggtcagacgattatttccggtgctcatggcgcagccggtcggagtggcctgatcgccgggctgctggaggaactgtacggcaacatcgccaaacatgccgacccggaagcgggctatgtaatgacgattggcatcggactggacaccgtccgcatcgcctgcatcgacacggcccgcacgtcatcggattcggatgcggatggcagtgcggacctatccaccggtaccggtctcaaccgttaccgacaattactagaacaacaaaacggcgccctgcatatcaccacgcaagacgccgaatggacattatcagcagttattccactgtgaggaaaccgatcacccaaccgacttctgcgcagtctccgcgccaaagaagccgacaatcagcatcgatgcaatagcaatcgcgctgatggccacaaagatggacgtggcaccaagcgaggtaagcatccaacccaccactataggcatcaacacattgagcagcttggccacggcgttcgcgaagccgacgcaacggaagcgaaccttggtggcgaacagttccggagcgtacacagccaccacggaagccataagcacgtacaggcacatcatgagcaggaagccaacgataattgcgctcacggtagaggtctggaaggcatacatcaaaccgaacacgccagtgaacaggaaggccggcacaatcgtgcgcttgcggccgatgcggtcgataagcagagagccaattaggcagccgaccggggctccgagcatcatcgccgtggaggtgagcagcgagctggacaggttaataccacgcttgaccagaatcgtcggaacccaagaagtgaaggcgtaggagcacacgttcgtggcggccacagcaaccacagccacaagcaggcagatgccgagcgaacggccgccggcgttgcgggtgtcgctggtgtcgctggtgtcggccttggcggctgcgtcgatcagttcggagccgttggcctcaagctgcttgacgatggcgtcggcctcatcgtaacggccgtgcacggcgagccaacgcggggattcggggatgtcgcggcgcagccaccagatgatggcggcccccagaccgatggccacgaacagcggacgccaggaccagcgggggatgatccatgcacacagcagcatagcgatcggcacaccgcagttggccacgagcgagacaatcgcgcaccagtggccacggcggttcatcggtgcgaactcgttgaccatggcgaagccggtgacgatttcagcgccgaggcccaggccggcacccagacggcacagggacagcacggccatgttcggggcgaatgcgccgaggaaggtgaagccgccaaacagcagcaggttgatttggtaagccacgcggcggcccttcaggtcaccgacgaagccggccagcagcgaaccgaccagcagacccaggaagcctgcggacataaaggtggaattttgcgcaacggtggaccagtgtgtggccaacgcgctggaggcaacggcgctgccaatatatacgtcgatgctgtccatcagcatgccagcggcgaccagcgccacgatgcgatggaacatcggggtttcatgtgcgcgatccacgcgcgagataatatcctgaaccttggcttgatccgtcacggtggtacgtgcttgtgcgctttccatagccgcgggattgccggaaatctgctgttcagcagcagtcatatttgagccctcttcttgcaaacctgcccgcgtgcaactgctcaatgatgttgcggcgagcgaactcttgattggactgcgtgttccgttcgccctcccattgtgtgggatgaacgacgtttgcagtccaagtcttgaattccacgtagcgagccaatcgttgtgagatagctcactacatggggcttaactataggttcgatcctgtggcacgccgcgttgcggtcacattgtgaacgataacagagtttgtaacgctcctatatatgccccacttacgctcttaccccgttgaaagaaggcaaaaccgtgattcccatggggcggtaaaacactcatggggcggtatttggcccatggggcggttagcggattttgcctttccgcagaatagagccgttttcgcctaccgccccatgagggttttaccgccccatgagatatttaccgccctatgggtgagttaccgccccatgaaacgtgtaataacaaagcatgcccttgctggtggaagcgatgctttgctatttcgcctgcttgtcggcgaggatctcatccaccagcttgggcttttcggtcagctggccggtgaagccgggacggatatccatgtgcagcaccagagaagtgcggtagccctgctcggcgagcttcttggcggcctcaccggccaccttgagcacgtcgtccagattgccttccacgttggtgaacagggcgttggtttcctgcggcagggcggattcgcgaatcacttcgacggcctgagccacgtatggtgaaacctcggagcccacgccattggccgacacctggatggctgccacggtgttgaggtacggtttgccggtttccgggtcgatcggcacttcctgagtaacggcattacggtcaagaaccatgattctcctttttcagtagtgttaagctcccctggcaaggggagcttaacagccacacttatgtcagcgatacttccagaaatgatccatcgggccggagccgtggccgagattcagctgggtcttcagcgcaccggtcagatacttcttcgcatgcttgatggctttggacagcgtgtcgccaagcgccagatacgaggcgatggcggagctcagcgtgcatccggtgccgtgcgtgttcggattcttgatacgcgcgccatcaaaccaggtcacggttccatccgtctcggcaagcacatcgttggcatcctcggtgccatgaccacccttgaccagcgcggcacagccgtaacgctccacgatgcggtgggcggcggcctccatatcctcctgatcgcgaatcagcgtatcggtcagtacttcggcctcgggaatgttcggagtcacgaccgtagccatcgggaacagcttgccggtcaaggccgcaatggcatcgtcactgatgagcttggcaccggaagtggccaccataaccgggtcgagcacgatgttcgtggcgtgatggaaggtgagtcgttcagcaatgacgtcgatgatgtcagtggcagacaccatgccgattttcaccgcgaccggcggaatatcctcaaacaccatgttgatctggtcggcgagaatgtccggtttggtgtcctgaatggaacgcacgccggtggtgttctgtgcggtgagcgcggtgatggcgctcatgccgaacacgccgcaagccagcatggtcttcagatcggcctgcatgccggcaccaccggacgagtcggagccggagatcgcgagaacagcgggaagtgtagatgttgcaatctgtgccatagtgttcattctaagtggggcccatgatgtttttcggagcggttttccttgatgttttgccgctcctgtggtgagatgggagggtttgctgattgcgattgattcatgaaatgttcgggaggggacatggctgataacgatgtactgcgccgtgacggcgtcttggtacgcatcaccggttttgacgatgaacgcaccgcatattttggcgtaatgcctaatgggcacaccacacagctcacatttccgcgtcaggaggtgttcgatgtgggcgacgtgttgctcgtcggcacggatttctatcgtaaagtgccgcatgatgtgtggccgttgaagccccgtgtgggcatcgtgcgccgtgcgctcaacgaaggcgtggtcctggagacttccgacggcctcgaactgcttgaaggcgattacccgaattcgatcatgcccggcaacaccgtgcagttcaccgacctgttcggcatcgaacgagtgctgtggcccacggccatccgcccaggcgaatccgatcacgatgacgacatcaagcagtaccgcatcacgccgggcagcgatccgtcgcttaccttcgattcgttcggcggttatgagcaggtgatcacgcgcgccaaggagcttatcgaaacgcagctgggcaacagtgcgcagatgcgtgcgatcggtgccaagcccatcaagggcgtgatcttcaccggtgctccgggcaccggcaaaacgcatctggcccgcatcatcgccaatgtggcggacgcgcagttctatctggtgtccggcccgaccatcgtgagcaagtatgtgggcgatagtgaggaaacgctgcgcatgattttcgccgccgcgcaggcggacaagcgcgccatcatcttctttgatgagatcgattcgattgcgtcctcgcgcgagaacgataccaatggcgtcggcaagcgcttggtggcgcagttgctgacgttgatggatggtttcgagtccaagggcaatgttgtggtggtcgctgcgaccaatcgtattgaggacgtggatcccgctttgttgcgtccgggccgtttcgactggcagattcctttcccgatgccgtctgagcgcgaccgtttgggcattctgcaggtgcaggcccgttcgttgtcaatcgagggcgaactgccgttggcggatatcgcacagcggaccgaaggctggagcggcgccgaagtgtgcgccatctggaccgaggccgctctggtggccgccaaggaccgccgcggcgcgatccgtgctgccgacctcgtcaccgccttcgagcgagtcgagcgtcgtcccgaattaagacaccaccgggcataataattggctcccctcagagaggggagccagagaggtttactcctgggcggtggagtagagcttgccgccttgggcggtgtacttttcgctcatcgcatccatgccggcgaggatttcttcggggctgagcacgttggcggacaccacgtcgttatcgacattggccttggccttagccagtgcctcggagtcgatgccagcagcagcctccttcacgatttgctgctgagcggcctcgccaccgaatgccttgcggatgttctgggagatggccatcgagcagaacttcgggccgcacatcgagcagaagtgcgccatcttggccggctcggcgggcagggtgtcatcgtggaaggcgatggcggtgtccggatcgtaggacagattgaactggtcgagccaacggaactcgaagcgagccttggaaatcgcattgtcacgatccatcgcgtgcgggtggtgcttggcgatgtctgcggcgtggcaggcgatcttgtaggcgatcacgccctgcttcacatcatccttgttcggcaggccgaggtgttccttcggggtcacgtagcacagcatagcggtgccgtaacgaccgatctcggtggcgccgatggcggaggtgatgtggtcgtaacccggagcggtatcggtggtcagcggtccgagggtgtagaacggggcgcccttgcacacggccttctccagctcgatgttcatacgcacggtgtcgaacggcacgtggcccgggccctcgatcatcacctgcacgtccttggcccaggcgcgctcggtcagctcgcccagagtcatgagctcggaaagctgcgcggcgtcgttcgcgtcggccagggagccggggcgcaggccatcgcccagagagaacgccacgtcgtacttggcgaagatgtcgcacagctcgtcgaagtgcgtgtacaggaagctctcctggtggtggcgcaggcaccagtcggccatgatggagccaccgcgggagacgatgccggtcacgcggttggcggtcagcggcacgtaacgcagcagcacaccggcgtggatggtcatgtaatccacaccctgctcgcactgttcgatcacggtgtcgcggaacagctcccagctcagcttggaggcgtcatcctcaaccttttcgagggcctgatacatcggcacggtgccgatcggcacgggggagttgcgcagaatccactcacgggtggtgtggatgtcgttaccggtggacaggtccatcacggtatcggcgccccacttggtggcccacgtcagcttctccacttcctcgtcgatggaggaggtgacggccgagttgcccatgttggcgttgagcttggtcaggaaggcggatccgataatcatcggctcggcctcggggtggttgatgttgcagggcatcaccgcgcggccggcggccagctcggagcgcacgagctccacatcgcagttctcgcgggtggccacgtactgcatctccggggtgatgatgccgtggcgggcgtaccacatctgggtgatcgggtggtccttggcgcgcatcggctcatgcttgcgtccacgccattccttggtggcgcggccgcgcttgatggcgcgcttaccatcatcctcaaggttgcggcggcggccctcgtaatcttcgatgtcgccgcggtcgcggatccagtcgagacgcaggggcttcaaaccttccttcgggtcgcacttggggccttcggtgttgtagtcgtggaacggcgggttcgggcccacgccgggcgtgtcgctcagcttgatttcggtgtacggcacttccaggtcgtaggaaccatactgataggtgaacggtacggacttggtcttgcggatgtgcgccttgtcgcgctgcttggaaccacgggcggcgatgtccacgcgctgctgcttggcgagcttctgggcatccttggcgtccttggcgttggtgaacttcttctcagtggcctcggagccaggctttgcggccccttcctgagcagcctgagtatcagcagcgggggtgtgggctacgacgcgcggcgcgtagccgtgcttcttgtcgccgcggacggccttccagccttcgaccatggtgcgcgcggcctcttccgggttctcggcacccgcgatggcggagaccgcgaaccagccggcggccttggtgccggcgagcatggccatatcggctgcggtcacgccgccgcccacgaccaccgggaattcgctggcagcgcagatggtgttgatctgggcggcgtccagtgtcttgccggagccgtcgttgccgcccacggaagcctcgggcttggtggtggagacgtgcagagggccggcgccaatgtagtcgatgcagccgtcgggcagctcgttgatgagctgaacgaggctttcggtctcagccgacagacccacgatggcctcgtcgccgagcagggcgcgggcttctcgcggctccatgtcggtctggccgatatgcacaccgtccaccttgatgcccttgcggcgggcctgccacaccacgtcggcacggtcgtcgatcacaaaggccacggaatcggacttctcattgtcctcgatgatctgcgcgatgtcgcgggccatgtcggtcagctcagaggcatcggcctccttggcgcgcagttggatgaaggttgcgccgccgcgcagagcctgatccaccacgtcggtcagcggacggcctttgcagtcctccggccccaccacgaagtacgcggacaagtcgaagttgtctcgcatggaggcgtatgggtattcattactcattattattcctacctttgttgtttcttgtggaagtcttattgggaaaaactgttatgagctccctcatcagagggaactgaaactactgcaccaaaatctcggattccgccacctgttcggcggtaacattccacagcgcgtcaaggaacgcgatctggaacgagcccggcccgtgcgaagtcgtatcggctatctctgccgcgcggttgtacagcagagatgcggacagagcggcggtcaacggatcggaaaccgccagatatgtggcagccacgccgcccagcgagcagcctgcaccgatgatcttggtcatcatcgcgctgccgcccggcagtcggtacacggtttcgccgtcggtcaccagatcggcgatgccggacacagccactgcacagcgggtggaagcgtcatgggaggaatgcttggcgtgctgttcggtcagatactgtgccagcgccaccgccgcaccggttgcggactccacgtcgtcgacggattccactccggcggggcggtgctcggaagcgtcccccacggtttcggtattgagcccccacatgttcgccagcgcgattacctcggaggcgttcgcgcgaatcatggtcgggggagcggccttgaaggtctgaagaatggcggtgcgggtgtggccgatgccggcggccaccgggtcgagcacccacggcttgtccaagtagttgagtcgctgggcgatttcgggcagcgcatccttatagaacggcagcagcgtgcccacgttgatgtagttcgcgcccgcgattttcgcggtttcgatcacgtcgtccggcaggaaactcatggccgcagtgccgccggccgccagttgcgcgttggcgaccaaattgatggtcacaaaattggtgaatgactgggccaatggagtcgtctcgcgtacgcggcgaacggcatcggcgatattgtcgcggatgggtgaatcggctggaaccggagtcccggcggtacaaccgctggacacatcggcaaacgatgatgcactattgctcatttactgctccctacgatggtcttaaccaacaggttctaagggtcaggctcaggcctttctcaactcgcgaaccacatgcgagtccccctgcactacagtgccgacgctatgcgccaacatggacattatcgtgacggatttgttcgatacgtgtcgtcaggtctggcgcgtcccgtccattcgtgatatgtggacgcctccgccgagcaacatctcccggatttgtgacgctaacgcgatgtcagtggtacaaattggggaagggcaaaacaacaggaacaatatggaggtgtttgcgatataggaatcgctgcgaacggccgctcgtgagacgcggaacatataccggacaatgccgcctgacctgtcaccgtatacggctatcctgaagcggttgttattagaccccaaaccgttcaaaccagaaggtgcattgtggctcagtccaaactcgatgaagtcgtatcccttgcgaagcgtcgcggcttcgtgttccccgccggcgaaatttacggcggcacccgttccgcttgggattacggccccctcggcgtcgctctcaaggacaatatcaagcgtgaatggtggcgctccatggtcgtcacccgtcctgatgtcgtcggtgtcgacacctccatcattctgccgcccgaagtgtgggtggcgtccggccacgtgagcgtgttcaacgatccgctcgtcgagtgcctcaactgccacaagcgcaaccgcgccgacaagctcgaggaatcctacgccgagaagcacggcgacaagatgccggaaaacggcatgaaggacatcgtctgcccgaactgcggcacccgtggccagtggaccgaaccgcgcgacttcaacatgatgctgcgcacccacctcggcccggtcgaggacgagaacagcctgcactacctgcgtccggagactgcacagggcatcttcgtcgacttcaagaacgtgatgacctcctcccgttccaagccgccgttcggcatcgccaacatgggtaagtccttccgtaacgagatcaccccgggcaacttcatcttccgcacccgtgagttcgagcagatggagatggagttcttcgtcaagcccggcaccgatgaggaatggcaccagtactggatcgacgcccgcacccgctggtacatcgacctcggcgtcaagccagagaacctgcgccactacgagcacccgaaggagaagctctcccactactccaagcgcaccgtggacatcgaatacaagttcggcttccaaggttccgactggggcgagctcgaaggcatcgccaaccgtaccgattacgatttgagcgcgcactccaagcactccggcgaagacctgagctacttcaaccaggccaccggcgagaagtatgtgccgtacgtcatcgaaccggccgccggtctgacccgttccctgatgtgcttcctcgtggacgcctacgatgtggacgaggccccgaacaccaagggcggcgtcgacaagcgcaccgtgctgcgtctcgacccgcgtctggccccggtcaaggccgccgtgctgccgctgagcaagaagcccgaactgcagaccgtggcacagaacctggccgacgacctgcgcttcaatgaatggatgatcgactacgacgagtccggtgccatcggtcgtcgttaccgtcgtcaggacgagatcggcaccccgctgtgcatcaccgtggacttcgacaccctcgaggaccacgccgtgaccatccgcgaacgtgacaccatggcccaggagcgtatcgccctcgacaaggtggccgattacgtggccgcccgcatcggcgagaagcgcacccgcgtgcccctgaagcctgtggaaatgggcggtgagccttggcctgagtccggcgttcaggaagccggcggtctgtactaaagacgggtctgtatagaggctcccctctatgaggggagctgtctacgaagtggac

SEQ ID NO: 2290 - DNA, 62346 bp, Unknown
  R119_18m  MAG No. k141_18229
cggcaacgcctatgccgccggccagtgcacgtactgggcgtatgaacgccgtaggcagatgggcattggcacgccgtcctatctcggcaatggcggcgactggtggcgcaacgccccctcgtacggcttgcgcgtggaccacaaccctcaggtcggtgcggcgctctccttcctgcctggtcaggatggtgccgacggtacctatggccatgttgccgtagtcgaagccgtgtatggcgacggcacattccagatctccgaaatgaactggggtggtccgtggaacatgcacaaccgcaccttgaccaatttgggtcagtactggttcgtccactgaccggttggttcggccgatatatgcggttgaagggttcctcttgaagaggaacccttttcgtattcgaggccggtccgtgatatcgtcggatgttgcgttgctacccacgagttgctacccacgagttattgcccacgaaaggaggagacatgcccaaggaaaccggtgagaaactcatcgtccagaacaagaaggcccggcatgactatgccatcgaagacaagtacgaggcagggctggccctgaccggcaccgaggtcaagtcgttgcgcgaaggccgcgcatcgctgtccgaggcgttcatctccatcgaccgccgtggcgagatgtggctggagggcgcgaacatccccgaatacctgaacggcacatggaacaaccatgcgcccaagcgcaagcgcaaactgctgctgcaccgactgcagatcaccaagctcgcccgcggcatcgaagccaagggatacacgattgtgccgctgagcctgtacttcaaggacggtcgcgtcaaggcggagatcgcgctggcccgaggcaagaaggaattcgacaagcgccaggccctgcgcgaagagcaggacaagcgcgaagccctacgcgccatgcgctacgccaacatgcgccactagtcccgcctcttggctcccctccggaggggagccaagaggcggatgtccgcgttgtgggccatttcgcccacgattaacgcttccgtagcattgcactcctacgctctggaaccatctgggaaacatacccgcccagctgactatccggagagaggaaatccaatgtctctaagcaagggaatacaatccgctgcggccgccgccctgagcgcggccatgctgatcgccgtggcggcctgtggcacgactgacagcaccgacaccgcatccaagagcggcgattcatccaaggactcgtccagcacttcgattcaaggcttcgacaccagcagcatccagaaggacgacgagattgccgcactgctgcccgattccgtggccggcgacggcacgctgaccgtcggcgccgatacttcctatgccccggccgagttcctggccgaggacggcaagaccccggtcggctttgatgtcgacctgtccaaggcgctggccgcagtgttcggactgaaggaaaacaccgtctcctccacgttcgattcgattatcccgtccgtcggctccaagtacgacatcggcatctcctccttcaccgtgaccaaggaacgcatggaggctgtggacttcgtgacctacttcaaggccggttccacgttcgtggtgcagaagggcaacccgaacaaggtcgactcctcgaacctgtgcggcgtgaaggtggctgtgcagaccggtaccacccaggaagaggaagtcaacaaggataacgagcagtgcaaggcggacggtaaggatgccatcgacatccagtcctccaagctgcagaccgatgtgactaccgccgtggcttccggtaaggctgatatcttctacgccgatacgccggttgccggctacgccatcaagcagaccggtgatacgctcgaggccctcggcgaggacgttggtgtgacccctgaggccgtggccgtcaagaagggcgattccaagaccgccgaggccgtacagaaggccatccagaagctgatggatgatggcacgtacaagaagatcctcgacacgtggggcgtctcttccggcgccgtcgacaaggccgagatcaacccgtccgtcgagtagtttcggttactatgaggactcccgttgccctgcggcgggagtctttttgtatatgtatgcactgtagtgtataaatatgcttaaccgttgatcgttgccgttgaagcggcgtaagagagaagaagaaacgattatgcagtccaccaaactgaagtccattatggccattgcactgagctcggccatgctgttcgccaccgccgcttgcggcacctccgacaaggccgatgccggtacggattccgccaagggctccgatgccgccaccatcaccagctacgatgtcagctccgtggagaaggatgacaccatcgccgcactgctgcctgaatccgtgaccaaggacggcaagctcaccatcggcaccaacccctcctacgccccggccgaattcctcgacgccgacggcaagacccagatcggctacgacatggatctcgcccgcgccatgggcaacatcttcggtctcgagaccgaaatcgtctcctccaacttcgatacgatcattccggccatcggctccaagtacgatctgggcatcgccgccttcaccatcaccaaggagcgcatggaatccgtcgacttcgtctcctacttcaccgcaggcatgggctatgcagtggccacaggcaaccccaagaacgtcgatgagaacgacctgtgcggtctgaacgtcgccgtcgagaccggcaccgtcgaggaagaggccatcaacaagaccgccaagcagtgcaaggcggatggcaagaaagacatcaccatccagtcctccaagcagcagaccgacgccaccaccgctgtggtgaccggcaaggccgacgtcttcttcgccgattccccggttgtcggctacgccatcgcccagaccgatggtcagctggaacagctcggcaaggacttcgatgaagtgccgaacgccatcgccatcaagaagggcgattcccagaccgccgaagccgtgcagaaggccatgcaaaagctcatggacgacggcacctacactaagattctccagcactggggcgtcgaatccggcgcactggacaaggccgaaatcaacccggccgtcgaatagtcgacaagctgtcgcgaaaattcgaatggggcgcactgtttgtaacacagtcgccccattcgtgcactaaggttcaacgctagttgcaacttgcagttcaggctgcccaacacatccaaggaaccagattatggcgaagaaagaagtcgacggtgagggactgaacatccccaaccgcatcaaggcgttgccggtcaagcgccccggcccgattgtggccgcagtgatcgtggtactgctcgccgcgatgctcattcaaggcttgattaccaatccgcgactggattggcccaccgtctggaagtacctgttcaacgagaacgtgcttgaaggcattcgctataccttggagcttaccgtgatctccatggtcgtggcgatcatcctgtcggtgattctcgccatcatgcgcaaatccatcaatccggtgctgcgcggcgtcagctggttcttcatctggttcttccgcggcacgcctgtgtacacgcagctcattttctggggtctgttcgccgtgctgattcctaagatcagcctcggcattccgttcacctcggtggagttctggagcatcgactccaacgtggtggtcaccgcattcaacgccgcatggattggtctggccctgaacgaggccgcctacctgtccgaaatcgtgcgtgccggccttgaagccgtggaccccggccagaccgaggcggccaaggcattgggcatgaaccgcacgctcatcatgcgccgcatcgtgctgccgcaggccatgcgcatcatcatcccgcccaccggcaacgagaccatcggcatgctgaagaccacctcgctggtcaccgccgtgccgttcaccctcgaactgcagttcgccaccaacgccatcgccaaccgtatctacaagccgattccgctgcttctcgtggcctgcttctggtacctgctgatcacctccattctgatggttgtgcagtcccgcctcgaggcgcacttcggcaagggcttcgatgcccgaccggtgggcaccaagggcaagcagacgccattgccgggtaagaccgacggtgaaccgaaggatgacgtggacaagctcaaccagaccacatttgtcggattgaatgcataaggcgggagcgcgattatgactacgaatgacatcaccagtgttgccccggtcgtgcgcaaggcggctgacggttccgtgattcctgctgtcaaggccgtgcaggtgcacaaggcgtttgggccgctgcatgtgctcaagggcatcgatctaaccgttatgcccggtactgtgaccgtgattctggggccctccggttccggcaagtccacgttcctgcgtctgatcaaccagctggaaaccctgaccggcggttccatcgaggtggacggcgaactcatcggctacaagcacgtgaccaaaaacggccaggacatgctgcagaccctggacgataaggagatcgccgcacagcgctctcgcctcggcatggtgttccagcgcttcaacctgttcccgcacatgaccgcgctggagaacgtgatggaagccccgatccacgtgcagcaccagtccaagaaagccgcccgtgacctggccgtggccgagcttcagcgcgtcggtctgggcgatcgcatggactattacccctcccagctgtcgggtggtcagcagcagcgcgtggccattgcccgtgctctggccatgaagccggagatcatgctcttcgatgagccgacctccgcccttgaccccgaactggtgggcgaagtgctcaacgtcatgcgttccttggccaaggaaggcatgaccatggtgtgcgtgacccacgaaatcggcttcgcccgcgaagtcgccgaccagatcgtgttcatggacggcggcgtagtcgtagaaaagggcggccccgacatcatcgaccaccccaccgagcctaggtttaaggacttcctacagcatgtgctgtaggaaggctgttatattacctcagcactgtcgtgcttcggcgtcgcctacggggagcccactgggctccccgctttacggctccgcctacagcatgtgctgtaggaaggctgttatattacctcagcactgtcgtgcttcggcgtcgcctacggggagcccactgggctccccgctttacggctccgcctacagcacgtgctgtaggaaggctcgttgttgcagctccaaaagcgtacgctgatgaactcagcgtacgcttttcacgaaggggcatgttccaatcctgcaaaggcggcgggttggattcgctttgcgcaataatcgtccgctaggctggtgagccatgtgtggaatcgttggatacgcgggaaatattgaaacggcatgcggcaagcctttggaggtctgcctgcaaggcctggaacgtctggaataccgaggctatgactcggccggtgtggcgctgaccgcgcccggcatggataaggtggtcgtgcgcaagaaggccggccgtttgaagaacctggtcgaagacatcgagcgcaagccgatgccgctcgccacggtgggcatcggccacacgcgctgggccaccaatggcgagccgagcgacgtgaatgcccacccgcacaccagcatggacggcaaggtggccatcatccataacggcatcatcgaaaacgcctctcagctgcgtttcgacctgcaagccgaaggctaccgattcgcctccgccaccgacactgaggtggccgctaagctgctcggcaagatcgtggacaagattatcgcggacgaaggcaagccagacttgttcaaggctgtgcgccgtatggcccgcatgcttgaaggcgcgttcaccattctggccaccgactgccgccagccggacatcgtggtcggagcccgccatgattcgccactggtcgtgggccttggcgagggggagaacttcctcggttccgacgtcgccgcattcgtggcctacaccaagcgcgccatggaagtcgaccaggatcaggccgtatgcgtgtccgccgacaaggtcatcgtcgccgatttcaacggcaacgtggtcgaaaacccgaagacctacaccgtggattgggatgcttcggccgccgaaaagggcggctgggattcctttatggacaaggagattcacgaagaccctgccgcagtgcagcgcaccctgcttggccgcttcgacacgaatggcgacatcacccttgatgaagtgcgtatcgacgaacacgacttcaaggccatcgacaaaatcatcgtcgtggcctgtggcaccgccagctacgccggccaggtagccaaatacgccatcgaacactgggtgcgtatccccgtggaaatcgaactcgcgcacgaattccgttaccgtgacccgattctgaccccgcgtacgctcgtggtggccatttctcagtccggcgaaaccatggatacgctgatggccctgcgccacgcgcgcgaacaggggtccaaggtgctggccatctgcaacacgcagggtgcctccattccgcgcgaatccgacgccgtgctctacacacacgccggcccggaagtcgccgtggcatccaccaaggcgttcgtggcgcagattaccgccgcctacctgctgggcctgtatctggcgcaggtcaagggcgcgatgttccgcgatgagattcatcagatgctcgactccctgaaagacatgccgcgcaagattcagtgggtgctcgacacccagcccaagaccatccaggcggccgccgagcgcatggtgaacgccaactccttcttgttcctcggccgccacgtgggctacccggtggcgcttgagggcgcgttgaagctcaaggaaatcgcctacacgttcaccgagggcttcgcggccggcgagctcaagcatggaccgatcgcgctggtggacgagggtgagcccgtggtgttcatcgtgccgccgcagcgcggccgcaatgtgttgcacgccaaggtgatctctggtatcgaggaggtcaaggctcgtggcgcgtacatcatcgccgtggccgagcagggcgacccggatgtggaacggtacgctgacgtggtgttctggcgccccgcctgcccaacgctgatgagcccgctggttgacgtggtgccgctgcagctgttcgccatggacatggcaaagctcaagggctacgacgtggacaagccccgcaacctcgccaagtccgtgaccgttgagtaagccacatcggtatgtgattgacgagcctcatattccgtttgagatggacgtgctgtatgaggacgagcggatcatcgtggtggacaagccgcattttctggccaccatgccacgcggcatgtggtatcggcagaccgcgctgatccgattgcgtgagcggctgggggagccggacatcacgccagcgcaccgattggaccgcatgaccgccggcgtattggtgttcgtgcgggattcggcctgccgcggcgcgtatcagatgctgttccagaaccggcaggccgtcaagatctatgaatgcctggcaccctgccggccgatcagcggcccgcgattcggcacgatcatgcaggtcgaaccgccacgcccgttcccattgctgcgccgatcgcacatcaccaaggaacacggcacgatggccgcattcgaggaaccgggtttggccaacgccgaaaccctcatcgagcgcggcgacctctgtttccctcccgctggcgggaggtggcgcgaagcgccggagggtggtccccatccgggaaatcaccccatctgccgctacacactccacccgcgcaccggcaaaacccaccaattgcgcgtccacatgaattcgctcggcctgcccatcgtgggcgacgacttctacccgcgcatccagacacgcccctacgacgatttcagccagccgctgcaattagtggcgcgtgtgctacgattcaccgatccaataacaggcgagaagcgcgaattcgtttcccgtgtgccgcttaagatctgatttcttaggggggggggatggcgagaccaatccccgcccgtccgaatcactgtccctttcgactggccatccagctcattgcatcgtcgtacaccatcatgatgcgcttgcgatagctatcgatgaattcctgcgcaccaatgctcgcgataacgtcgtgagcgggttgcacggtgctgtcgaatgcctccggcagcctatccaccaaggtgtggaatcgtaaaatcacggattcctcatctaatcccatccgctgtgcgaatcgttccagatgtttgcggcgtaattgaagaagatctcggcgtccgccgatgttcatcgccaaagtggcatttatgatctgcttgccatgccccaaataaggaaacaccgaagcaaggtcatagagcggggcaagccgcacggacgcgccatcgagcaatagcgagtagttcttggcgtggctgtctgttgccccgacgagataactggcgaggatgccgtcggtgaaggctcggatattgctttcggcctgaccgggcagaccgtgcttgcgcaacatttccgcatatgcattggacgttgggccgttgtgttcctcgtatttcagcgatgagggaatgcccagcgcttgggtaaagtcttcttggtgcagggccgtcaccgtaccattggcggacactatacggtcataccgctcgctgatgatggctgggaccccatcaaagatgtgaaaagaggtgtgggccacgggtattcccatcgcctccacaatgcgcatggtgatgtgttcgttgaatgcttggtgtggaagggtcggtatgccgggcttgatgatatgagtcgtccgcgcgattccagtggtggagaaccatgatccattgcggttcctcagtgcgatcttgccctgctgtcccgcgaccgaccaatgctcgtctacgcttgcggactggatgcctgtgggggcggctgcgcgtagtcgattcgcgatctgcgaatcgctgattggaataagtgaatcgtcatctatgggcaagtgcgggtcggcggacagccgtaatgcgccggtggcatcgaatccgatggcttgcaacagatcaaatgcgcttgtcgatcgggcatgatgcaatcgcatggcttcatctcgggcctgaggggattccgggaccagggcctcaaggaaattacgcgggatgtcgcctgaatattcggctgcggtaatgggcatggaaagcgatattggtgtgggtgattgcgaccaacgataggaatcgtgatattggaaaataatgctgccatcgtttgttcttcgaaactggccgatgggtgtttcgccgagaaatgcattgagagtgttttcgctcatggtgtcaccattcatagagttcggcgggctgcggggttttgcggacatccagcgacaagccaagctcagtcagagcgctgagaatggtggagaatccgggattggggactcgggcgtgttcaaattcgatcagccagcgacgtgacacgcccagccgttgggccatgtcggtctgactgatgccctggcgttgcctttcatccttgataagccgcgcgtattcggcgatatccatgacaatcatgtgcaaaatatatcacagtatagtaaagtgtgcaatattctgcacatagttggaaatgtgcagaatattgcacaaccgagtcgattggtcggtgcggaattgcctatggatcactggcaggtgaatcactgacaggtaccagtggatgccagcacatgccgctcgtcagctgatgtcgcgcacggaaccgcgttcgatcagttccggcgggattacggttttgacgccgaccggtatcttctcgccttcgcattgacggcggaccatggagaaggcggtggcgccaatgtcgtcaaagcgcagcttcatggtcgtcaggttcaagcgcggaaccatatctgccagcgaatcatcgacgcccacgatgctgacatcctcgggcacgcgcttgcccgctgactgcaacccgagcattgcgccgtatgccatttggtcgttggcggcgtagatggccgtgcagtcggggtcgtgggccaacgccacgccggcctggtagcctgaatccgcgcaccaatcgccgatgtacatgctcggtacgcgtgctcccatttgttccaacgcttctcgccaaccgcgggcgcggctttcggcggcgcgcgaggtggacggtccggcaatgtggtagacggtcttgtgccccttgctcatcaggtaatcgacgatagcggtcgagcagccatactggtcggcgtcaacggtggggcagtggtcggcggcggattcgcagatgagcacgactggaagttctcgcggaggcttgtatccgacgaaatcggagatgcgttcctccagcactacgatgacaccatccaccggctgacgctgcatgcgatcgatggcggcggaaagcgtgcgttccgcaccgtggcgcatggtctggatggtgactgaataatcgtcatcggccgcgttggccacaatagaatcaaggatgcgggcgttgccgaacgcggtggtgttgaacatcaccacgccgatatcctggaagcggccgtgctttagggctcgggccgcataattcggacgatacccaaggcgtttcattgcagcttcgacacgctggcgtgtttcgggtttcaccgcatcgctgccattcgccacgcgggacactgtctgtggcgaaacgccggcggctttcgctatgtcttgcatggacacctgtgttggcctcgacattttaccctcgcttgactcattaatgttggtgtttcgtttgcaacgcttatcttagggccgcttacggtaacgataacatcgttgtcttcgtgaccattgtagcagagtgactgagaaacccttaattcaacacggtactcaacacgattggacaatgttacaaatggtgttatgatgataacgcaaacattttggtcaaccttcgaaggagaggggttgggaatggcttcagccgatatcgcagctgcgcccgtgcattcgggcaaggctcgtgtgaataagcacaaggccgattggcgtggatggaaattcatgtggccttttgcggtggtgttcgtgttcgtgttcatcgtgccgatcgtgtacgccgtttatatttcgttcttcaagaagcagatgatcggcggcaccaagttcgtcggcttcgagaactacgcgcgcctgttgggtgatggccagttctggagcagtgttggtcgtgtggccctgttcacgtgcgtgcaggtgccgatcatgctgtgcctgtcggctttgatggccctggcgttggattcgatgaagctgcatggcacgaggttcttccgtatctcgacgttcctgccctacgcggtgccggcggtggtgtcgacgttgatctggggtttcgtgtatggcgcgaagtacggcctggtgggttcgttgaacgatttcctgggcacggacatcgacgtgctcgcccccagcgtgttgttggccagtatcgggaacatcgtgacgtgggagttcacgggctacaacatgctcatcttctacagctcgctgtcgaccatcccgcattccctgtacgaggcggccagcatcgacggcgcgtcggagtggcagatcgtgaagagcatcaagcttcccgaattgcgcggcagcctggcgatcacggtgatcttcagcatcatcggctcgttccagctgttcaacgagccgagcattttgcagaacatggttcctggtaatgcgatcacgacgtattacacgccgaacatgtacgcgtacaacctgagcttctccggcaaccagtcgaactacgcggccgcgttggcgatcgtgatggccgtgatcaccatggccatcgcctacatcgtccagctcaacagcctcaaggagcagatgaagtgacgacgactactgctgttcgtgttgaggaatcgatgatgatcgtgaaggagcgtatgtgatgagtgcagcaacgacttcggccgccggtcgcctgaccgacggcgagctcaaggcccgggagaaggccgccaggaaggcggagaaggcccgccagaagaggatcgccgccgacgaggccgccgaacgcaggcgcagcgcgaaggcggggttcgcgaacgtgaacaacccgaggcgttccacgttgttgaccgtcctgtgcgcggtcttcgccgtgtactgcctgttcccgttcgtctaccttttgatcaacgcgacgaagacgcaggccgacttcaccagtacgttcggcctgggcttcggcaagacgttcgccctgttcgacaacatcgcgacggtgttctcctatcaggacggtatcttcgcgcgctggctgttcaacacgatcctgtacgtggtggtcggcgccggcggcgcgaccctgctggcgatcatgggcggctacgctctggccaagttccgcttcccggggcgcaaagcggtgttcgtggtcatcatcggcgcgatcagcgtgccgggcatcgctttggcggttccccagttcctcctgttcgccaaattgggcctgacgaacaccccgtgggccatgatcatcccgtcgctgatcagcccgttcggtttgtacctgatgtggatcttcagcgagcaggccgtgccccaggagctgctggaggcggcgcgcgtggacggcgcgtccgagttccgcacgttctggcagatttccttgcccctgttggctccgggcatcgtgacgacggcgttgttcacgatcgtggcgacgtggaacaactacttcctgccgttgatcatgctcaaggacgcggactggtacccgctgaccatcggcctgaaccagtggaaggaccaggcctcgaccgcgggcggccaggcgatccagaacctggtgatcacgggctccctgatcacgatcatccccctggtgatcgcgttcctgtgcctgcagaagtactggcagtccggactcgccgcaggcgccgtcaaggagtgatggagtcggctccgccgacgcggtgtcttcaccgcctcgcggcggggtctctccctccgtcccggctccgccgagacaaccttccccatcagagggaggtaatagtgccaagccccctctgacgagctgagccgttaggcaaacagccctgtgggctgtttattcccgcggacgcagattatcgataaaattcaataaaggagctgaatcatcatggaacgtaaagagttcaagtggccgcagccgcttgcgggcaacaagccacgcatctggtacggcggcgattacaaccccgaccaatggcctgaggaagtgtgggacgaagatgtagccctcatgcagcaggccggcgtcaacctcgtctccgtagccatcttctcctgggccaagcttgagcccgaagaaggcgtgtacgacttcgattggctcgaccgcgtcatcgacaagcttggtaaggccggcatcgccgtcgatctcgcctccggcaccgcatccccgccgatgtggatgacccaggcccacccggagatcctctgggtcgactaccgcggcgacgtctgccagcccggtgcccgccagcactggcgcgccaccagcccggtcttccttgactacgcgctcagcttgtgccgcaagatggccgagcactacaaggacaacccctatgtggtctcttggcatgtgagcaacgagtacggctgccacaaccgcttcgactattccgaagacgccgagcgcgccttccagaagtggtgcgagaagaagtacggcaccatcgacgccgtcaacgacgcttggggcaccgcattctgggcgcagcgcatgaacaatttttccgagatcatcccgccgcgcttcatcggcgacggcaacttcatgaacccgggcaagctgcttgactggaagcgcttcagctccgacgccctgctcgacttttacaaggccgagcgcgacgccctgctcgagatcgcccccaagccgcagaccaccaacttcatggtctccgccggcggtgccggcatcgattacgacaagtggggttacgacgtggacttcgtgtccaacgatcactacttcacgcctggcgaagctcacttcgacgagctggcttactcggcctccctatgtgacggcatcgcccgcaagaatccgtggttcctcatggagcactccagctccgccgtcaattggcgcccgatcaactatcgcgtcgagcccggcgaattggtgcgcgactccctggcccacttggccatgggctccgacgccatctgctacttccagtggcgccagtccaaggccggtgccgagaagtggcactcttcgatggttcctcacgcgggccccgactcccagatcttccgcgatgtgtgcgagctgggtgccgacctcaacaagcttgctgacgagggcctgctgagcaccaagctggtcaagtccaaggtcgccgtcgtcttcgattacgagtcccagtgggctacggaacacaccgccacgcctactcaggaggtacgccattggaccgagccgctcgcgtggttccgcgcgctggcggacaacggtctgaccgcagacgtggtgccggttcgcggcccttgggacgagtacgaagccgtcgtgctgccgagcctgaccatcctgtccgaagagaccacgcgccgcgtgcgcgagtatgtggcgaacggcggcaagctgttcgtgacctactacaccggtctggtggacgacaaggatcacgtctggctgggtggctaccccggttccatccgtgacgtggtgggtgtgcgcgttgaggaattcgccccgatgggcaacgacttccccggtgccatggaccaccttgacttggacaacggaaccgtggcgcacgatttcgccgacgtgatcacctccgtggccgataccgctcacgtggtcgcctccttcaaggcggataagtggaccggtttcgacggcgctcccgccatcaccgtcaacgacttcggcgacggcaaggccgcatacgtcggtgcccgtctcggccgtgagggtttggccaagagcctgcccgtgctgctggaggaactcggcatcgagacttcggctgaggacgatcgcggtgaagtgctgcgcgtcgagcgtgcggacgaaactggcgagaaccacttcgtgttcctgttcaaccgcacccacgatgttgcggtcgtggacgtggaaggcgaaccgctggtcgcctcgctggcccaggtcaacgagtccgagcacacggccgccatccagcccaacggcgtactcgtcgtcaagctgtaaaaccgcgcatagcgcctaattacccaacggctcccttgctgctcatcgtagcaggggagtcgttttcgtatctccagcaaagtcgggtagggtggtcaccgtgcgaggcaaaaacagagtgacgatggcggacgtggcccatgaggccggtgtttcggtagcctcggtgtctaattttctgaacaaacagccatatatgagcgaggcgatggccgcgcgtattgcggaagccatcgacaggctcggatacaaagtcaactcgtcggccagaaacctgcgttccgggcgtacccggttgctcaagctggttattcccgatctgcggcaggtgtacttctccgaactcgccgaggatattctggccgaggcccggcaacatggctacggcgtcatcgtggaatccaccactaacaatcgtgcccgcgagctggaaagcatcgcatcgatgggcacgcacagcgcggacgggctcatcttaagccctctgatgatgacggttgacgatatcgcggctttggatggcgattacccgctcgtactgttgggtgaacgtttgttcggcgtcaacgcgccgcacgtagtgattcgcaatcgcgaaggggccgccgccgcgacttatcacctgcttgatgccggttgccgccgcatcgccgtagtcggtgccgtgccccaccccgagcacgatttctcgtcgggctccatccgcacccacggatatcgtgaggcgctggccgcgcgcggcatcccctgtgatgacagtctgcttatcgaaacccaaggctgggggagcgccgacggtttggtcgcggtggacaccatgctggagagtggcctgcaattcgatgccgtgttcgctttgaatgacttgctggcgtggggcgtgctgcgtgaactgcgcgaatgcggcgttgccgtgccggatgatgttcgcgttatcggcttcgatgacgtggaggaatcggcctacatggtgccgtctctttccaccgttaaccccggcagggaagccatcgcccgactggccgtcgaatccatcatccaacaggtcgaatccggcagccgtgcccccgcccaaaccatcgaggccccctatagcctctccctgcgcgagtcctcaccggcgttggcgcgcgcctgatgaatccgtggttcgaaatatccgaagtgaatgacaaggcccgtcaatcgtatggtgattgacgggccctggtcgtattggacttgactgtacttggtacgggcgtgactctccgtcttttagccgtggaattccacgctgatccaggagatggcgggaagcgttgccgtgcaggtgccggtggcgttcattgcaatgtcgagcggttgcggcgtgacggcttcgggcgcttcggcggtgttggtgcggtacggatcgtcctcatgcaacagttgcgccttgctgagcgcgagcgtgccgagaccgggcaggccgggcagcccggaaaggtcgatggtgagcgtgtgcggggtgttggcgtcgcggttgacggcaagcagcagaccggtgcgggcctgttcatcccacgtgactaccgcgtcgatggccggcacgtcgccatatgcctcggtatggatggtgggggagctgatggccggagcgtaggcctggccgcgcgcgtgaagggcggcttcggcgaacgggtagaacgtggtctgccgccatgccgggccgtgttcctcggccatgatgggggcgatgacgttgaccagctgggcgcgcgaggcggaacgcacgcgatcgcagtgcttgagcagggtgatcatcagggaaccttcgaccaccgcgtcggccgcggtgtagatgtcttccagcaaatgcggagacttaggccatggctcgtggtgcaaaccctgcgcggcctccgccttccactggtcttcctgctcgttccacttgtccgaataccatacgccccattcgtcgaaggacagggcgatgtctttggtgccgttgttggcttctcgcgcctgatcggccgcgtccgagacggtggcgatgaacttggtcatgtcttcggaagaggccaggaagtcctgcatggaggcggcggtccgggttttatggccgcggtcgaagtagtaggcatggcaggagacgaagtcgagattctcgtaagccttggtgagcacggtcttctcccacgtgccgaaggtcggcatataggcacccgaggaaccgcaggccacgagttcgagaccggactcggcgagcttcatggcgtgggccaccttatccaccgcgccggcatattcttccgggctcatgtggcccacctgccacgggccgtccatttcgttgccgatgcaccacatcttgatatccatcggctcctcgatgccgttggccacgcgctgatccgcccaagcggtgccgggcgcgccgttgacatactcgagctcgtcgagcgcggctttcagcccccgggtgcccatgttgacggcaagcatgatttcggtgccggctttctggctccagcggtagaagtcgtcgatgcccatctcgttggtttcggtgcaatgccaggccaggtcgcggcgcacggggcgattctcgcgtggaccgatgccgtcttcccagttgtagttggatacgaaattgccgccggggtagcgcacgcaggtgacgcccagctccttgaccaggtcaagcacgtcttggcggaagccgttttcgtcggcggtgggatggctgggctcgtagatgccgccgtagacgcagcggcccagatgttctacgaatgagccgaacagacgcgggggaacgtcggctaccggagtggcgtcggcgttgagggcgatgctggcgtccggcgtggttgcgttgtcagttgtggagacgttactggccgtggtgccggcggcggtcggcgccgggctgctttcctgcttgtcgggatgggtggtttcggcggaatactggctgttgtgagtggtcatgagcgggatgcatctccttcggtttgcggttagtcaccatggtgcgacgtgtcgtgtttgcgtaaacataaaacatgtggtaccgtttcttaaaacgatacaagacttggaacaaaacgccaagtcccgtcgtttcccataacaaggaaggaaagaacgatgaagttcggcaagaagacaattgccctgattggtgctgtggccatgctctcctctgtagctgcctgcggttccacctctgccggggatagcggaagcaccgactcctctgataagaagatcgagctgaccgtgtggtcctgggattccacactgcctcgtacggtcaagggattcgaggccaagaacccgaacattaaggtgaaggtgaccaatgccggcaccaacaaggacgagtacaacgcactgtccaacgccatcgaggccggctccggtgctccggacatcgcccagatcgaatactacgcactgcccgaatacgtgattcgcggccacctcgagaacctctccgatctcggcgcctccgatttcaaggacttctacaccccgggcacgtggtcctcggtgagcatcaatgacggcgtctacgccctgccgatggattccggcccgatggcctggttctacaacaaggacgtcttcgacaaggccggcgtcgatccgacccaggtgcgcacgtgggacgacttctacgaggctgccaagaagattcgcgccgtggactcctacatcacctccgattccggtgacgccggtttcttcgactccatgacctggctggccggcgcgaccccgttcgagacctccaaggacggcgagaccgtgaccatcaacctgaccggtgacaagaacgtcaagaccttcaccgacttctggcagaagatgatcgacgaagacctcatcgacaccaagaccgtcggctggaccgacgattggaacaagggtctggatgacggctccatcgcatccctgctgaccggcgcttggatgccgtacaacctgctttccggcgctccgaacggtgacggcaagtggcgcatcgcccagatgccgaccgcagacggctccgagaccaactccgagaacggtggttcctcgctggccatcgtgaagtccgacgacaaggccaaggtcgccgccgcctacaagttcatggaatacgcctgccacgacgccgagggcattaagacccgtgttgacggcggtgccttcccggccgacaacgacaccctcaagtccaacgacttcctcaacatgacctccctgaccgactccgacggcaaggcccacgagtacttcggcggtcagaagttcaacgaggagctggccaaggccgcagccaatgtgtccaccggctacaagttcctgcccttcgaggtctacgctcgcggcaagttcggcgactacgccggcgatgcctacaccggcaagaccacgctctccgatgccgtggcttcctggcagaaggacctgcaggattacgccaagcagcagggttaccaggtgaagtaacggcaatcacagcagacttcctcctgtggtttctgtagcgggaggttgcgataacaggatcgggcactcttcggagcgcccgattttcttatgccatgggagcagtggcgcgcggattgcgataccaagatggcgtgttgccgaagaatgtgtataataaaagatgttatcgcaaccatagctacaaagtggcgaaacaaagccgttttgtgactactgaaccatagagtgatggttcacgatagcatgacgacgaggagagttgccatgctgttgtggtgacaatcactgcagaccgccgaaaggcgatccaaggaaggagaacagaacgatgaagttcaccgttgctaagaaggccattgcacttaccggtgcggttgccatgctgggttccgttgccgcctgcggttccgacaccgccagtggcaagccggctcaagataaggacgttaccgaaatcaccgtgtgggcttgggagcccacgctgacccaggttgccaaggacttcaccaagaagaccggcatcaaggtcgatctcaagaacgtcggcaccaacaccaaggaatacacccagcttgataacgccatcgaggctggctccggtgctccggacgtcgctcaggttgagtactacgccatcccgcagtacgccatcaagggcaacctgctggacatcaccgacaagacctccggctactccgacttctacacccctggcccgtgggcttccgtgcagttcgccggcaaggtctacggcctgccgatggattccggcccaatggccttcttctacaacaaggaggtcttcgacaaggccggtgttgacgccgagcagatcaagacctgggatcagtactacgacgccgccaagaagattcacgctctgggcgacaactactacatcacctccgacaccggtgacgccggcttcttcgactccatgacctggctggccggtgcaaagccgttccagacctcttccgatggttccgaagtcaccgtcaacttgaccggtgacaagaacgtcaagaccttcaccgacttctggcagaagctgctggacgagggcctgctcgacaccaagaccgctggctggtctgaggactggttcaagggcatggtcgacggcaccatcgcctccctgttcactggcgcttggatgcctgccaacctggccaactccgctgctgacggcgctggcaagtggcgtgtgacccagatgccgaccgctgacggctccaccaccaactccgagaacggtggttcttcgctggctgtgctcgcctccaccaagaaggctgacgctgcttaccagttcatcgagtacgccaaccacggcgacggcgtggccacccgtgtggccggcggtgcattcccggctgacaaggcctccatggagtccgactcctttaagaacaccaccactgtgaagaacgccgatggcgaggacgttgactacttcggtggtcagaagtacaacgaggttctggctcaggctgctgagaacgtgtcctccgactaccagttcctgccctacgaggtcaaggcccgcaccatcttcggcgactaccttggcaagtcctacaccggcgaccagaagctgactgacggtatcgccgcttggcagaaggcactgcaggattacggcaaggatcagggcttcaccgtgaagtaagccttgaaccctcgctgagactgcctagctaatctcacctgatacacaaagccccgtgacgaatcccgtcacggggcttttaccgttttaagccccgcctagtacactcgtcaccatgcgagtgatcggacagcgaatcaaaagaatggcaaccatagcagtgactgccatcctttccgtatccctggcctcgtgcgggcaggccacggacgacaaccgtacggagatcagcgtatggagctgggaaccgagcatgggggaggtcatccgccgtttcgaaaaagccaatccggacatccgcgtgaaatggaccaatatctccggctacggcaatcttaataccgccattcaagacggttacggcacgccggacgtggctcaaatcgaatactatgcactgttgcagtacgcggtctccggccaattgcttgatctgaccgacaaaatcggctcggattattccaacttctttaccctcggcacatggtcgtccgtgcagctcgccggccgtacctatggactgcccatggattcgggcccgatgggcttcttctacaacgaagacgtgttccgccaagccggcgtggacgccaccaagatcaagacttgggatgactattacgaggccgccgaaaagctcaaggagatcggcgcgtatatcgccgccgactcgggcgacggcagtttctatgacgcgatggtctggctcgccggtggtcagccgttccacacgtcggccgacggcaaaaccgtgaccatcgatttggatgaggatgccggcacccaacggttcaccgaattctggcagaaaatgatcgatgaggggcttgttgacaccacctccgccacatggtcggatcggtggaaaagcagagtgggcaccggcaccatcgcctccgtgttctctggggcttggatgccgtcgttgctgctgtccaatgtgccgggcgcggccggtctgtggcgcgtggctcccatgcccacctatggtgggcagcctgccaacgccgaaaatggcggctcggcgctgaccgtgttgcaactgacccgtaagccggatgcggcctatcgtttcgtggactttgtggcgcatgacgcccaaggcattagcgcgcgtgtagacggcggtgccttcccggccgattacgccaccctgaattccgctgattttctggataaaaccacgattaccaatgaccgtggcattgaaatcccgtatttcggcgggcagaagttcaaccgggtactgtcggaggccgccgaggatgtgtcggtcggataccagtatctgccattcgaagtgtatgcgcgcagtgacttcaaatcgacggtgggccaggcatacgagtggtccggcagtttccacgcctatcagcagcgacaggaagccattgagatgggcatgaaggacgaggaaggcaacccgctcgaaccattggagaagcccggcaagaaagtcagtctctccgacggcctggcccgatggcagaaagacctccgagaatacggcctcaatcagggctttacgattaagtagggttttgagtaggtttttcggggagggacggaatcgactgcgctatgcgcggccgatgcctgcacaccgcgttacttcacattgcgcgagtagatgtatgccatgcctttgaagatcaggtctgaatcgtagacgtcgatcatgtcggtgtcgttcttgaaaatgcggctgagccctcccgtggctaccacttggaacggctcatcgatttccttgcggaactgctgaatcgtgcgctcaatgccaccgaggaacgtgtaatacagtccggcctgcatagcagtgcgcgtattggtggccagaatcgactgcggttgcgtgatctccacttccggcagctgggcggtctgcccccacaacgcctcggccccggtgcggatgcccgtggtgatgaagccggagcgaatcgtgccggaaccgtccacatagttgaacgtggtggcggtgccgaagtcggccaccagcaccgggccgccataggtgtggtaggcgccggcgcagtcggcgatgcagtcagagcccaaggttttggggtcgtcgagacgaatgttcatgccggtcttgacgccagggcccaccaccatcggttccaatccgaggaatttgatcagcgaggcgcggaaggaatacatcaccttcggcaccaccgagcagacgatcacatcgtccacatcgtcggccgtgtaatcgctcaaagccaggaactgcgtgatcatcagaccgtattcgtctgaggtgtgcgtcgccttggtggtgatgcggtaggagccgacgatgcggtcgacctccagaaaaccgatcacgatattcgtattgccgatatcgaccgccatcagcatgggtcaggcctccttgttctcgtcatcgacattgctcgcgccgccggaacgcaacgctgcgagccgcagcaacagtcgttgcgcaagcacggttttgtccatcttgtcccaatgctcgatcttcggggtgccggcatcctccgctccggacgtgagcacggtgacaacgttggtgtcggtgccgaacccggcaccggcgtcgcgcagattgttggccaccagcatgtcgcaatgcttggacgtcagcttcttctccgcattacgaatcagatgctcggtctccatcgcgaatccgcacaggatctgcgagccgtcgtcgcgcttgcgttcgccggcccacgccagaatatccgggttggaaaccagctccacggtgatgctgctgcggccggccttcttgattttctccggcgcaatctcggtcacgcggaaatcgcccacggcggcggccataatcgtgatatccgccgccgggaaggcgtcggccaccgcatcgaacatatcctgcgcggtcatgacgcgcaccacatccaccgcatcgggcgcggtcaaggcgactggaccggagaccaacgttacgtcggcaccaaattcggctgcggccgaggcaatcgcataccccatcttgccggtggaatggttcgtcagatagcggaccgggtctagcggctcctgcgttggcccggcagtgactagcacgcgcagccccttgagcggggaagatgagggagcctggtcatcctgcgcatccgccagcagccgagcggccacttcctcgatgcgcgccggctcttccatacggcctcgtcccacgtcgccgcaagccagattgccttcctccggctccacaatctgccagcccaattcggcgcaggttttcagattgcgctgcgtggccggattgttgtacatatgcacgttcatcgccgggcataggatcttcggcccctcataggccagaatggtggacgtcagcgtatcgttcgccaatccacaggcgatgcgggcgatgacgtcggcgctcgccggggccaccaccagcagattggcccaggccgcatcggccacatgattgatggtcgttggcacggtcggattggccgtcacgtcgccgtgcgcggccggataagcggggaacatcgtggtacgggtgggttgatgggtcagtgaggtgaatgtcaggggagtgacgaagccttcggccgctgtggtttcgataacccgcacctcgtggccggccttggtccaatcggatgccagatgacaggccttgaacgcggcgatgctgccggtgacgcccagaagaatatgtgccatagctgcctcccggccttatgccaaggccgcacgtgtgcccacgccagcgcttcccgcgtcgttgcccgacgatgcgccgcgtgttgtggtcgccgcggaccctccgtcggcgccgcaatccagtatagccattgcctccggcgtgtccggggatatagtagaacgtggtgatcgacccgaatgggcggtcaaccacgcaagataacaacgaaaccatattcgggcgtaagcatgcccgaatgcatcagggagtatccatgtcccagaacaatggtgtgcacggcgagtccggcgcaaccgaagacaggaacatcgacggcgcgaatcaagccgccagcaccgacgcgagcctgaacgcgcgcgcgaaatcatcaaacaagaagaacgacggcccgaagtggtggctgtggacgctgatcgcggtcgtcgtggccgcggcgctcatcgtgggcgtcaccgtcttcggagggaaaggcaagggcaaggacgcgaacgcctccggctcggccagccgatccgataccgtggccgtcggcctcaaactcgccccggtcaatcttgacatccgccaccagtcgggttcggcccttgagcagatccttatcggcaacgtgtacgagggtctcgtctcgcgcggctcggacaacaaggtccaccccggtctggccaagagctgggagatctccaaggatggcctgacctacacgttccacctcaacgagaagatgaacttctccaacggcgacaagctcgacgccgaggatgtggcgtggtccatcaacgagctcaaggcccagaagtactacgactacgagcaggtcaagagcctggacaaggccgaggccgtggacgccaacacggtcaggctcaccctctccgcgcccaactcgaacatgctgtggtacctcaccagccgtcccggcctggtctacgacaaggacgccacctgggatcagaagaacggcgcgttgggctcgggtccgtacaccgtggtctccttcgacccgaacgacaagatcgtgctcaaggcgaaccccaagtattggggcaccgagcacaaggcgaggaccgagaacgtgatcgtccggttcctgccggacgagaacgccagcatcaacgccctcaagagcggcgacgtgcaggtgctttcgtccatcattcctgcgacccttgccgagccgttccgcaaggatccgaactatgtggtcaaagttggtggcggttccgacaagttcgtgctcgccttcaacatggccaacgacaagctctccgacaagcgcgtccgccaggccatccgatacgccatcgaccataagcagatcatcgcctcgcgcggcggcgtggacgcccccctcggcggtccgatccccgagatggatcccggttacgaggatctgagcggcctgtacccgcatgacgtggccaaggccaagaagctcatggaacaggccggatactccgagtcgaagccgctggacctgaccctcacctacgccaacgtgtatggcaccgagctcggcgaccagctcaagagccagctcaagcccatcggcatcgacctgaagatcaactacgtggagttctccacttggctgcaggacgtgcacgccaacggcaactatgatctttcgctcgtggaccatgccgaaagccacgacttctacggatggaccacgccgagctactacttccactacgacaacaaggacgtgcaggccctgtacgccaaggcgctggaggccacctccgacgacgaggcctcgaagtatctggccaaggccgcgaagatcgtctccgaggacgcgccggccgactggctgttcagtttgaaggtcaccatcgcctacgccaagggcgtgaatggtgtaccgcaggacttcatccagaccgtgctgcccctctggcggatcacctacaccaagtagtcccggaacccatcggtcgggcgcggcgcgggagtgattccgtggcgcgcccgaccgtggacggcccatccggccggtgacgccacgggcggtggcgagggaatcgataagggaggcgttatgcggttcttgatgcaacgcttgctgctgttcgcggcggcgctgttcggcatttcggtgctggtgttcgcgatgctgcgcatcctgccgggcgacgtggcggtcgtgatggccggcatgaacgcatcgccggcgcgtgtggcggccctgcgcgccgaattcggccttgaccggccgtatgtcgtgcagtatctcgactgggccggagggctgctgcacggcgacctcggcgtgtcggcgctgaccgggcgggcggtgacctcccaggtcggccaacgtgcgacgatcacgttcccgctgatcgtgatgagtctggccatcgcgctcaccctcggcttgtccatgggcgccgccgccgtgatctcccggtcgccggccgtgcgcggtttcctgcgcgtgctgtccatcgtgggcggcgccgtgccggccctgtggagcggcctgctgctcatcctcctgttcgcacggggcgtgggccttgtcggtctgctgccctcgcaggggttccccgccgctgggtggggcgctcccgggcgggcggtctcgtccctgatcctgccggcgcttgccaccggattcgtgtccggtgcgggcatcatgcgttacacgcgctccattctggaaggcatcgccgatgagggaggtccgatcgatatggccatgtcctgcggcatgacccgcacccaggcgttggtgcgcgtgggattgcggttggcggctccgcaactcgtctcggtggtggggctggcgttcgcctcgatgatcaccggcgtgatggtggtggagaacctgttcgccctgcccggtctgggcgccctgctggtgggcgatgtcggcaaccgcgatctggtggccgtgcaaagcgagctgttcctgctcgccgcgttcttcctgctgatcggcctggcggtggatctgctgcacgcgctgcttgacccgcgtctggccgccggaaaggaggaatgatggttgatcgcaatggtcgatggcgtcgttcgggcgtggttctgggcaccatctggtcccggggcaccggccgctactcgctgatcgtgctggggttgtggatggtcgtcgccctggtgtcgttgttctggaccccgcagtcgttgctggccaccgacggctaccacgtgtgggataagccgtcgtccgcgcattggctgggcaccgacggcaccggcgcggatgtgctgagctggctgatggccggatcgcgtacgaaccttgccatcgccctgctcaccgttgtctgctcggctgccatcggcatcctactggtcgggctgatggtcgcccgttcttcggcgctcgcttcggcgtcggtcgccgtggtcgacgcgctgatctccatccccaccgtgctcatcgccctgctgctcgccgtgccgttcggcgcatccgcggccgtggtgatcggcgcatgctccatcggctacgggctgcatctggcgcgcgtcgcccgcccggccgccctgctcgccgcccgctcgggatacgtgcagtcggcccgggcgaacggtgccagcgggttcggcgtactggtcagacacatcgtgccgaacatcacgccggtgctgatggtgcaatcgtcgatgtcggcgggcacctcggtgctggccgaggcgggcctgacctatctgggcgtgggcgtcggcgcgggggtgccgagctggggccattcgctggccacctcggtcaaactcatcaacgtgtttccgttgacggtggtgtggcccggtctgatcgtcaccctggtggtggtcgcgctgaacctgttcggcgacgcgttgcgcgacgccaccgacccggtggctaatcccgcgttgcgacagatgactgtgcccggtgcggttgtgccggtagctaggggagccggtgacactgcggcgcagtccgcagtggcagcgccgaaggagacggatgatgagcgttgaaattcacgggctgaatattgctatcggcggcaaaccgattgtcacggatgtcgatctgtccatcgcggacggcgaacgggtcggcctgatcggttcctccggctccggcaaatcgatgatcgccaagtcattgctcggcctgttgccgcgcgaggccgtgctgtccggcaccatcacgatgggagaaaccgccatcctgtccggagaaaccgccgagtcgcggcatgggcaggaagatgactcaggatctgacgaagaacgcggcgcggcagataggcaccatgttgccggtgaacgcagggttgccacctcgggccacgattccgctgcgtacgccgacgagcatacgcttgccgatctgcgcggccggtatgtgggtacggtattccagaatccggcccatgcgctgaacccggtgatgaccgtggcgcagcagattgcgttgccgttgagactgcactacgatctgaccaaggccgaacgtgctgagcgagtgaataccatgctggacaaggtcggactggaccgtgacgtggccggcacatacccgcacgaactgtccggcggccaacagcagcgcgtgggcatcgccacggcgctgatcacctcaccgcgattcatcatcgcggacgaacccaccaccgcgctcgactccatcacgcaacgtcagatcgtggacctgctgacctcgttggtggacgacgccggcgcatccatgctgttcatcacccatgatttctccgtactcgcgcgtgccaccacccgctgctacgtgctggacgccggccgcatcgtcgaatccggacccaccgccgacctgcttgctgcaccgaccacgccgcaagcccaacgcttggtcgccgccgcccaaaccctcaccctccacacccccaaggaggattcgcatgagtaacagcagtgtgccactcctctccgcccactccatcaccaaatccttcggaccgcgcaccgcacgccaccaagtcctcttcgacgtctccgccgacgtccacgccggcgaatgtctggccgtgatcggcggctccggatccggcaaatccacgctgacccgcattatgctgggcttggaatccgcggactccggcagcgtggaatacgagagccaatccattgtcggcggccgaaaatcgccgggattcgcgaccctgcgccgcgaatcgggactggtgttccaggacccgttctcatccctcgacccgcgttggcaagtcgccaaatcggtggctgaaccgctgagtctgcagcgacgtgatctgaacaacaccgatatcgacgagcgggtggtcgcggctctgaccatggcgggtcttgaaccggcggacttcctgaaccggtacccaatcgacctgtctggtggccaggcgcagcgcgtggtcatcgcccgcgccatcatcaacgagcccaaggtaatcctcgccgacgaaccaatgagcgccatcgacgtggccgcgcgcatccagatcctcgacgccttcgccgctatccgtgaggcccggccgagcaccgccatcatcatggtctcccacgatctcggcgtggtgcagcacatcgccaaccgcatcctcgtgcttcacgacgggcgcgtcgaagagacgggtcccaccgccgaagtgctcggcaacccccaatccgattacacccgtcagctcatcgaggcagcctcgttatagacctttttggctcccctctctgaggggagctgtcgaatgcagtgaggctgaggggagttacgggtgccgtcgtactcccctcaggccgccggcgacacgcgcttgtcgcgggttgtgctatggtgtgaggcatgcagattatctcatgttgttgtcgctaaccgacgcccctgggcgagcggtcagtgacgcataacttgagatggagcattcgaatcgcggcgaatctgccgcatacttttcatgtatccgatggcacaagcgtaatcgtgtaatgcgcgagccgtggttaacatgaaaaaccggttcacttttcggattcaccgtacagtgagcgggaatactcgattttcaaaccaaagccacagtccattcgtctgggaacgtcggttcacgaacgcaacgcagcaaaacccccacaaccccagcaacgaaggacttcacatgaccatccacaacagcctcgcagaactcatcggcaacaccccgctcgtcaagctcaaccacatcccgcaggcggccggcgtcaaagccaccatcgccgtcaaagtcgaatacttcaaccccggcggctcctccaaggaccgcatcgccgagcgcatcatcgacgccgccgaacagtccggccagctgaagcccggcggcgtgatcgtcgagcccacctcgggcaacaccggcgtcggcctggccctggtcgcccagcagcgcggctaccgcacgattttcaccctgccggacaaggtttccgaatccaagcgcgcggtgctgcgcgcctacggtgccgaagtcatcgtcacaccgaccgacgccggcccggacgacccgcgctcctactaccaggtcgccgaacgactggccaacacgattcccggcggcttccgcccgaaccagtacgacaacccgaacggcccgctgagccactactacaccaccggccccgagatctgggaggctacggaccacaaggtcacgcacttcgtggccggcattggcaccggcggcaccatctccggcaccggcaagtacctcaaggaagcctccaacggcgcggtcaaggtcatcggctccgacccggaaggctccatctactccgcttcctcacgcgacgaagtccaccagtacgacatcgagggcgtgggggaggacttctaccccaaggctttcgaccggaacatcaccgacgacatcgtgcgcgtatccgacgccgaagcctttgaaatgacccgccgtctggccggcgaggaggcgttgctggtcggcggctcgtccggcatggccgtggccagcgccatcaagtacgcgcttgccaatgatttggacgagaaccagattgtggtggtgctcgcccctgattccggccgcagttatctggagaagatcttcaatgacgactggatgcgtgccaacggctacggcgacatcgtggaacgcaccagcaagccctccctcgccgagcagtaccttaacggaactccctctgatgagggagctgcggatggactccataactagctatcaaaagaatcaataccaacatccgcactaactaaccgcacctgttttaccttcgaatacggaacaatcccgaaaggaacccaatatcatgtccgctgaatacaacgccaagttcgccaacaccgacatcgccactcgcgccatccacgccggccaggagcccgacccgaccaccggtgcggtcgtcacgccgatcttcgccacctccactttcaagcaggatggcgtgttgggcctcaggggaggccacgactactctcgctccatcaaccccactcgcaccagcttcgacgagcagctcgccgccgtggaaggcggcaagtacgcgctgagcttctcctcgggcttggccgccatcgacgtgctgctgcgctccaccatcaagcccggcgacaacatcctgctcggcaacgatgtgtacggtggcacctaccgcctgctctccaaggtgttcgtgccgtggggtgtgggcctcgacgtggtggacatcaccgatctgaaagccgtggaaaccgcattggcctccaagcactaccagtatgtgtgggtcgagaccccgtccaacccgctgctcaacatcaccgacatcgcggccaccgccgaagttgcccacaagtacggcaccaaggtcgcggtcgacaacaccttcgcctcgcccgcccttcagcacccgctggccgatggcgccgatgtggtggtctactccaccaccaagtacatcggcggccactccgacgtggtcggcggtgccgtggtggtcaacgacgaggagacccgtgagaaggtcgccttcctgcagaacgccgccggcgcagtgccctccccgttcgactcctggctggacatccgcggcctgaagaccctggatctgcgcgtcaagcgccacagtgccaacgccctgaaggtggccgaatggctcgaatcccagccctctgatgtgattgagcgcgtctggtacccgggcctcgagtcccacccgggtcatgaaatcgccgcccgccagatgcacggcggcttcggcggcatcgtctctgtgcagctcgcggccggtgccgaggcggccaagcacttcgtggaccacacgcagatcttcacactggccgaatcgctcggcggtgtagaaagcctcatcgaggtgcccgccgccatgacccacgcctccgtggccggcaccaccctgcaggtgcccgccaatctggtgcgtatttcggtcggtatcgagaacgccgacgaccttatcgccgatctcaagcaggcgttggatcgtatctgaccgtactgacggtactggtggcaccgtattgacggtgccaccacgcttatcggcggactcgctatcgattggtacctacaaaaaatccccggcccacaagggtcggggattttccgttatcgattgaacatggatcgaatcagctggcgttgccgccctgccatccggtggcatccgcaccagccgggcgcaacgcctgaccggaagtcggtgtggtgccatcaacgaccacacgagtgccgatggtggcaaagtcgtacatccacttggcgtcggccacctgcatgttgatgcagccgtgcgagcctgggataccctgctgcacatagatggggtgctcgccccacatgtatgcaggaacaccgtgcagggcctcgccgccgttatagtaggaaatccacggcgtgcctggctggttgtagccttcgccaaccatggtctgcgattcgtacttgagatacacgtagaacgtgccggtatcggacagcatggaaccatcggcggtgggcttgccagaagcgatgttgaacttcttgaccaccgtggtgccctgatatgcagtggcagtctggttcgtcagatcaacatgaacccacttatcgccatttgccgtatcgaagttatgaggcacctcgacctgcttgacatcatatgggctgtctttcacagccacagtggaatcagtggactggttctgctcgatggcggtagccagacgttcgggggcgtccccggcaccagtcacttcaataccatccacaccgagtgtcttatcggcaccaatttccacgccgccttcgtctttcggcgtgatgtagacctcgcgtgtcaccttgggaacagtcagttccttggttacgctgtcactggtgacgtacttggtgatggcatcgcggtcgactaccagactcatggtgccacccgccttattcaccgtgggcttgaggaatgaggcaatggtatcggccgggatggtgacgctcttgttcacgccgttgtccacggtcagtttgaggccaagcttggcattggcgtcaaactgtgtttgctgtgcgctcgcgtcatcaatcggattctttgcagtctgtagcttgaccggcaccgtcgcattttcgcccggggtcgcgacggcctccttgactgcagcattgacaacattgatatccggacccttgccatcctgacccgcggtgtaatcgaactgcttggtgctcttgttgtagacaacggtggcaatctgcgctcggtcggcctcatcgaccaggccggcggtgacgaattgttcggcagtctctttgtccctggtggcggtcagagcgatatgcggctgatcgaaaatattgagcttggccacgtcgccggtcttcgcgttcaacagcgcatctacggttttatccgtgtcgacggtgacgccaaggtccttcagcgaggctttgacgctgttgccttcggcggtgaacgtcactgtggtgttattcagctgctgcttcacagtattcgcaagttcttcgcgggtctggcccatgacagagacattgcccaaatgaacaccgggcgcagccttgtcttggaagtaccaacgtccgacgaagaaataggctattaatgcggcaagcaacactgcaaatatggttatgatggcaatccgtgcggccttgccatgtgatttagcggtggtagatgccataacatgttcacccacataggctgtattgtcggcatggttattggtgccattgtcgctttgctgtggcgtggcggtacctgtggccgcggctgcgaacagcccatcggcggccacaggctgcagcaccgccgtctcctgatcgtcaggagaggaaaaggaaaatgtattgttggccataaaatgccccgtcttagttctctcaaagcggcatatcgtgtgatatgccgggaatagcgttcctcgacgcataataatacggaagggctacgtacatcggtacgaggtattccgttatacgatgaaatccatccgcggtcggcctacactggtcgtttatgacagcacatcaggcggcgctggaggcgctcacacgatacttcggctatgactcgtttaggcccggacagcaaggaattgtcgaggctttgcttgccggacgcgatgtcttgggcgtgatgcccaccggcgcaggcaagtccgtgtgctaccagattcccgccgcgctcagcccgggtgcgactttggtcatatctcccttgatttccctgatgcgcgaccaggtcgatgcgctgaacgacctcggtctgccggccgcgttcatcaacaccactcaaactcccgacgagcaggcgatggtgttcgcccaagccgccgccgggcagatcaaactgctgtacgtggccccggaacgcttggaaaccgggcgattccgcgactttgccgcccgtacgccgatctcgctgatcgccgtggacgaagcccactgcgtctcccagtggggtcaggacttccgctcgtcgtacttaggtatcggcgatttcatcgccgggctgccgcagcgtccaccggtgggtgcgttcaccgccaccgccaccgaacgggtgcgtcgggacatcgtgggactgctgggattgcggaatccggccgtcaccgtcaccggattcgaccggccgaacctgtattttgatgtggtcaaactggagaccaaatacaaggccgcatgggtggcgcggtatgtggccgaccatccggacgaatccggcatcgtctactgcgccacccgcaagaccaccgaagcgctcgccgacacgctgaaccagatggggcatccggccgtcgcctaccatggcggcatgtcgccggacgcgcgtgaggtggcccagcgcgacttcatcaccgacaaggtgccggtggtcgtggccaccaacgccttcggcatgggcatcgataagtccaacgtgcgttacgtcatccaccacaatctgcccgaatccattgaggcctactatcaggaggccggccgcgcgggccgtgacggcgagcccagccgatgcacgctgctgtggaatgagtcagacatcgtcacccggcgtcggttgctggataacgattatgagaacgagcgattgactcccgaagagcaggagatcgttcgccagtccaagcgccggctgctggacggtatggtcggctactgccgcaccaccgactgcctgcaccggtatatgacccggtatttcggtcaggaattgtcgccgaatgctggttccgcggcgggtgaagacattgcggcggactcttcgcagtccggcagatgcggtgcctgctcgaactgcgaaagcacgttcgagaccatcgacgtgacccgcgtggcgcaggcgatcagccgttgcgtgcatgacgtggggcagcgcgtcggttccggcaagatcgtcaagatcctgcgcggttcgcgggcacaggatctggcatggctgaacccggagcggatgcccaccttcggcatgctcaaggacgtgaacgaggctcgcgtgcgcgacgtgttgagccagatggccacggacgggtacctgtcaatcgccgaagggcgtatgccaatcgtcatgttcggtgcgcgggcggccgaaaccgccgctcccgacttccactatgagatcaaacaggtggaacgcaagtcggcggcggccggttccggtcggagcgggggagtggctgatactgccgattccgccaatgttcccggcgatgcgctgggctcgtatatcccggacgatgacgaggaatcgctgttccagaagctacgcgaactgcgacgcaccatcgcccaggaaatcggcaagccgccgtacatcgtgttctccgacaagaccttgcgcgacatggcccgcatcaagccggttaccaacgcgcaatttctggcggtcaacggcgtcggtcaacacaagctcgacctctacggccagcgcttcatgcaaaccatcgcctcgttcaatgccgggagtgcgtcataacaatctcctatagcgaaccgcggagtatttgcgggcgttcttgggctggcgcgactacgatgactgttcgatacttcatgaccgaacactcagcaagtagaaaggcaacagcatggcagaagacaaggccgaaaagcccgtcgtcgaatcattccagcttgatcacaccaaggtcaaggcgccgtacgtgcgttacatcgacaccgaaacgggccctcacggcgacgtgatctccaattacgatctgcgcctgacccagccgaacgagcaggccatccccaccggcggcctgcacaccatcgaacacaccatcgccgtgctgctgcgtgaacgcattcccggctacatcgactgctcgccgttcggctgccgcaccggcttccacctgctgacctggggcacccactccaccgaggatgtggccaaggcgttgaaggaatcgttggagttcatcgcatacaaggccacatgggatgacgtgcccgccaccaccgagaagagctgcggcaactatcgcgaccacagcctgttcgccgccaaggaatgggccaagcagatccttgaggaaggcatcagctccgacccgttcgagcgcaaggtcgtctgattcgtctgattcgattcaattctgattcggctcccgctggcgggagccgggggcgaagccgactgagggtggctgtcctcaactcggctggactgtccggctcctgcggacggaagccattgtttattagtgtccgtcatgcaacgcggaggggatttcttgtgcctacggcatggtaggttggccgtcagttagtcgccggtcaccgtgccggcaacccggcatgtcggagaggtgagaagtgactcagtcgaacgctgcaaacaaggcgacaggccgccgtttccgccacgccaccatgcgcgatctgccgcagatgcagaaaatctacgcacgcgcacgcgcgttgatggccgccaacggcaaccccacccagtggggcaacgaatttccgcgtgaatcggtgattgaagacgacatcgccaaccagcgtacgatgctgctggtcgacacctgcaatggccacgaacgcattctggcccagttcgccctgtgcccgggcaaggatccgacctacgccaaaatcgacggcgcctggctggacaacgacacctatgtgaccatccaccgcatcgccgcatccggtctggtgcgccacgcggcccgcgactgcatcaggtgggccctgaagcactacggcaacgtgcgcgccgacacccaccccaataacaaggccatgcagcacgtgctcgaaagctccggcttcgcccgttgcggcctgatccagctgctcgaccggccggtcgacaccaccagaatcgcctatcagcgccacgagtggtgagtgtggctgccggctgatgtgctcgtttctgcaccgtcatcggtttctgacggtagaatcagtgtgtgagaagaacacgttgggtcgggggcgtcgtggcggtgcttgcggctgtcatgctgtcgtcgtgcggcggcgtccagtcgaatcccggggtaacacaccgttgccaatccattcaccgcgcaggtgaatggagaagacatggcgatgcctgtcggccgatggagccccatcggccgacaggcatcgaggaagtcaccgtggccggcggaacgcgcggtcgccgattggggcgaatggcttgtgtggttcgctttggtaccagtaggcgaccgtggccacgtcgtcctgtcgttcgaagttgccggcttcctcggtgccgatctgctgccattcgacgcgcaggtctcgctcgaagtagatcgggtcggggatgtgccaacggtataggccgcgggtcacgggggtggcagtgtcccagtaggcgctttcgcgtccggcgaggttctgcgagtagaacgggaagccgaggtatgggccggtgaaggtgcgctcgtacatgcggccgtgttcgtcgaattcggcgaagctccaggcgccgccgaagtagtcctcggcgccggtgctgcaccaggtggggtatttgccgtcgccgtcgatgtagaacttgaattcgccttcgccccaccagcggctttcgagcgcggtgagcgccaggtaggtgccgacgtaggtgccgtgtccttcgacgccatcgagcaccacgtagtcgtgggcgagttcggtgacgcgttggcggcgccactgcgcgtggaagcgcatcgtgtcggccggcagccggtcgtattcggtgtagtcgatttggtagaagaacgcgggcacgtcctcgttgtggtcgttgcgcagcacgatgcgcgcgtgttcgaacggcatggcgaagtagcagttgaagccccggttcgggttgaccatgacgggaattgagttgatggtgcaggactgggcgtgtccgcagcagaagaagtcgccgatcgggcattgcaccgagggggagtcctcgccgtcccagtagaattccaggatcaggttgcgtagcacgtcggggccggtgggggaggtgcggtcggttaccgtcatccagatgtgacgaatcacgccggggccctcgacgtccatcaatgtcaccgattccccggacctcaccgtgctgatgcaggggcttcccttgcgggaggggcccaacgcgctggccgccatggccgcgcggcccttgccgccgtccgggttttcggcgttgatgcagcgggtgcggccgggggtcctcatggccacggcatccaaggcgccttgtccgagccccggcgcggggttcgctgtggtgaatgcgtcgagcatgatgcttacttcctttcctgtcgcaggcccgtcccgccacggcgttttgtctggggtgagccgggctgctggggggggggtatttcacggcaccggcggtgatgccctgggagagcttgcgctggggtagtgcccgatatcttgcgcactttggtcttcgcccgtccctgtggcgatgatcggttcgcttcccatacggtctcaccgagtcttgacatgtcgaggtagcggcgcgtcgaccactcgttcgacgtgacatagcgcacgcgtgcgcagacgagcatcaacgcgctgcgttcgtcggggaagctgccgaccatgcgcgtgcgccgtctgatttcgcggttgcgggggttgaccctggcgaggacgttgcgctcgaagcggaccatgcaccgctggtagcgggcatcgcgttcaaggcctcctcgacgctttttctgaccatacggtccagggtggtctccgacatggcctcatatcgcaaaaaccgtacgctgaaagtaactcagcgtacggttttcacgaaagcagccatcggctatcggtcagccgatagacctcagtcctcagtcgcagcgaccttggtgtcagccccggccttctgctcaaggccgagcttggagcgcttgcggctgtagccgaagtacacgatcaggcccagaccgaaccagatggcgaaacgcacccaggtctcccagttgagaccggcgatgagcacgaagcagaatacgatggccagaatcggggtgaccggcacgcccggcgcgcggaagccgcggggcgcattcggctgggtcttgcgcatccatagaataccggccgacacgatgatgaacgcggacagcgtaccgatgttcaccagctcgaacagcacgttgatgttgatgaagccgccggcgaacgcggtcagcagaccgaagaaccaggtgcccttgaacggggtgcggtacttctcgtgcacgtggccgaagaacttcgggaacaggccgtcacggctcatggcgtagcagatacgggactggccgtacagctgtacgagcatcaccgtggtcatgccgatgagggcgcctaggttcacgatcaccgcgagccagttcatgccggtctccagaatcacgccggccactggggcgtcgatgtacttggcgaactccttgtagggcaccacgccggtcatgatcatggtcatgacgatgtagagcacggtggaaacggccagggacagcaggatgccgcgcggcagtgtcttgttcgggttgatggtctcctcggcggaagaggacacggcgtcgaatccgatgaagctgaagaacacgatggatgcggccggcacaatgccgtacggctgggtggagccgggctggaaagtgtagatgccgtacggggagaacggctgccagttggacggcttgacataccacacggcgcacacgatgaacagcacgatgatggcgagcttgatgagcaccatcacgtcattggtgcgcttggtctggttgatgccgatcgagagcacccacgtgatgatcagcacgatgacgaaaccgggcaggttgaagtaggtggtgacgtccgggttggtgccgtaggcggcggtcagctcgaccggcaggtgcagtccgaagccttccaacaacttgttgaagtatccggaccagccggcggacacggtggccgcctgcagagcatactccagaatcagatcccagccgatcacgaaggcgatgagctcgccgaacgccagataggcataggagtaggccgagccggacaccggtgccatggcggcgaactcggcgtagcacaggccggcgaaaccgcagcagacggcggccagcaggaacgatacggacagggccgggccggcggtgagcgcgcccttgccggtgagcacgaagataccggtgccgatgatcgcgccgataccgagcatcgtcagatcgaaggtgcgcatcgtgcgcttcaggggagtggattcggcgacaagctgatccacgcttttcttacgaaacagatccatgttcttctctcatgaaacttaagatatggggctagaccggacggatttccgggatcccggcacgcctcaacgccgggaatcaaaggcggcttccgagaaaccgcatatcggtcattagtgtacgactgccgggcgaaaacaaacgattgtgaccacacgtcacattcctgcgcaacaataggtgcctatgagcatgaacgcagcacccgaaatcgcattctcgtccgagcagggcaaggccaactatgcggccacccgccgccaataccccgcacaggccatcgtgaacctcaaaaccatgcgcgacaacatggcccacctggtctccgtggtcggcggcccgaactccggcacggcggtgatgggcgtggtcaaggccgacgcatacggccacggactgctgcccgccgcactggccgcgctcgccggcggcgcgacatggctcggcaccgcgcaatcgcatgaagcactgctgctgcgcaaactcggcatcggccccgaccgttgccgcattctgacttgggtctacaacggcaccgaagtgccattcgatgagctgatcgctgccgatatcgacgtatcggtcggctccctgcccggcatcgatgccgtggccgccgccgcacgcaagctcggcaagcccgcccgcgtacacgtcaaggtcgattccggcttcggtcgcaacggtttcacgccggccggattcgacgccgcgctcgccaaactcgtgccgctcgccaaagagggcgtgttgcatattgtgggtcagtggagccatctcgccgtggccgattcgcccgatgtgcccgaattcgtgtcctccaccgaccgccagatcgaaacattcaaggacttcacgcgccgcatggaacaggccggcattccgccggagatccgtcacctggccaacacggcggccactttggaccgcccggagattcacttcgaacttacccgccccggcatcggcctgtacggctacgagcccgatcccgcgatgggcaccccgcgcgactggcatctgaccccggccatgcgcctgcaggcgcagctcggcacggtcaaggatgtggaggccggccatggcatctcttatggccgcacctacctgaccccggacaacacctcgaccgttattgtgccgctgggctacgccgatggcatccaccgctccgcttccggtttcgatatggaaggtgccaagcacgtggagaagccgggcggcccggtgcgcatcatgaccactgaaggtccgaagctctaccgcgtgtgcggccgcgtgtgcatggaccagttcatcgtggacctgcacggatccgccgccgaactcggcgttcacgagggcgacacggtcgaactgttcggcccgggccgcggcgaggattacgttgagcctaccgccgacgattgggcccgcgccgccgacaccatcagctacgagatcttcacctgcctgcgcaaccgcatcccgcgcctttacgagcatgccgccgaagtactgcccgccgccgacctcgccaagctcgacccggccacgctgctataaggtgcattaccgccatacggtggcaccccgtaatcccttcttcccgaatatgtgccgttgacatgtgctgagcgtcacatattcgggaaatcggccccaatctcccgaatatgtgccgttgagttgacgtcagtggcacatattcgggaagtcgggattactgcggccgatatgtgtgcctatgcttggcatatggaaacaacgttggatggggaacaggtgctgagcgatgagggctacaacgccttcgacgaggagcgatgggcacccgagccgcccaaatccaagtcgcgcacggctttcgaacgcgatcgcgcgcgactgattcattcgtccgctttgcggcgtttgggcgcgaaaagccagattctgattgccggtaccgacgatttcgcccgcacccgactgacgcatacgctggaagtcgcccagatcggtcgccaaatcggcgcattgctcggctgcgatccggacgtggtcgactgcgcctgtctggcccacgaccttggtcacccgccgttcgggcacaacggggagcgtgcgctcgccgacatcgccagcaatatcggcggcttcgagggcaacgcacagaccatgcgtatcctgacccggctcgaacccaagatctttcacccggacgggcgttcggccggtgtgaacctgacccgtgcggccttggatgcggctgtcaaatacccgtggaccttggccgaagccgaccgacaccccaagggggagcggtcgaagaagttctgcgtctacccggatgacgaaccggtgttccgctggctcaaaatcggcgcgccccaggccgccaaacccatggaatgccagatcatggacctttcggatgatgtcgcctactccgtgcatgacgtcgaggattccatcgccaccggcgcgttcgatccgattgtgctcgccgatccgaagatgctggaccacatcatcgagcagacgcgcgcatggtatggggcgaagtgggatgccgacaagctgctggccgcgttcatgcgattgcgccgagagcatttgttccctgcacatttcaatggttcacgcgaatcgttggcacagctcaagaacatcacgtccgatttgatcggtcgcttctgctggtcggtggaaaccgccacgcgcgacacgtatgggcccgggccgttgacccggtattccgcgaacatcgtgattcccgaggacacgaattacgagatcgtggcactgaagggcatcgccgtgtacttcgtcatggcgcctcgcgagcgcgagccattccatcaggaggagctcaagatcgtatcggatttggtcgatgtgcttatggccgattcgccgctcccatccgacgctttggaaagccagttcctggccgattggaatgaatccaccaatgacaacgagcgcctgcgcgtcgccatcgatcaggtcgcaagcctgaccgacaactccgctctggccctgcactccatcttgtgctgagggcgtgttggacgggtgcttccctcagtctcgctgcgcgagccagctcccctcgggtgaggggagctgtcgctgtaggcgactgaagggagtttcgcggaagaaatgataaccgacggtaaaaatttaccgtgtctcaggtgaagcggtactctagagacttatggtcggaatgattaagaaagaggatgtcgagaaggtgcgcgccgccgcggacctgtatgacatcgtatctgcgaccgtaacgcttaagccctccggcaccggcaccttcgtgggcctgtgcccgttccacgacgagaaaaccggcagcttcaacgtgcgcccctcactcggcgtgtggcactgcttcggctgcggcttgggtggcgacgtattcaaatacgtcgaacaatccgaaaacatcgacttccgcgaagccgtggaactgctcgccgacaagtaccatatcgagctgcactacgagaacagcggcaacggcccgaaccgcgagaacaccggctccaagcgcacccgactgctggaagcctgcgaggaagcccaacgcttcttcgtctcccagatcctgaccaaggaagcactgcccgcccgcaagctgctcggaggccgcaacttctcccaagccgactgcgaacgtttcggttgcggctacgcgccccaaggttgggataatcttgtgcgccacttggcctccaaggggtttacgcagaaggaaatcctcgacgcgggcttggcccgccaaggccagcgcggcatctatgactatttccgcggccgcgtgacgtggcctatccgcgattcgaccggccgcacgctcggcttcggcgcgcgcaaactatacgaagacgatcagatcgccgccaaatacatcaacacgccggacacgcagctctaccgcaaaacccaggtgctttacggcatcgatttggcgaaatccgccatcgtcaagaagcgacaggtggtgatcgtcgaaggctatacggacgtgatggccatgcacttggccggcattgacaccgccatcgccacgtgcggtacggcgttcggcgccgagcacgccaagattgtgcgccgcctgatcgccgacgattcgctgggcgcggtccagctggtcgggccgttgaaggtcaaggaccagccgttgagctcgcgcatcgtgttcacgttcgatggtgacgccgccggccagaaagccgcgctgcatgccttcggccttgattcggccttcctctcccaaaccttcgtggccgtggccgacgacaatctcgacccgtgcgacctgcgcatcgagcgaggcaacgaagcagtgcgttcgctgatcgcccgcgccaaaccgttgtatgacttcgtgatcgacgccgccatcagccggttcgacctgacctacacgcccggccaagtgggtgcgatgaaagccgtggccccgctggtggcgcagattcgcgaccgctccctatgggacgcttacgcgcgcaagtccgcgggccgtatcggcgtggatcttgaggtgatgcgccgcgaggtgatgaacgcgcgccggcagatgcatgtacgcgatgaggacgcctacgcgcccaaacgtcgattcgagcgtgacgagccgcgtgtggaacccggcaccaacccatacgccaatccggccacgcgcaaggcgttggagcgccgtgacgccgccgaacaggcatatttcaagatcgacgacgccgtattcatcgccgaacagcagttcatggccgtgctgattcaggtgccgcgcgccatcgaccgcaccatgttcgggcagctgaccatcgaccatttcatgacttcggtgttccgcaccctgttccaggcgatcgcggccgccggcggactgccatccgacgataccccgcaggggctgtggatgcacaacctcaccaaggccggcgggccgatgctgaatcaggtgatcaacgagctggccgtcatgccgttgccactgcctggcgacgacggtggtaatggcgcacaacctccgcagtcgaacgtgcctgggggagtcggcggtggtgcggccgccgtgcagctacgccctgccacgccggaagagcagcgctatgccactgagcttctcacccgattgttggacatgggcttcatgcgccagatcggcttggccaaacgccgcatggcccagctgcccgacggcgaagagaagataaccctcctcggccagatcacccgcatggaaaccgcccgtaaagacctccaagcccaaatctacggcaacaccgtcggctaatacctcccactgattgcgcgcatcttcgaatacgtgccggatgcataaggccatacaaccggttgccggattggatgggtgcagaagttgcggattggccccatccaaattggactggtttgggtggggccaatccaatccgttcaataatgaagcgcgataccaagcagcgtcgaacgaagggaaactcatgacgcagaatcgtgcggaactcaaccgtaatctggcccagatgctcaagggtggcgtgatcatggacgtcaccacgcccgaacaggcgaaaatcgcgcaggatgccggcgcgtgcgcggtgatggcgctggagcgcatccccgccgacatccgtgccgccggcggcgtctcccgtatgagcgatccggccatgatcaagggcattcaggaagctgtctcgattccggtcatggccaaggtgcgcatcggccacatcgccgaggcccgcattctgcaggccatcgacatcgactacatcgacgaatccgaagtgctttccccggccgacgacgtgtaccacatcgacaagaaccagttcgacgtgccgttcgtgtgcggcgcgaagaacctgggcgaggcgctgcgccgcatcgccgagggtgctgccatgattcgtaccaagggcgagcccggcaccggcgacgtgattcaggccgtgcgccacatgcgcaccatgaacaagcagatccgcgagctcgtggccttgcgcgacgacgaggtctacgaggccgccaagcagctggccgtgccctacgacctggccaagtacgtgcacgacaacggccgtctgcccgtcgtgaacttcgccgccggtggcgtggccaccccggccgacgccgccctgatgatggagctcggtgccgaaggcgtgttcgtgggctccggcatcttcaagtccggcgacccggccaagcgcgccgccgccatcgtcaaggccaccgccaactggcaggacgccgatctgctcgccaagctgtccgaaaacctcggcgaagccatggtcggcatcaacgaggacgagattcagaccatcatggccgctcgcggcgagtgacgggagtcgaagccggagaggacaacatggttgtagctgttgaatatatttccaaagaagagtccgcggacgtcgaaaacgtcaagcacggcgtgaccggcatcctggccgtacaaggcgcattcgccgaacatgcggcggtgctggacaagctcggtgcgccgtggaaactgctgcgcgcggccgaggatttcgatgaatccatcgaccgcgtgattctgcctggcggcgaatccactacacagggcaagctcctgcattcgaccggactgttcgagccgatcgccgcccacatcaaggcaggcaaaccggtattcggcacttgcgccggcatgattctgctggctaaaaagctcgacaatgacgacaatgtctactttggcgcgctcgacgccgtcgtacgccgcaacgcctatggtcgtcagctcggtagtttccaggccaccgccgattttggtgcagcggatgatccgcagcgtatcacggacttcccactggtattcatccgcggaccgtacgtggtgtcggtcggccctgaggccacggtcgaaaccgaagtcgatggccacgtggtgggcttgcgtcaaggcaatatcctggccaccgccttccacccggaactcacggacgatacccgcatccacgagctcttcctgtcgctgtagtcgattcgtctgccgttagactggtatccgactgacgaatcaaggagatgatctgccatgcagcttgagctgaatcgacgcagcaaggtgccgatgtaccggcagctggccgccgggctgcgtgaacagatcgtctccggcgcgatggccgagggctaccgcctgcctcccgaacgcgagctgtcctcgcgtctcgaagtcaatcgcaccacggtgttgcaggcgtatcagcagctcaaggacgaaggtcttatcgcctccaaagtcggcaaaggcacgttcgtgctgccggctgcctccgcaagccgaacaccgcacacgtcaaacagtgacttcgggaatgcgataacgcgaacaacacgatcgtcggcagaaatgggaacatcgcaagcctcctcttccggcgacgtagaacgtgctacctccactggtttcttgacgacggaccagggcagcagctctgcggcggtccatacgattcgtgaaagccgttcggttcagggcccggagccaaccgtcgtgcgtccgccatggtcggtgttgttctctgattattccaaccggtttacctaccatgacatcgcctcggccgagcgggcgcagcgcggcgacaccattattgacttcgccaccggttcgccgaacccggcggatatcccggacgatctgctgcgcaaggtgagcatcgaggcgttcgaatcgcgggaattcgacggtcaaccggaatcacctatcgagggattcgaagagttgcgtgcgctacttgccgaacatatgcgcacacgaggcgtacaatgcggcgtccgcaacgtgatggtgctctccggctccgagcagggcatcgacctcatcgtgcgcgcgttcatcaaccccggcgactgcgtgctggtcgaacaatccacgttcttcccggcattgcagaccttccgctcggcggatgcgcgcatcatcggcgttccagtggacgagcacggtatgcgtacagacctgttggacggctattgcgcgcgattccggcccaagctcatctacaccgtcccgacgttccaaaaccctaccggtaccacgctgccgcccgaacgacgcagcgaactcatcgacgtggcgcggcgctatcagtgtctgatcgtggaagacgatgcttacggcgatttgtggtacggcggggaatcgtccgacgcacatcgccccataccgctcaaaggcatggagaatgcgggatacgtgatgtatttgtcgacgttctcgaaaaccgtcacttcgggcctgcgcacgggatgggttgtggccgacccgcatgtgatcaaccggctggcggctctgcggcgcatggtcgaccagcatacgagcacgtcatcgcagcgcatctgcctggaactgcttaaagaaggccgcatcgccgaacatttgcgcggtttgatcaagacttaccgcattcgacgagatgcagcaatcgcagcattggagcagtatgcgccggatgaagtgtattggaccgtgcctgcaggcggctactatatttgggtttccttaccggacggcgtgcgctctctggatgtattggaatcctgccgttcccaaggcgttacgttcatgccgggcagcgtgttcgacgttgacgaaatggatgattcccatattcgtctcaactttgtgcgcccggatgctgctgacattgataccggcattcgaatcattggcgagacgatagcacagatgtagccaagtgactggctcattgcggttgtcgagttttttgatggctgcatacccacatcgatgggtgcattcgacgaataaataagcgaggaagccatcatcagttcgctgtggcatgcgcatagcgttgtcgggcgaacggggcagaccacgtggtcgttgcgtgacctggccgatcgagccggcatcgcattgcccctggcgtagtggcgaggtggcgcagtaacgagtcacgccatcgcgagccgatgatgcgaaatgcggaaccggtcgcggccatcaacggctatcatacatgcggaagcaacgatacgttggcgtcagcacatccatctgactccagaaagggacacgatatgaccacatcctccgtttcgccggtgaccactgaactggcgggcagcgaaaccggcatcacgcttatcattcacgccggagcgggcagtcgtggcaagcgcagcacgcctgaacgcatcgcccaggtcgaacttgatctgcagcgcgccctcgatgccggataccagttgttggaatccggagcgccggcgcatgaggctgtggtcgccgccatccacgtcatggaagacgctcccgaattcaacgccggccgtggtgccgccctgaccagcgatggcatcgcccagatggacgcctgcctgatgaccggcgatggcgaggtcggtgcggtcaccggcgtaagcaccgtgaagaacccgatcgatgcggcgcgtgccgtcaaagagcagaccaagcatgtgctgttcgcggacccgaccgatgccgagatcgccgattggggcgtcgcgaccgaaagcaacgagtacttcatcaccgaacagcgtcgtcagtccttggccgaggctcagtccggtggcgatgagtgggagaagcatggcaccatcggcgccgtggcgcgcgatgccgaaggcaatatcgccgccggcacgtccactggcggcatcaccaaccagatgcacggtcgtgtgggcgattcgccgctgcccggttgcggcacgttcgccaaccagtccacggtggcggtgtcctgcaccggcatcggcgaggcgttcatcaaggtggtcgccgcccatcaggtgtcggatcgtgtgcgtttctccggcgagaacgtcgaggatgccgcgacggccactttggacgaagtcgccgcgcatcatggcgatggtggcatgatcgttctgccggcggtcggccgtggcgtggtcgcctacaacagcgagatgatgaacttcggataccgtagcgcgcaaggcggtaaggtgcagggctgattgcccccccctgtattgcggcatatatcataatggccggtgtgctgcggattcttggtaaggaatccgcagcacaccggtcattcatgtatgcggcaagtgccgccgatcagtgcggcagtgcgcgctacttggtgatcgtgttgtacgtgggcatgttcgtgtaatcgaactgcacgttcttcacgttctgtgcagacacggcggcgaaacgtttgaccgggaatactggggtaatacgcaacttcatcgctcctcttcctcgaatgaaactatgttccattggtttgagccagccacgtacggtattcgtgtctggcctgccacacaatgatgcagccgtatatacgggcacagcattgcgcggcagttcattgtatggaaggcatgcaaactcaatgtttccttgtccaaataaaaaaacgagcgcggctgatgtgcggcaccggtccaaaaactcatgtccgccagcgcaacgcgactacgtaccttatgccggtctgcgcgtagaatagaacggctgcgatattgggttattcacggaggaatggatgcgacgctggctgatcaatgtagccaaaaatgagacgattctcatcgtcgccgcaatactcgccctgatttcgtgtttcattgtgccgccggacgccgattacaaaagctacattcacgccagcaccatcagccagctcatctgcctgatgattgtggtgtgcggattccagcgtatcggcgtgttccgcatcgtcggttcgcgattgctggagaaggtcagcaccatgcgcggactggtcattacgcttgtcgctttgacgttcttttccgcgatgttcatcaccaatgacgttgcgctggtcacgtttgtgccgttcgcggtggccgtgctcatcatggctgggcaagaggataagaccatcctcgtggtcacgctgatgaccattggcgcgaacgtgggcagtatgctcaccccgatcggcaacgcgcacaacctgtatctcaaagccctgaccggcatgccgaccatggaattcctcggcatcatggcaccgtattccggcacggcggccgtgttgctggtcatcgtgatttccgtggtgtttggcggcaaaccggtcggcgacctgggcgacctcgaaaccggcgtgctggctcccgagcgcaacaaacaccagcccgacgagattcgtatcaccggctacggcgccggttatggcggctggcgcaccatcgtctactcgctgctgttcatcgtctgcctactggccgtctccgacgtgattcccctgtgggtgatgtgcgtgatcgtggtcgtcgtgttcctgttcaccgatcggcgcgtattcaaatacgtggattggggactgccgctcaccttctgcatgttcttcatcttcatcggcaacatgaagcgcgtgcccgaattctacgaactggcgcgctcgctggtcggcggccatccgctggaagtggcggtcggctccagccaggtcatcagcaacgtgcccaccacgattctgctctccggcttctgcgaccaatggcgcgatctgatcattggcaccaatttgggcggcatgggtacgctcatcgcctcgatggcctcgcttatttcttacaagaacgtcgtgcgccaatacccgcacaagaaaggccggtatctggccgtctactccgccgtcaacgttctgtttttggccgtattgctgaccttgagctggatcatcgagccgagtctctgagccgccgttgtgggttgggccagtctaccgcgcgtatacggtgggggagccggtcagtcggctcatggccgactgcgggatgtcgtggatgcggccgatggtggcatccagcgtggatacgccggctgtggtggctgtgttggctgcagaggtgatgctggatacgccgactgcggacgatgatacggccgcaaccatcggctgacgataggcgttggagttgcgggccagccgggcgagcgcagggcgctgcctgcggaacagatcgataaacataccgcatactccttcatcgttggccggcggtcttctggccgccgtggtttccatcctgccctcccgtgcttgtattcgctatgggggatagcccctattattccctgaatctgcacgattccccctcatccttgagggtgattctaacggcaaaggaatcggcctaatggccgatgtcaatcagcgcgaagccaccagcgtgacgctgtacggcttgatcttcatcgccagcaatgaagacggcgacggcaatgtgtaagcccgacgttccggcacaatcgcccccgaagcctcgccgcggtatccgatagtggttttcgccgtcggactggcgcttaacgtcgtcacctccaaacgcaccggtcgcgatggcgaggcgcccagcccggccagtccgcgcgcgatttccaacgtcacatccaccggggaatcggaggtattgacgattttgatgtaacggcaggcgtcatccccgtcatgcccggtggcactgacatacagatgtttggcggggcgtgacgcggtctgctcgatggacacggcatatgtcgtgtcgcccagatgcgtggaaaacagccgctccacctcataattcaccgtggggttcacatgcgccggattgagttcgataagattctgcgcccaccccttagccgggatatgcgcgagcagcggtgcataggaggtcatgcgcaccacgtcggaattgcgctcgcaaccggtcaggaacgcggcctcgccgagtgccgacttccacgtgttcgcgccctgttcggtctgcggttggccggcaaaatagccgttggctgaatattcgccgaaatagacgccggcgccgcaacgcgggtaagcgtcgaatcgtgacgcttggtatgcaaaccattcgggggagtggtaagaatgttcgtcgacgataatcgcgtcaccggtggcggaatcatgtgccccggaatcggttgcggccaacgctcgcgcatggtcccagctgcgtttcatcgtcggctggaaggggaacagtccggcgctcatcacacacagcatatccgggtatcgttcgtgaatggcctcgctgatcatgtcaaacttggccacgtagtcagccccgaagttttcgttgcccacgccgatcatgtccagaccgaacggttctggatggcccatatcacgccggaccgcggcccacgagctggactccggatcgccattcgcgaattcgatgaggtccaggtagtcctgaatcacattgttgcggaaagtggccgaattgatatccatgtggcgcggatcgcggccgggcgactggcatgcgatgccggcgaacagagtgggcagcggcttggccttgaggtcctcgcacaggcagaaatactcgtagaagccgatctgatagctctgcgaatagctggaaccatccggcatcttgaacgaccacatcgaatactgttggcgtcgcgcggccagggagccgacggtatccttccagcgatattcattgccgggcgtcacaccttcgacgatgcagccgccggggaatcgcagaaacgctggatgcaacgcctgaatggtttccaccagatcgcggcgcagcttgccgtaacgccatttcgggtcgcccgcgccccaatagtccgcatccatgaactgcaccagatccagatcgaacgtggtgcgttcgccggcgtcaatggtgatacgcagcttgccgtaatcggtgttcaggccggttacgtcggcgttgaaccggtaccagccgtcacggccgatggcgatggcaccatccgacgaatccggactgatcgaaacgccggaatcctgcgcattggcaccatcgtcctgcctcagaccggtctcttccgtatcgtcaagcggatctgcgtccacgatatacgacaatcgagtggtgctggtgagaggcagaccgtacctatcgaccacgccgacggacagcttggcccgcccatgaaccggacgtaccgcgagactgacggaataggtgtggtcggcgacgatggagaacgcgggctcgcccccgttgtcgccgcctccgttatagccgaggttttccagatatgcagggccggtttcggaaggaacatcggacgtgatgcgagcgtatcggctatgtgcgtgaattggtggggcggggcagtcggtggtcacccgctggccgtgaatcccgcgtatctcactgccgaggctggcggcggaacagttgatgaaatcccagaaacgcagggaatcggcctgtgtacgccatcgttcggcgccggccatacgccacgtgtgatggtcgagatagacgccgtcaaaactgtagttgttcaccatgttggcgttcagcccgccatccgcaccatggttgatgtcctcgaagaacacgccgtacagccgcccgcttgtgtgatgggtggggcttcccacgctaatccgcaccatggttttgattgtagagggaatggagcggaaaggtaaacggaagagttcgctcaccgttcatgttgcggtcaatccaagtcgactgttcgccggtatacagccggtaccctcgaaacaggaatggaaaatacggacgactaggagcgcggctgtgcaatcctcggtgggaatacgtgagcgcatcgaccacgtgtatccgtcgctgcgtccggcggagcgcgccgtggcccagtatattcgggatcatatcgaggaggcggccgacctgaccgtcggccagatggccgacatcgcccacgtcagccagccgacggtgattcgtttcgcccgcaagctcggtttcggcggttaccgtgaactgcggtacgtgttgcgccatccgtccgccgagcacaaagtgaccttcaatccgttggctggattcgatctgaatccgtgggatggcgaagatgagattcccggcaaagcggcctatgtcgcgaaggcgctgatcgatgagctgcacagtgcgttggaccccaaggcctatcgcaaggcggtcgccctactcgccgaatcggagttcatcgatattttcggcgtggagaactcgttgacaccggcgatggatctgttcaccaagctcggctacctgggactgacatgccgtctcaataccgacgcttacctgcagcagatcggtgccgggcacctgccccacggcgctgtggccgtcgccttctcccattcgggcagttcggcggatacggtcaaagcgttgcgattggcgaaatcgcatggcgcgaaaaccatcgccataaccaatgccatcggcgcgccgctggccagctgggccgacgtgacgttgctgacgggtcgtgactcgcacacgatctatggcaatgcgattttctcgcgtgtggccgataccgcgctcgtggacatgctgtacatgggcgtgattctgtccgactacggccgtttctccaccgcgctcgacgaatccggtcgcatgattcgcgatcgcgtattcgagaactgagctgctgctttatcgtgccttgggctgtattgctctggtcgttgccgctttgttgccgctctggtcgttaccgtcctgaggcatgtgccagcgaatacgtagtggacttggcgtgcgtatgacgttcgatcttgccgctcaactccagctggtccaagagctgcgtcatctgatccttgttcaggccaagcgctttctgcatggttttacggctgagcttcacgccgcggaacgcgaggaaattgagcgtgaactgctccaacgtttgaggcgacggttccagcgtcgctgtatcgagcgggcgggtactgacctggtcgtcaccgtccgggcgctcgccgaatccactgccgagaatcagcgtctgcaatggcgcgcagccgatgatgcgtgcgccggccaaagcatctgcggcgttatccgtcatgcgctgaatcgtggggaatgaatacattttggcgcgctgcgcttcgtcagtggtgctgggcgcggcggaagcatcggtatcggtccgatgcaaggatgcggcctcggccgagaccgggatgggcagcaccatcgccaccgaagtggggcctacgcgcagttgcggactgaccgcgctctgcgcgtaggcgtccataatgcgttggataccggtaccgcagttctcgcagagccccaaatcggcgaacaattcagccaaacgcggggtgcgtggctggcatacgccgttgagcagatcgttgatttccaaaccatcggtcaggccgccgagcgagacgatttccaggcgggaatcgaagatattgatcagtgtggggccggagtacgtgtaatcgcgatgttccagtgcgttgaccaatgcttcgcgcagggctatggccgggtattggccggattcgttgataccgttcagcagggcgctggcttggtcgagctggcgcagcaccgagccggtgaatgtgtgacgttcgcgaatggcgtttttgccattgccctcgaaaatggtggccttgataacgaacgggcattggttggacagcagggtggcaagcgacgattcggtggcgctggtgaaggtgttgttggcgccggtgttggtgatgctgccggcgggggcattgccggcatcggcagagacggatgcagccatgttggtcacaaccgggctttcccaatccctgccttcactggcaaaacgaccctgtgcgtatgtgaaagtgagctcaccactatcgcctgcgacggtctggcccgatgcggcgtgatctacgttgctctccgttgtccccatatcgccgatggtaccggtgcaagccgacgttacgccgaggtgttttacacccctacggctagacttacatgagtttggccccgtagctcagctggatagagcatgtgacttctaatctcaaggtcgacggttcgagcccgtccggggtcacgatgcaataaacccttggtccctcatcgtctgtgggggccaggggcttttgagtattatgccggtctgggtccgtctggagcctgaactgtcgaccttgagattagaagtcacatgctcatcatcaccatccgggaacacccttaaggggtgcggctcctgcataacggttatacactgacttgagatgtgctggataataaccagctatcgcgcgtccgccaatggcgacgaacgaaggaagaagggcccgtgccgcgagcaatcatcgaggtaagaaacctacgcaaggaataccccgtcgaggatgagacggtggtggcgcttgatcgtgtcaatctcagtatcccgcaaggccagatctgctgcattttcggcgaatccggctccggcaaatccacgctgctcaaccagttggccggcatggaaaaaccgacgcgcggcggcgtgcgcatcggcggcgtacccgtcagcaaactcgacgagcgtgagctggcggccttccgccagaagcatctcggcttcgtattccagtcgtacaacctgctgcccaatctgaccgcgctcgaaaacgtggcaatgccgctgatgttccgcggcgtgcccaaggaacagcgcgaacgtgcggcgcgtggcgtactcaaacgagtcgggctcggccatcgtctcagccattacccgcgccagatgtcgggcggccaacagcagcgcgtcggcatcgcccgggcgtttgtgaccaagcccgaggtggtgttcgccgatgagccgaccggcaaccttgactccaaaaccaaaaccgaggtcatgacgatgatctgcgcattcgcccatgacttcaaccagaccatcgtgctggtcacacacgatccgcagatggcctcatacgccgaccgcattgtcaccttgctcgatggccgcatcaccagcgatcggctcaacaccgacctttcccgcccaactgttccgtccacgccgtccgccccaaccacaccaactacaccgtccacgccgtccgcccatagaacccaaggaactgaccgatgaagcacctctcccaccacaccatcgccatcatcgtcgcgttgctctccacgctgtcactggcacttgccgtcatctcccttccgcatcaggcgtacgcggtcgacggcacagacggcacaagcggcacgaacagtacgtctcagggaaacgacggcgattccgcgccgatcgccggaccggtgcccaacatcatcatcaccaacttcgcgtatggaggtgattccgtggccgccggatccaaattcaatctcgacttcaccttccagaacaaggggcaggtggcggtgacgaacatggtcgtcaccgtggacggcggcgagagcttcgccatcgcgggaggcacgaacacgttctacgtcgacgcgctgtgggccggttacgccatgacgcaaagcgtgccgatgcaggcgctcgcctccgcgaaaagcggtgcccagtccgtgaccgtgaacttccgatacgagtatgtggacgccagcgcccgctcctcaagccagtctgacgtcaagatttccgtgccgatcagtcagcctgaccggttcgaaatcagtgatcccgtagtgcccgaccaggtgatcgccggccaggaaaacacggtcacgatggaatatgtgaacaagggcaaaggcgatatcgccaacgtcgaggccacgatggagggcgaaggtttcgatgccacgatgaaaacccagtacgtgggcaatgtggcttccggcgccaccggcacgattggttacgccttcacaccgcacgcgtcaggcgagctgaagaccacgctcaaagtcacgtacgaggattccgacggacagaccaagaccaaggaattcccgctcaccatacccgtaaccgatatgcagccgatggatgattccggcatggccgatccgaacatggaccagaacgccaatcagggattgccggtgctggtgtatgtggtcatcgtcgtgatcgccgtggtcattatcgtggtgattgtgctgctggtgcgtcgccggcgcaagcagaaggccaagaagaacgatattgatgaggactgggatgattggtccgaaggcaaggatgataagaccgataccggcgtgacggatggtgctgcggcagacaccgctcctatcacaccagtcaccccagcctcatcagtcgcaccagccggctcatcccacaaggcctgaaaggcccgaccatgcgattcggcgacatactgcggctctgcagacaaaacctatggcggcgtaaatcccgtacgattctgaccgtgctgggcgttatcgtcggctgctgctcgattgtgctcatggtctctttgggccaaggcattaacgagcagaacgagaagatgctcaaatcgatgggcgatctgtccatcgtcaccgtgtacaccaacggttatgccggtccgatggacgatggcggctcgtccaagatgggcgataccaagctcgacgacaaggccgtggaatccttccgcgcgatgagcggcgtatccggcgtgacgccgatgatgaacttcccttataacgtgacggccagagcaggcgcgggcggccgttacatctatgattacgtgcagatcatgggcatcgacatgacccagctcgaccagatgggctacaagctcgtcggtggcgagaaaccggtcaaaaaagaccaggtgcttgccggcgaatggttcgcctatggtttcatggacaccctgaagaacggcgaacaacgcaccagcacacgtggcggtcagtattcctcatgcacgtttaaccaggccaccggccagtgcgaggaagatcaggacgaagatccgttcttcgacccgctcgccacgcaaatcagtctgaccaccggcaccaattatcagggcgaccagtacagcatgaacatgtacggcggcggtggc

SEQ ID NO: 2291 - DNA, 8287 bp, Unknown
  R119_18m  MAG No. k141_18315
cgcagataggggctccaacaaaattggctaaaagagaactcggcaacctataacaaggacgcgcccgtgtgcccttaccgttcagctccgctcacgaatgaaatcgaagatcacgtcgaagacctgctggctccagaaatcgtactcatgttcggcgccgtcgactagcaccagctgcgcgtccacgccgtgctcgaccagccggtcgcgcatcttgacggattgatggtaggggaccacggtgtcggcggtaccgtgcaacaggagcatcggcggatactgctggtcatcccgcacctgcaggtaggggctcatgtcagccgcgcgctgacggacctcggcattgatgccggtctcatgggtcgcgcccaccacggccgcgaacgggccgaaataatacagccggaatggattggtctcatcgtcgaatgcgtcgactgcttcaagcatgtcggtgggcgggaagcagctgaccacgtacttcaccgcatcgctctcatcggcattggtgccgtcctcataccgcggatcgtcggcggtcaaccccaccagcagcgacgtgttgccgccggacgacgtgccccagataccgagacggtcggggtccacgtgccattggcgcgcgtttgccctgagatagcggatggctgctttgacgtcctcgagatatgcggggaacatgtcatggggatcgctcgaggcatcgcgatgattcaccgtagccaccacaaagccttcgcgggccaaagccgagagttgcgggatctcgtagtcgcgatgcggcgtggtccaggcgctgccttgcacgaataccacggtggggtagcggcggtcatcgtcatcgccggtggattgtggtgagatgatatccatcaccaggttatcggccccggtcttgtacgccacgttgcgggtcagcgtggccaatccggcaagcgtgggattgtgcgggatatggatggcattgtttgcgccggcattggcatcggtgactttggctgaatcggtagtgttcatggaatccccctagctctgttgctatagaggtcatcatacaagaaataggcatgattacggcacaacgatgtctcggtcacagcgaagacatgaaggcgcgaagacgcgcccggcagcgcgcgctgcctgcctgcgagttgccttcaagtgcacttcaagcgataaggtgacataagcagcggcaatggagattgctgcccggcaacgaagcggacagtgcccgttcgccgattcacgataacagaaatgagacactatgaagactcaggaaatcggacaatccggcatgattgcgtcatgagtggcgctgggcgtgatgcgcatggacgcgttggatgccgccgatgcggcacgtaccgtggccgtggcccatgattccggcatcgactatttcgacacggcggaatgcatacacagatgctcgacgctgaaatccaattcaatatggcgagcgatcccgcagccgatcgcaccggtggcatcctgccttattcacggctgaagcatatgaccattcaggcatggtgcccattccaatccggcacggaatacggtccgttcgtcggcaacgagcatttccccgagctgaacgccgaattgacccgtcttgccggcaatccgttggtgtgagcgagagatgacgagaccaaggccgttgaggcgcgtgttcagcgtgcatacatctcaacggcggtcaatgctgtgtcaatgccaacattcagtgcctccgggcgtgcaccatctggcgaaagctgatgtgtatgtccatacagcagcctgcgaccgtcaaacggcaacgccttgccgctgaacttcgccacatcatcgggccaactgtatgccagatcctcccgatacgggtaatgcgaaagattgaccgtaccgagtccctcaatctcaaccgtatcgtgcggctccaaactttcgaacaggttaagtgcggggcggtcttcccgccaccagtcatcatggttgccgatcacaccatgcagatgcttgcaattgagcgctcacaggcagttcttcagatgggtcagcgatgtgcggaaaccgatatcacccagaatccacagctcatcatccgggccgaccaaagtgttgatatgatccacaatcgccttgtcatgcgcatccgtatcggcgacctgacgaaacgtcagacccgcgccgaacgtctcctccttggcccaatcctcggcggtcttgcgaccatgcgcgcgcagcacctcctcatagcgcgagcgcgtcggatcgaacgtcgtgaaccctcgcaacaccgtgaccagcggatgcccgaaatgcgtgtcggtcgtgaaatacctcatgacagtcgccttcccttttcggcgtgcagcaatgatttcccatcctaggcgcagccggcacctgtcggttcgtgttgccataatgaggcgcattgcaggggaacccgtgaacgcaagctgccggtcatcgtggcggcgaacaggttgagaaaggcgctgtgcctgacccttggaacctgttggccaacaccatcgaagggggcaaacgatgtcttttgacgccgccgcattcggtccgatcaccctgaaccacctgccgccgttcgcccagcgcctacgacatgcagtacacgtggaaacccgaatgggatgtgtgaggagttcgatggatgagcggtgggcacgtgctttgcgcgccaaaggcattgatattgacgaggttgaaggtgctggtgggaaacgggcgcacgacggcaaacggcataccaacatcacgggtactggtcgacgctccgagtcccagccggctgccgggctccgcggtcgatccaataccagtacgaatctgccggggccgaaggtgacggcacgcgccacgccattcaaggccaccggtcataagggcggcatcagccggcaggggaattgagctgatcgcagaaccatcgcgcgatgaatgggcgtggccaacgccattccgccattgttgagccgcttctacttggaccggtacctctttgaacggagatattccatattgaagctattccggcatcatatggcacgtaggaaatcccggatatcggcgatttcctcatcacagatggcatgggccatgccggaatactcgcgataggtcagatgcccggcccgttcaaggacctgatgggccgtttgctggtcgggcatcggaatcgtgcggtcctgcgcgccatacgccaggaagaatcgggtaggggagtcaagcgccgcctgttcctcgcccatgaacgaaggactgagcaggatcgcggcatcgaacaacgccggatgcgccttgaccagacgatacgacagataaccgccttgggagaaaccgatcaatatcttcctgcgatgggcgaatgccgaggcatccagcagtgaaaccaccgcatccccgaccgccgcgcattcgcgttggcgctcgtccacgccgcagccgtcgggataccagtaattgccgcccatatagggcctcgcgtaggtggcacgaaacgagatatagctgggtgcggcggcaattgcggccggggccgtatcggctcgcgtcggcgcatatacggcgtcgagaatccgcaccatctcgctttcgtcgttgccgtaaccgtggaacatcaggaaaatggggtcattgccgccggcatcaatctggcttgtcatctgcattcgcatcgtcatcacctcaccaacgagcttacatgcattagacttgtagcgattgacccaccgagcacgcaaggagcaagttatggagccgaggcgcgggcctctcaccgcaggcgagaaggtgcagttcaccgaccgcaagggcaagaagatcaccgatcagcttgtggccggcggctccacgcagaccgagcatggcctgattctgcatgacgatgtgatcggcaagaccgaaggcaccgtgatcctcaccgtgcacgccaagcgtgaggcacaggtcaaccaggtctatcccgaaaaagacaagaacaagccatggaaatcgtcgcgcgccatcggcggctgggagtatgcggtgatgcgcccgcgactggccgattatgtgctttcgatgccgcgcggcgcgcagatcatgtacccgaaggacatcgcccaggtcatccagcttggcgacatccgctccggcatgcgcgtgcttgagtctggtgccggctcgggcgcgatgagcgtgaacctgctggacgccgtgggcgagcgcggccatctgaccacgatcgagctgcgccccgaattcgccaaagtggctcaggccaacgccacgctgtattacggtgaagcccccagctggtgggatctcaaaaccggcgacttcgactccgtggccgccgaactgcccgaacgctggttcgaccgtatcatgctcgacatgctcgacccgtggaacagactcgagcaggcataccgcgtgattgcccccggcggcgtgttggtcagttacgtaactaccaccacgcagatgagtcgactggccgaagccctgcgcgcggccggttgctggaccgagccgcagatccaggaatcgttcgaacgcacatggaaggcccaaggcctcgccgtacgccccgaccaccagatgatcggccataccggtttccttgttatctcgcgcgccatggcctccggattcgaggcgctcagaaagcgcgatcgcgtgaccaaggacacgcagaccgacatcgactcgctcaccgacgaacagcgtgaggcgcagatcgaggaactggaactgcgcgacatctccgaccacaaactacgtaaggtgttgcgcgacctcgaccgtcaggtgggagaactcggcaacacgcatgaataaccgcccgacgatgagtttgtgaacgctcacacacctctatactggaagcaacaccacaccgccacaccgggcagacggttcgtgaagggagccacggatgggcatcaagctgagcaaagtcgccaaagcagcgaaaaaatacgaccatatcctcatcatcatgaggcatgccaaggccgagccgttcggcgacaagggtgactcggagcgcgagctcaccgacaaaggtctgaaacaggcgaaggccgtgggcaagggcatcgagtcgctgggactggtgcccgaccagatctcctgctcgtccgccacccgcacgcgccagacactggaccgcatgctcaagacctttggcgacaagccgatcgtcgactaccgcatcagcctgtatgacgggggagtgcaggcggtgttcgacgagctcgcccacgtcaaggccaagaaccgcgtgttcatgatagtgggccacgagccgactgtgtcgatcagcgcccaatggctcgcctccgccgactccgacggcgaacgactcgacctgctcaacttgggactttcgcccgcatccatcgtgatcatgggatcgaacaaaccgttcgacgaatggcaggtgcacagcggcgaactgctcgcggtcatcaatgtgaaagacttcgactaaagcggatataaattccatctataacgacactctgcggccatttataaggggtggaatccggatgttttgctaccctaagtcgggttacgaacgcatacattggaggattcatgtccactctgacttccgtctccggcttcccccgcatcgggcagaaccgcgaactgaagaagatcatcgaaggctactggaagggtgccaacgacctcgccgccgttaaggccaccgccgccgaactgcgcgccaagcactggaagctgcagcaggccgccggcatcgacctcattcccagcaacgacttcagctactacgatcagatgctggacaccgccatcctcctcaacgtgattccgaagcgttacgagcgtctcgccttcgataaccaggaggacacgctcttcgccatggcccgcggctaccagggcgacaagggcgacgtgaccgccctgccgatgaagaagtggttcaccaccaactaccactatctggtgcccgaagtcgagtcggccgcggagatcaagctcaactccaccaagccgttcgacgagttcaacgaggccaaggcgctgggcatcgacaccaagcccgtgttcatcggcccgtacacgttcctgaagctcgcccgcaccccggaagccaccgaactcgagctcgacaagggcctggtcaacgccgtggccgccgtctacgccgaagtgctcgacaagttcaacgaactcggcgccgcatgggtccagctcgatgagccgtacctcgtgctcgacaaggagccgggcgatgtggagctcttcaagaccctgtacaccaagatcctgtccgccaagggcaacgtcaaggtgctgctcaacacctacttcggccacatcgccgacgtgtacgagaccgtcaacctgctcggcttcgacggcatcggactggacctcaacgaaggccgtgaagagaacctcgaagccgtcgccaagtatggcgtggcctccaacaccgccatcttcgccggcgtgatcaacggccgcaacatctggcgcaacaactacgccacctccctcggcctggtcgacgccctgaagcaggtcaccgccaacgtggccgtctccaccgcatcctccctgctgcacgtgccgttcagcactgaaggcgagaccggcatctcgtccgaagacctcaagcacttcgcgttcgccgtggaaaagctgaccgagctcaaggaagtcgccgctctggccgacgccaccgaggacgagaagaaggcatccgccgccctcgccgccaaccaggccctgttcgacggtacccgcgtggccgccgacccggccgtcgccgagcgcatcggcaagctgtccgacgccgactacgtgcgccagcctgcccgcgaggagcgtcaggccctgcagcgcgaggccctcggcctgccgctgctgccgaccaccaccatcggctccttcccccagaccaaggagattcgcgccgagcgcgccaagctgcgcaagggcgaggtcaccaaggaagcctacgacgagttcatcaaggcccagatcgacgccgtcatcaagaagcaggaggagatcggcctcgacgtgctggtccacggcgagttcgagcgtaacgacatggtcgaatacttcggccagaacctcaacggcttcctgttcaccaagaacgcttgggttcagtcctacggcacccgttgcgtcaagcctccgatcgtctggggtgacgtgtcccgcgccaacccgatcaccgtggaatggtctgcgtacgcccagtccaagaccgaccacgtgatgaagggcatgctcaccggcccggtgaccatcctcaactggtcctggccgcgcgaggacatcacccacgaggagcagaccaagcagctcgccctcgccatccgcgacgaagtgctcgatctcgaggccgtcggcatcaaggtcatccagatcgatgaggccgccctgcgtgagaagctgccgctgcgcaagtccgactggcacgtcaagtacctcgactgggccgttccggccttccgtctggtgcactccgccgtcaagccgaccacccagatccacacccacatgtgctactccgagttcaacgacatcatccgcgacatcgacgcgatggatgccgacgtgatctccttcgaagcctcccgtggcgatctggtggtgctcgacgccattcatgacgcgcacttcgagaccgaggccggcccgggcgtctacgacatccactccccgcgtattccttccgagaaggagatcgaggatcgtatctacgagatccttgacaagatggacgtcaagaaggtgtggatcaaccccgactgcggtctgaagacccgtggtaacgccgagacctggccgagcctggagaacctggtcgccgccgccaaggccgtgcgcgccaagctcgacaagtagcggaaatcaccgagctccctctgtatgagggagctcgggtttatgtaaggaaatcagcatgcattccccgatgttcacccttgaggtctttcccccgaagcgcaacgctcccgtggacaccatctatgacaccctcgacggcctggaggggctgaaccccgacttcatctccgtgacctacggccacggcacccattcggaccgcaccgccaccgcgcgcattgctcatacgataagcaaggagtacggcattcccgcagtcgcgcatctgaccgcgttgtattccgacaaggcgaaaatcgacgaggccctcgacatgttcgagcaggccggcgtgagcgccgtactcgcattgcgcggcgactacatcgacggc

SEQ ID NO: 2292 - DNA, 28491 bp, Unknown
  R119_18m  MAG No. k141_18324
ccgccatcttccacttcaagtggtcgaatcgcggaatcagccggcggatatcatgtgccgcgtcgttaccagtcaagccgggaaattcgttgcagacggtcagtcgaccagcgaattgatctggatgacatggtcgcgctgcggaccggtgccgatcgcggagatacggcagccgctcagctcttccaaacgcttgacgtaggcctggcaggtggcgggcaactcgtcgaaggagtggcagtcggagatgtcttcgtcccagccgggcatggtctcgtaaatcggcttggcggcggcgaaagcggcctgatcggtcggcatatcgtcgtgacgttcgccgtccacgtcgtaggccacgcagatcggaatctccttcaggccggtgagcacgtcgagcttggtgagcacgatgtcggtcaggccgttgacctgggaggcgtaacggttgacgaccgcatcgaaccaaccacagcgacgcgggcggccggtggtcacgccgaactcgtggccctgctgacgcagccattcgccggactcgtccagcagttcggtggggaatggaccttcgcccacgcgggtgacgtaggccttggagacgccgattacgcgggtgatcttggtggggcccacgccggtgccggtgcaggcgccgccggcggtcgggttggaagaggtgacgaacgggtaggtgccgtgatccacgtcaagcatggtggcctgagcgccttcgaacagcacggtcttgccttcgtcaagcgccttgttgagaatcaggccggtgttggccacgtacggcttgaggcgttcgccgagcttcagcagctcctcggtggtctggtccacgtcgatcggacgacggttgtagagcttgaccagcatctggttcttctggtgcaggctggcctccaccttgtcgtgcagatggtcggcgttgaacaggtcatgcacgcggatgccgacacggttgatcttgtccgcgtaggctgggccgatgccacggccggtggtgccgatcttgtgcttgccaaggaagcgttcagtcaccttgtcgagtgtgcggtggtagggcgcgatgatgtgtgcggcctcgctcaccttgaggtgggagcaatcgatgccgcgggattccaagccgtcgatctcctcgaagagcacttccgggtccacgaccacgccgttgccgatcaccggggtcaggttcgggttgatgatgccggagggcagcaggtgcagggcgtacgactcatcgccgaccaccacgctatggcccgcgttgttgccgccgttgaagcgcgcgacgtaatcgaccttggtgccgatcagatcggtagccttgcctttaccctcgtcgccccactgagcaccgataagaacaattccaggcataacacacctccgcattcgcacgattccgccggaaacagactaccttacaccctctaccctgcgaagtttcgtctcacgcagggcgaggctgggggtgcgacgacccggaatgggtgacgaatttctactcgtacgaggcggcgctgtgaccaatcgcacaagcgcacaggttgaagaacggggcctagcgggcatgcctcgcgcgataatgaagccatgacgatcgcaacaccggaacgctatgccgaaatgctcgatgccgcccgccgaggcggttacgcctatccagccatcaacgtaaccagctcacagacgctgaatgccgcattgaagggcttcgcagacgccgagtccgacggcatcatccagatttccgtgggaggcgcggcttacgtctccggcataggggtcaatgatcgcgttaccggctcgctggcactggcggctttcgcacatgaagtggctgcgaaatacccgaacatcaccatcgccctgcacaccgaccactgcgccaagcagtatctggatgagtgggcgcgtcctctgctcgcgcatgaggccgatcaggtggcacgaggccaggagcctacattccagtcgcatatgtgggatggctccaccgtgccgctcaaggaaaatctggacatcgccgaggaactgctcgacaagtcgcagaaggcgcacaccgtgctcgaaatcgaaatcggcgcggtcggcggtgaggaagacggtcactccgccgaaatcaatgaaaagctgtattccactccggaagatggcctcgaagtcgcccgccgactgggtttgggcgaacgtggccggtacatggccgctttcacattcggcaatgtacatggtgcctacaagcccggcgtggtcaagctgcgtccgtcgctactcggcgacattcaggcgcgtgtggcgcgcgcggtggccgaaggcgagttgcctagcgcggccggcatagtcgatttccccaacggcaagccgtttgagctggtgttccacggcggctccggttcacgcccggaagaaatcgccgaagctgtaagctacggcgtgatcaagatgaacatcgacaccgatacccagtacgccttcacccgtccaatcgccgaccacgtgttcgagaactacgacaaggtgctgaaaatcgacggcgaagtgggcgagaagaagttctacgatccgcgttcttggggccgtaaggccgaggattccatgtccgcccgcgtggtcgaggcttgccggcagctgggttccgcgggcaaagcgctcaaatagcgcgtagttttgcgatcatgcgcgacactttcccggaaataatgaaaatcattgaaaatcaatggagcggacaacgggagtcgaacccgcctctaaagcttgggaagctttcattctaccgatgaactatgtccgcatgccttacggctgctgcacctcacgtgacgagcatgctcagccaaacgaggtacgagtagttatcctagcacgtcacctgccgacgcgcgtggagtaggtgggcggagcgatcggcgtgccgttcatttcgttggccatctgcatgaggcgcgcgatgcgctcatcggtcggcggatgtgtggagaacaagcgcgagaagccgaccgcggagaacgggttggcgatcatcattgcggagacggactgggtgccggcggttttgcgcatcggcgtggtctgcgcgccgtaggaaatcttgttcagtgcggaagccagggcctcgggatcgccggtaagcaggctgccgtcttcatcggcgtcgtactcgcgggtgcgggagatggccatctggatcaaagacgcggcgatcggcgcgagaatcacgctcagcaatgcgccgatcaggccgaggccaccggaactgtcgcggtcgtctcgcgaaccgccgccgaaatacatcagcgaatagcctaggtaggagatgacggtggccatggcagaggcgatggcggaagtcaggatgtcgtggttgtacacgtgcataagttcgtggcccagcacaccacgcagttcacgggcgttgagaatctgcaggatgccttgggtacagcagacggccgcgtgccgttcgttgcgcccggtggcgaaggcgttcgggctcatggtgggggcgatgtagatgcgaggcatcggcttgccggccttggcgctcagttcacgcacaatctggtagatctccggggcttcctgctcgctgacttcccgcgcgcccatggaggcgatggcgagtttgtcggagaaccagtaggtgccgaacgtggtaatcaggccgatgacgatatagatgctcagggtttgccgactgccgcccgtggcccaccaaatcagcatgatgatggcccacatcagggcaaacagcagcgttgttttcaggccgttgaaatggccgtgcacccgtactttggcatccataatgcacacactaaaatcgcaggctgaatgattgctggatatgcgccgcgagaaatgtcccatattcgcccggcccgtccggccccgagcccggccgcgtccgcacggggcgcggccgggtggacgaataccggacgggcgtgggcgaacgtcaggccagggcgagctcacgcatctggtcgggctcgatgaccttcttgtgctcgcggccctccttggcgccttcggcgcgctcgaaggcgtcgaccttcttccagccagcgaagtcaatcggcttgacgccgcggctttccagcagtcggtcgatggattcggggtcacgatcctcggccacgcgaccaccttcggcggccttggccagatcctcaagcatgttggtcacgatggcaagtgcgtcggacttggtggagccgatcaggcccaccgggccgcgcttggcccaaccggtggcgtacaggcggtcgcgcacttcgccgccgtcggcctcggtggtgatgcggccgtcgccgttggcgttggccagatgggcgccgtgctcgtcgtaagtaatgccgggagcctcggccggcttgtagccgatggcgtggtagacggcctcaaccgggtagtcggtgaactcgccggtgcggctcatcttgccgtcggcaccggtttcggtgcgctccacgcggatggccttgaccttgccgtcctcgccgaggatctcggtaggggcggagttgaagtgcacgtagtacttgcggtcggccgggttgccttcgaagtcgacgtcgccgtcatcttccatgtcctcggccatctcgcggatggcgaacagttcctcgaccatctggcgggtgagcttgtccttgccggccacctcgatggtctcgtcgtccaaatcgaagtcgtcctcattgatgatgagctgcacgccgggcagcttctccatctcgcgcagttcctgcacgctgaacttggcctgggccacgccacgacggatgaacaggtgcagcaccttggccttgttctggccgatgccctcgtacacgttgtcgggaatgtcggttctggccttgaggtcgtcggcgtcgcgcatgagctcgcgggccacatccatggccacgttgccgccgccgatcacggcgacgttctcggccgtcagcggccattcgcgggcaccggtgggatacccgtcgtaccattcgacgaacttggcggcgccatacacgccgtcgaggtcggcgccgggcaggttcagcggcttgtccttgactgcgccggtggcaaacagcacggcgtcgtagcgggcgagcaaatcatcgagggttacgtccttgccgaattccacgtcgcagtagaggtggatgtccggattgtcgagcgtcttctcgagtgcggatgcgatgaacttgatggacgggtggtcgggggccacgccgtaacgcaccagaccgaacggtaccggcagcttctcgaacaggtcgatgcgggccttggtgccgaggccgagttcttcgcccagtttcttgagctggcgcaggaagatgtcggaggaatagacgccggccgggccagcgccgattacagcaatacgaagttcagtgttcacagattcagtcacgcgctctagcctaacgcaaagccttccgttgcaacagagggcgagtggtgggaattctgtgtattaggccatagtttgtgcgtttgggaaacctacgagcactgctaatgtcagattatgggtttccctattggtcaagttattgccgttctcattccaagaagcatgcgaggcggatcaggcccttacttcggatacgtttatgctgcaaggcggttatccacgcatttatgacacgagaatgccgctcaatctgttcttctcgaactacatcgacacttatatcgaacgtgatgtttccgaatatcttgatgtacgcaatttggctgaattccgccgattcttgactctttgcgcactcagttccggagcactcataaactacaccaacatcgccaatgaacttgatgtaagtccgcgaaccgtaaaggcatggatgtcgattctggaatcaagttacatcgcattccatctcatgccgttctacacgaacgcacgcaaacaggtggtcaaaacgccgaaactctatttttatgacactggcttgctgtgtcatctcttgggcattcggacggtcgaagcactggttgcgcatcccaagttcggcgatatatttgaaaacctcatcattgcggaaaccatgaaacagcatttgaacgccaatcaggagccacaattattcttctaccgcgatgccagcaaggtcgaggtggatttgttggatttcaccgatcctaacaaccgtatgctcatagaaatcaaatccggacaaacctatcatgaccggttcgcccgccatctcactttaattggcaatgttctcggtataccgtgtgagcaacagtacgtaaccagtcgggttgagcatagttatgtctcacaaggaatccgcgtcacctccgcccctcgattggctagaaggccgacggtaaagagccgccgcagagcagtaggaattctgtgcaatcagtgaatcccttgaggcattaaagacgtcacctccaacggctctttacgacctcgattgcattcattaggtcatttcttcgttcattaggtcggagggtgctgaagccatcccttggaacggcggggtttcaagggccgctccgaccaaggaccgacctaataaacgtcaaatcgacctaatgaataactccgatgctattgctgctttcgtgggtgggatttccgtttccgccacgtcaccaaccgtatcgccccgattatgtttcgatgcggtggactcgacatacgaccatcccggtcagtcaactgacctacaaaaacagcagaagcctcatattcttaatcagtcccgatcaattagggcagtgagggcccagaggatgctcaccacgtcgatggcctcctggaggaaggcaccgacgacgaccgggataaggttgaacgcggcggcaatcatgccgatggtggcaagcacaaggcccgcgattacggcttgaagcatcacgcgcttggtgcggcgtgcaatggcgatggcgcgcggcacggcggcgatattgtcattcataatgaccacctgagcgctttcggaagcggcggtggacgtgccatcggtcatggccacgccgatatcggcaacagcgagcaccggggcatcattcacaccgtcaccaaccatcatcgtgacggttttgccggctcctgtagcggccctgactgcggctaccttatcctccgggaacagttcggcgtgaacctcgtcaatgccgacttcgctggcaatgatattggcggaagcccgcttgtcaccggtaagcatggcgagctcggtgacgcccaactcatgcagtttggcgagcactgccttggcgttggcgcgcggcacgtcgcgcagcacgatgcgcgcgatcagccggccgtcaacggacacatacgacgccatctcatccggctgcagcaggccaaagcgagtgcgcaggtcatctttttgctgagctccccctcttagggggagctggccgcttcgcgggctgaggggggcagcctcgccgaccgccaggaatccatcctccccggcggccgcgaaagacagccggccaacgcgcaccgcgtggccgttcacctcgccggaaacgcctttgccggcgtcttcattgatgttcttgacgaccggatactcccgtccatggccgggccagctggcctccggctcggggcataggcgctgaccatcctcgaaccgctggcgcagtcgggccatcgcctccacgccagccttggcaatgcctttggacaggatgtgcaccgagtagctttccaccacgccggccatcatcagcacatggtcttcgttgagacgggttgcggcgccgggcagcatctcgacgcgcacgacctgcggctgcttgacggtgagcgtaccggttttgtcgaagaacacctgcgtgacgcggccaaggttttccaacacgtcctgcgctttgataagcacgccggctgcggcgaggcgtccggttccggcgatgtacgccaccggtgcggcgatgagcagcgggcagggcgtggccagcaccagcacctgggcgaatcgcgtcggcaccccggacatcgcccatgcgatgccggcaatcatcagcgagagcacggtaaagggcacagccaagcggtcggcggtttttaccacggccgggcgcgactcctgcgcggaggccacgagctcgaggatgcgctggtactgcgaatcggcggccacctgggtggcacgcatggtcaatgcagtcgagccgttcaccgcgccggacatcacgcgggcgccggcgaacacttcacgcggcaccggctcaccgttgatattgctcaggtcgagcgtggccgtgccggacagcagctcaccgtcaaccggcacagtttcgcccggcagcaccatgagtacatcgcccagctgcacctgctcgaccggcaccgtgtcgaagtggtgcgcggcggctgcagccaacgccaagcccacacgccggaagccatcggacgaatcgcccttatcggtagcaaacccacaccccacaccaggcaggttgacgacgtgtgcggtctgcggcgcggcttccataagcgcggtcagactgcgctcggccttggcttgggcgtattcctcaatggcctcgccggacgtaatcatcagcgtcaccgcccaacttgcccagtattcggcgacggccacggtggagaggatcgcgaccacggccagcacatcgactccgacctgcccgtggcgcaaatcgtcaatcatgccgcgcacagtgtcaatcacgataatcagcaccaatgcgataaccagccactggccgaagcccggattgccaagtaccggaatcgccatcgcattgccccacggacgccaatcgcccagtaaagccagcggaatcacggcgatgacgacgaccggaagcatcggcacaagcttgcagatgtcgagaattttggtgaagaatctgatgagtgcgctcatcattgctccttacgctcgtatacggagtcgattgcggcacggcaagcgtggcccgcgcaatcggcgctgcggtcacgccttgttaacccaccggcggctttgcctggggcttcgctttgctcggctcccgcgcgaccttccgatacacggcgtaaagatgttcgtattcagttatgtgtatccataattatgggtatcgctcgggacatcccgccccgcgcatcgcgcccccaatccgccgcatggccgagtctgcgcggcacgccgaacgcatcggatatgcgaaagggccgaggcggcagactcgctcaccgccacggccctgaccggcccgacgcgcgttcagcgactatcgtccaccgtcgcgcgacgcgccatccgctttaccgcaggcctttaccacaggccgaacggatcggtgaagccgccgccgtcaccggtgcctccatcgttgcggccgttgccgttctggccgttgccatcgtcgccgccgttgttgccgttggcgccgtcgccgttccggttgcgcttgttgttctggccgttgctgttgccgttggcgccggacgaaccgttcaccgacgactcctcctgatcgagcgtcacgtccacatccatggtcttgccatcgcgcacgatggtcagcgtcaccttgtctcccaaagccgcggcacgcacgtagccgagcagcgagtagttgttgttcaccgcgttgccgttgaaggccacgatggtgtcgccctccttgaggccggccttgtcggccgggccgccggagacgaccgcgctgccggtggcgctggacttggtgatggtcgcgccgccgcgggtcacgccgtcggcttcaaccgtgtcggacttgatgaccacgccgagggcaacgtgcttgaccttgccgtccttgatgatttcgtcggccacacgcttgacgaggttggacgggatggcgaagccgatgccgatcgaaccggcggagtcggatgaggtggcggtcgaggcgatggacgagttgatgccgatcacctggccggccgcgttgaaggtcgggccgccggagttgccggggttgatggccgcgtcgatctggacggcgttggtgacgatctcgttgttgttatcgtcggtcacggtcaccgggcggttcagggcggagacgatgccggtggtggcggtgtcgtcgtagccgagcgggttgccgatggccatcacgttctcgccgacggcgagcttgtcggaatcggcgaatttcacggccttgaggtcgctcggcgggttgtcgagcttgatgaccgcaagatcggtggtggtgtcggtgccgacgagcgtggcggaatacatgttgccgttggcaagcgtcacctgaatctgctgggcaccggagatcacgtggttgttggtgatgatgtggccttcggtgtcgatgatggcgccggagcccttggcggtgccgttgctcaacgcggtctggatggagaccacggagccggagacatcgctggcgacggtctgccagtcgggggcttcgccgctcttggcggtggcggacccggagccggacttattcgagctgacgttggacagcgaattgctggtcggcagggtgatcaggccgctggtgagggcgccgtagccgaggcccaggcagagggccgcagccagaacggcggcgaccacggcgatgaggatgttgctcgccgtcttggacatgccctgcttggcggggccgggctgaccgggctgtcccggctgggtcgggccttgaccgttcggcgtaccggtaccgggagtgccgaaaccgaacagaccgccctgctggggctgctggccattccggccattctgaccggactggctggcaaacgggttgccgttgttctgctgcggctgcgtgggcggattgaacggattgccgttgccctgcggctgcgggttattggtgtagtagggattgcggttgccctgctggccctgtggggtttgctgtgcaggctgaccgaacgggaattgctgcgtgggctgggcattgctgccggcctggccgccctgctggccctgtgcctgagtcggggtcggaccataagcgccatattccggggccggacgatacagcggagttgtggccgaggtctggcctgcggccggtgctgccggagaagccggcgaggaggagaccaccgtgctctcgcccttggcggaggcgtagtccgggatgggctcggtggcggcagtgtcggtagcggcagtgtcggtagcggcttgcgtaggctgctgatcggcagcgagggcgaccggggaaaccggggcttgctgctcgctggaatcgctggcgttgccggcatcaaccgagtcgccacccacaaacgggttcttcggctcggcgttgccggtatcggcagtactattggggttttcgttattccgcggggtctggtcgacgccctgcgggttaaattcgtcagccattgctgctccttttcctagattcctatcacgtctgttcggcggctattcgggcacttgcccattgccacttctcgtgtgctacctcagtagtaaaggcagtcaatctggaggttttctgaacgttgattgaaagtctatgcgtaatcatcgcagagtcttatgggcatctcggcttcgaggggctgatttcctgtttcgggaacatctacttgcacttcaaggggctgttcgcgcggtcaattccgagtatcaagggccctcatttaacgccattccgccatttttgcagccggcctacttgaccgggagccccttgaagcggaagtagacgttcgggagcggcgaaatccgcccctcgaaaccgagttcttcacaatttccggcccttttctggcccttctgcctaaagtgaacatatgacgatcagccttcttgaacatccgttgggcgcacagcccggacagcccggcgaccgcagcgccttccacttcgagacaatcacccgcctgccatccacggccagcggacttgggcgcgacggtgctcgatacggtcgcaccggcatcattcacacgccccacggcgatattcgcacgcctgccttcgtgccggtgggcacgcaagccgcgatgaaggccgtgttgcccgagcagatgaagaatctaggcgcacagtgcctgctggccaacgccttccacctattcgagcgcccgggcgaggacgtgctggacgcggccggcggcttggcgcgtttcatgaactgggatgggcccacgttcaccgattccggcggtttccaagtgatgtcgctgggcgtcggcttcaagaagacgctggcaatggacgtgaccggcatgaagtcggacgacatcatcgccaagggcaaggagcgcatggcctgggtggatgaggacggcgtgacgttcaagtcgcctttgaatggtgacgcacatcgtttctccgctgagatttcgatgggcatccagcacaaaatcggcgcagacatcatgttcgcgttcgacgaactcaccacgctgatgaacacccgctcctaccaggaggactcggtggagcgcaccttccgctgggcccgccgatgcgtggacgagcaccagcggctgacggctgatcgagtcgggaagccgtatcaggcgttgtatggcgtggtgcagggcgcgaattacgaggatctgcgccgacacgcggccgcgcagatcgcctctctggacttcgacggcgtgggcatcggcggcgcaatcgagaagcgtctcatcggcgacacctgcgcatggatctgcgacgcgatgccggagaatcgtccacgtcatgtgctcggcatcgcctccgtggatgacatcttcgcctgcgtggagaacggcggcgacaccttcgactgtgtggcccccgcacgttgcgcccgcaacggcgcgatctacacgaggtcgggccgatacaacatcaaacgcgcccagcacaagttcgatttcggcccgctggaggaaggatgcgactgctacacgtgccgtcactactcgcgcgcatacgtcgatcacctgctgcgcgcccgcgagttcaacgggtttacgttggccacgatccacaacgagcatttcttcgtgaagctgctagacgacatccgcgcctcgatcgacggcggatactttgatgagttccgcgacgaagcgttggcccacttctacggcaacggcgagcgccggccagggttgtgagtttttctccttcgttgcggcttgtgctgccacgaagtgactgaggggagtgccgccaccctcaaagatcacggcgcccgcaggagacccacaagcgatatatccctgcctcccatgcgacacgccgaagattgcatgattacccagccgggtgtaagttagtcgattgtctgcgagtgtggcggaatggtagacgcgctgtcttcaggtggcagtgagtgtatgctcgtgggggttcaactccccccactcgcaccagcaactaaagggctggaatcggaaggttccagcccttttgctttgtccgggcaagcgccgtttttcaggggggggcttaggacttgagacttatggcccaactttcgtggcggaaaatgtcccggtacctgcatcaatcgtttgacgttcaagccaggccagaatccgctgtcccggttcgcgatttcgggcgatctttgcaaaccgggacaatttttgttgccccggtataaatgtcaatcgatttatgcgaaaaccgggacaacgtgccaattccagaatcggccttattccgccgattccgtctgccagacgatatgagttgaggaaaccggagtgtcccggttcacgaaaacaagccgaaatcgccgaccgggacagcggattctgccccggtcgacaggtcaaacgattgacatatgaaccgggacaaatacagatcagagagaagcccatgaagtagatttaactttcctcaactttccgtccgccataaactagcattacatagcatcatgaaccgagacgaaatcaacgaagcatttggagtcaccgacgaccagctcgaccgaatggccgagccgtacgaatccgacaattggcagggcggtgtcgggagcatcattcgcagcaatccgaaatcaggaaccgacacaagtcggacccagcagacacgcataatacgagttcacagactcggcgatgtattccgcaaccgcaccaccgaataccacaccacggaagaactgtaagcattacgaaatcaaccttgattattgcgcgggcctatactaggttacggtagcgtaagttagtggccgggagagcgtcgccggccatagcgaggtgatcagtatgagcgtttccatcagcacgccatctggacgaaccatggcttccgccgcaacagttgcgccttccgcaaccgcgagtcaaaaatccagcgcaagcgccaaccccaccgcactggaccgtgcatcggcccgatacagggccgcgcaatcgcgctaccgccaagccaaagccgcgctgaaggcgatcaagcgccagatcgtccccgtggatgcattcggcaatcgcaagccgcgactgcgcggatggcttcacctcgccaccctgccgctgtgcatcgcggcgtccatcgtactcatctgcatcgcgccggcagggcccgtcaaagcggcgtgcgcggtgtacggtgcctcggccatgctgctgttcggcaacagcgcgctgctgcacgtcgtgccgtggcgcagcgcgaaggtgactcgcgtactgtgcggcatcgattattcgaacatcttcctcatcatcgccggcactaacacacccgtgctgttcgcgctcagcccggcgattcgccggccatatctcacggtgatttgggtgaccgcggcgatcggcacgatactgcatatcgtctggctgcgcaccccgaactgggtgttcaccactgtgtatgttgtgctgggattggcgccggtgacgcttattccgcagctatggacggctcccgcagtgggtccggctgcgaccatactcatcgcatgcggaggcgccgcgtatatcgccggcgccgtgtgttttgcgctgcgcaagccgaaccccgttctcggctggttcgagttccacgaggtgtttcacttgggcacggtcatcgggtacgcctgccacgtcgtggcgatttatctgattgtctgcgcgctgtagtcgtccagcaattcatacaggatgcttcgaactcgctgtattgcagcgatttgaacacggcgcgggacagacagcggcccttaattctcggagccaagaatcaagtccttgatcagccagccgtgacggccgccttcatagacttcatcagtgagccggtagccgcgctgttcgtagaacttgtagtggtcgttctccgagtgcacggcggccatggttccgccggcttgcgcgatgcggcgttcggcgtcggccagcagccgcgagccgatatgccggccttgtgcctcgggcagtaccgccaggcgcgcgatgatgtatcgcccgggctggtcgggatgatcggggtccgcgtagaaccgacaggtcgctacggggtgattctggctgggctgaatgggctggctgcgtgaggccaattgcgcggacgagccggggcgattgggcgcatcattatccgaatcgaacaccagcagatgtacggacgcggcatcccattcatcgaattccggccgccagtcgcgttcgcggatgaacacctgctcgcggatggcgcgggccgcgtcgggcaactggtcgtatgcttcgattcgatggtcatgagcgccagtgtaatgcgtcacgataaccgacaaagcccggcgcgccgggcgggcccgggccccggctgcgctcgatgagctcaggccgtacgcgcgatctgcacggcggtgccggacgcggtgaccatcagcatgccgttgtcggcgccgagcacctcatagtcgatgtccacgccgaccacggcgtgcgcgcccatcgcctccgcacgctgctgcatctcggcgatggcctcgttgcgggcacgcatcagctcttcctcatagccctggctgcgaccgccgaacatgttacgcaggcccgcgccaagatccttgaacatgttcacaccggataccacttcgccgaagacgatgccttggtagttggtgatggtgtatccgtcgacggacggggtggtggtgacgagaatcatggcgaggctcctttggcttgtctgcgtggatgaatcactgccgagagtcggatcgctcccgaatctcacctcggaaacggatcgcttctcttggctaccacaatagtcgagagcgccttccccgacattttcaatccacgcgattgcgtaatcaaatgcgtattttgctgccacaaaaatgcagacaaaatcattaatatcatgggaggagtgcgccacagcgaatacgcatacgatttcatagcaagcagcacgtacactagtaccagtgaatgtcagaaatcggaaaggaacagggcatgactggtgcatccagcggggctacccgtatcggctcaaccgcaccacaagcgcttgagttctttgccggcatagggcttgcccgcctaggcctcgaagaggctggcttccacgtggcgtggtcgaacgatatagatcacgccaaatgccagatgtataggaaccagttcggcaacaatgagcaggaacataccctgatcgagggggatatgggtgagctacatggctctgacttgcctcacgatatctccattgcttggggctcctccccttgtaccgatatatctctggctggaacccgtacagggttgaacggcaaacagtccagcgcgttttggcagtatatccgtcttctggaagagatgggcaataataggccacctgtagccgtacttgagaatgtcacaggtcttgccacgtctcactcaggcgaggatatagcggcagcggtaagcgcattcaatcaactgggatattcagttgacgcactgtcgatcgatgctcggcgttttgttccccagtcccgccccagactgttcttggtcggcctaaccaatcctcctgagggctcgcaagccaattccccactacggccagattggttgcaacaggtgtttgccgatacctccctgcgtatgcacagggcagttctgccggaaccgccggaaccacttatggcgggctttggcatgtacgccgaagagatgtcagacgatgattcccgatggtggcctaagggcaagctaacggcatttcttgactcactgtccgctgtgcaatcagagagagtgacgaaactgaaggataatccgttcatctcttatcgaacggcatacaggcgcactcggaacgggaagcccacgtgggaagtccgagcggatgacatttcgggatgtctgcggacagctcgcgggggttcttcaaggcaagccgtggtgaggctcggtgaggggtcgacggcagtgcgttggatgactccgaaggaatacgctgcacttatgggtgcatcacattacaaccttgatgggctgcgcaccaaccaagctttgttcggctttggtgacgcagtggctgtgcctgtagtcgaatggctcggcgagcactacttcatgccagcacttcgcggtacattggacaagacgaagcagcaacatgagctacggtcagcctgatagtcatcgaaggagagcaggcatgggtatcgacgccatcgaagagtttcgaaagagccacggcattaacaccaaaggcaacctagccggcatactgcagctcaaccgcgccttctcgaaagatacattgccgatcaatcccgatgattatctcacgggtaaagaaggacaggtcaaaggactgagtggtgcgaactgccaaagcattttagaggagtaccacatcaagagggtacttgcgtccgaaggcggtcgaacaagccgtggtcttatgggcataatgaaggattatgcaacgctcattaatgaagagcggccgtccagcaaagatttcagcgagatagagcgtttttggattgatcgtatacgcaagttcttcaatagcaagccattcaggctagaggccgatgagtcactctcaatcaccgcagcagtaggcaatctgttagagcaggccaagaagcggcagaaagaaaaccccggcaccatgtatgagggtacggtgttgcagcagctcgtggcagcgaagctgtccattatcatgccggaagtggaaatcaatggagcttcagtagcagatgatcccacagggcgaggcggcgacttcaatatcggagataccgccatacactgcactaccgccccagccacgttgcttatggagaaatgccagcgcaacatcaagaatggttttcacccgatcattatcacggtaaaagatcgagtgaaaaccgcttgggatttggcagcggatatgggcttcgctgaacgattggaagtctgggatattcaatcgttcctgtcaaccaatgtccatgagcatggtcatttcagccaagatgcacgcaaagcaatgctcactgatttggtcaccgcttacaacaagattattgacacatacgagacagatcccagcttgcgtattgagtacagtaattaagaaagtgcttatactagccgccaatcttaattgattattcgaaaaccgttcttaacgtacattacactagagttttgcaagcaactttaggcacgtcgaggtatcaccatgagagaacgaacatgtgcgccaaatcccaatctgctggaatccatgcgttctgtcggatatgacttgaatactgcggtagccgatatcatcgataattcaatagctgcgaatgccactaaaatcagtattttgtacttcgggcaaggcgaggaaccatacatcgctattgtggataacggcaatggcatgagcgagaaaaccgcattcgaagccatgcagcttgccggcaacagtcccaataaggatcgcgcgtcaaacgatctgggtcggtttgggcttggtctgaaaactgcttctctctcgcaagcacgatctttactcatgacaacacttcagaacggagcacgtactacactgcgctgggatttggacgctgtagcacgcgcaggcgaatggacgttagaacaattgaacgagaaagagaccttgtcagcgctgccccaaagagtccacgatgccatgcccgtctcacacggcacttgtatcttgtggcgcaatctcgacaaacttgaaactcttgccggaagatctctcagagagatcgataaggctatggaagagcttaccggataccttgcattggtatttcaccggtttacacatccctatcccgacgataatatccggcaaatcgtcatcgacgtcaacggatgcacgattcctcagcgcgacccattccttcgcgataatccggcagtccaaaccactggagtccagcgcatcagcacttccggagccacgctgcgcggttatacattgccgtatcaaaaccgtctgcgcgacgaagacagacagctcctgaatctcagcgagcaacgaggtaagacgctaaccgatactcaaggattctatgtatatcgtgcttaccgattaatcacttggggcagttggtttcgcatgcttcccaagaagcaggccactaagttaagccgcgtgcaagtggatattccaaatagcctagatgctgagtggactcttgacatcaagaagtctcgagccacgccgccgaagatcgtcagcgaagtcatgaagcgatatgtagaccgtttagcaaaaccaagtcgcagggcccagcaattccgcggtcgcagaaaaaacgatgacccctatgctcctgtgtgggatatcgtgaatgaccgggatggtgtattccgctacgaaatcaacaggagcaacccatatatcgcgtcatttttagacgcattaaccgttgaacagcaaaagacgttcatggaaatggccaagattctatcggccacgatcccatatgaagatatgcagtctcgttttgcaatggaccaacgagctgacaattttactctcaacgatgatcaagcccgcgtctttgctaaacagatgtggacgctgaacgagcatatgggtttaacgccagaacggttcgtcgaatacttcaggaacactgaaccaatgtccctctgccgtaacggagagatgatactcaaggaggtatcacatgtctgatctgtgggccaaggctatccagcaaacaacgaatgcgctatctgcaaacgatattctgccaaacgaaaagttgatcggaaatatacttcgtgtttatgcatcagtgcttgggctagattgtgataccgatgaatatcgggaagccgttcgacgtctgagggacatgtttcttgcgaagatccccgagggtacaacgcttactgataatggggagaccaactggcgggagtggctgccagaaatgaagcaagacgggctggttccgcaacgatggtttgcataccagcaatacttacaggagaaacagaacgccgacttcattcagcttcaatcattggataagtccacggatcgggtgctcggcctgctctctgacccacggcgcgatcacgcccccatacggcgtaaagggctcattttgggcgatgtacaatccggcaagactcgtacatacatggcactaatgaacaaggcagtggactacggatacaagatgattgtagtactcactagttccgacgaaggcctacgcagacagacccaagaacgcattgactccgattttctcggtatcaagagagtgacaagagaaagcacgggaatcggcaaatataccaaaggcaagagcatacccactccagtctcgctgacaaatgaggatgatttcactactccgagtagcaaggcatttcaggggctgccacgaccgacgtggaacgaccgtcccgtgataacggtcatgaagaagaatggcatagtcttaggcaaattcaacaagtggcttgacagcccggagtttccaaaggatctgcccatgctcatcatcgatgacgagagcgactacgcatccgtaaactctgccaaggaagacgagtctcccacagccatcaacgggttgttacgcactttatgcaatatcagtgagcggtcatcatatgtagcggtgaccgccaccccattcgccaatgtgttcattgacgatgaagttaaagaggatctgtttcctagggacttcattcacatcctgccaactcctcccgcctacatcggcgcgaagaaattgttcggcgaccttgataccgaaggccaaaagagcccatgcgtacaactccttgatgaagatgaactctccagctggttacctctgtcccataagaaggaataccgttttgataacaatggacaatgtgagttaaatccgcaagttgctcatgccattgattgcttcctcatcgcctgcgtgttgcgtcccggcgcggaggacaagcggcagtcgatgctgatccatttgtcacgatttactgcagtccaagaacagattgccgacatgatcaacaaatatgttggcgacattgtatctgcgctaaaattccatccaagtgaaactgaccagcgcatttataagatgcatcgtgtctacgatgaggaatattcggcttacggccaaaccaacgggatgtcttggcagcgagtcctacatcggatgcgtctgatgaccgaacggctacaggtgcgcctagtcaattccaccgcatcaaagtggagcgaaatcaaccaagtacccatcaacctagcgaaaaacgaatgcaccctctacgtgggaggcaacagactgtcacgtggtatgaccttggatgggctcatttgcagcgtcttttaccgcaacgtcacgtcggcggacacgctactacagatggggcgctggtttgggtaccgaccaggatacgccgacctgcaacgtgtctggctgacagatcagtccattgctgatttccgttatgcttgctccatcaccgagaatctcaaaacgcaggccaagaaaatggagcggcaaggacagactcccaaacagttcggtctagccatcatgaagaacccagaaaaaggcgtgcgcatcaccagcgccacgaagatgcgcagcgctgaagaaggtagcagcgacgtgcttgctaatttcgacttggaagggacccgaatcgaagctgtacgtatcagtgcagcgccggaccgcttgaaagacaatgacagcgcgctcaataagttgatcactgagtgcaattcaatgccgagcgcgtttatcgcggattcgccgatgcgcgtctacaggcatattcctgctggaataatcacagagtttctatctcactatcgtgccggctacgacgatacatacttcggccgtacgctattgcaatacagaaatcaaatcaaagagcttaacaccactaaggccctcgaattcgcaaaaacccagcagacagaaaatccagatatcgactggaacatcgcgtttattagcggtaagggggaacccattgatggagtcaggttccattggacgcaagtagagcgcaaaagcacatatgacagggaacacgacctgttccgcatcagcggcaaaagcatgcgcctagcaggcacacaggatgtgttcaatgtcgcccgggcaatctcaccagttcctatgcccaaaaagatgaccagtagcgagactgattactacctcacgaagtatttcggaatcagccccacacttatgctgtaccgcgtccagattaagcagaatgggaaaaagatctatcccgtaccggatagcggcaacggcgtgctcgccgccaaactcgtcattccaactgccgagatcacggacgaccggcatagaggcaatgcaacctactactacaacaaggtcgcaacacgacagcagtatcgcgccatgagggagcaatatgacgctaacaacgaagggggagacgaagattgggcctactaatcgattccggttcccttgagaatctctggcggcaactagccaaacgactagggacggagaaccaagaattagatctgtccctgagacttccggtagtcatcggatgtacgtctgaatgccggccgtacatcatgctcctatgcaatacacgacccaaagcattgaatagcttgaaggcgattgatgtgcgtgttacagcacggcagtcgcctatcaaggagaattggtccttgactttcattctcaaggactggagcttgttgcacgcattcgcggaaatctgcctcgcgttcatcgagcgcattcgccggtcatcgtccgaacggtccgccttgcgcgagatctacgcaacgatggaccaatggcgacgcctattaaaaaccgccgacggaactggtataaatacgctacgcgggatatgcggtgaactgctggcttccttcgaaatcgcaaagctcactagcagatcggttgacatgacgtgtgaggcatggacaggcccgtacggcgcgcctcaagactactcattcgaatcggaacgttgctactgggaaattaaaacgatccacagtaacgcgaagaggatcaaaatctcctcgcctgaacagctagacacgtctgaccgacgtatcaatctagtcactgttgtcctcaacgagccatcgggaacaaatgaggaacatctggtgaatctgtctcggattatagagctgctactgcgagtctcggacgatccctaccgaacgggtctatgtatcgataacgggctggataccttgggtttggagcagtattcggacttggccagacacaccatgttcgcagtgggagcggccaccgtatacgctgttgaagaagatttcccacgtgtgacggtcaagacagtgccggccggtataacgggattgacatacgagatcgaaaccgccgcgatgaaaccgttcatcacaagcagcgacaccgaggtcatggcagtatcaccggaggagtgatggagctaactagctacagacgcgaactcgtcacaagagtccaagagatggccatagacgaagggcttctcgaccaagaggcattcttccaagtcgtctgtgaaatgttacgcgacagcgaggccatcgctgactaccagcccattgaaccgggatatcgatttggtgagggtacgaaccgattcatggcggtagatggatacgatcaatctgcattcgatatggacgaatccatcgtcgtcattgcatgtgatgactattccaaccgtgttggagacgaacaggtaaataccattcaagccaaagattgcatgcgatacatcaaagccatgcgtcgttacatcaaagccgcctttgatggttccttccttgaacaggcagaggagagcagcgcagcctgggaattcgcctcattcattcacgagcacaagaggggcatctctcgattccgtctttattttattaccgaccgggaatacaccgggcgcgactccagcatcaaggaccccactgacttttactccaaaggtgaggatgagcataaggtcagcctcgaagcccatgtatgggatttgcgccacctcatggaagcatcacaagctgcggccccgctcgaacacctcacagtaagcctcggggccgaaggcattccagccgtcaaggcacccgaggctggtaacaatatggacacctatcttatgttcttgtccggccaaacgctttccagctggtacaaaaaacatggctccaaacttatggaggccaacgtccgttcgttcttgtccttgcgtggaaaggtcaaccgcggtatccgcaacacattaagcacagaacctgatcgatttgtcgcttataacaacggcttatctgcgaccgccagtcgagtcgatatgaacgaacgaggaaacattacggcaatccatgacttgcagattgtcaacggcggccagactacggcatctattttttacagccaaaagaaagacaatctcgacttgtccgcagtcgtagtcccggtcaagctcgttgtggtacgtgaggatattgcccgagaacttgtcccgtacatttcccgatacaccaacagtcaaaacaaggtcgccgagaccgatttctcatctaacagcgagtaccaggtcaaactatcccagctctctcagcaagttctcacgcctccgttacccggcaaaaacccgacgcattggtattacgagcgcacccgcggtcagtatgatagtgaacgaaaccgtagggacactgctgatcgcaagcaattcgaaaagctcaatccttccaagcagcgtatcaagatgattgatgcaccaaaatatctcatgtgttgggacgggtatccccacatcgccagccttggatcacagaaatgtttcgctcgattcgtcgaaaatgaatcaaagaaagggcaagaaagcgtgaaagcgctcgacgccgagttcttcaaacagctggtgtgcaagcggattctcttcgacaccgtgtacaagcacatcaagatggcggattggtataagggggcctaccaaggcaatatcgcggaatatgccgtcgcaaaatatgcactcgatctgaaacggttccacgctgatttcgattttgagacgatttggcgcgcacagcgcatcaacgataccgccctcggacgccttatgaaggccgctgaacaggctagtaatgttttgaacgactcgaatcgttccacccaaaatatcggcgagtgggcgaaaaaagaagcctgctgggatgcactgcggcgacaaccgtcttgtctctatgcggtgcagtccttgacctcaacagtgtctgagacggatgctgtcccagacacggaagaaagtgcgctcgtcgaagcccaacaaaccatcgtgaaaaccgaaaatcccatttctgcttctgctccggtgtcctcatccgtaccgcggcacaaagcatcagagcaaacagaagatgcacgcatagatgattggacaacagcaccagctggattccttcgtgagctacacactttcgctaaagagcaaggcatactcagtcctaaatcagaaacttcactagtggcgctcattgatgacatatcagctggcatcaacaccaacgctctgaattatcttctatcgcgggccaccgaatgcggattccaatacaatccgccaagcgaaaagccaacagcggccaaggaggcaataggggattctcctctgccgaaatcagaacccacacacagtttcccgacgagttttgatcacatgatcgattatcaaagagacttcctcgctgcgatcaccgccgacacttggcgcacaatcctcgaatgggctcgatatcgacatattttaaccaatgaggcactggctgacatcgcaaaaattgacaaacatattcgattaactgaagagcagacccgatatctctggacatggcggcaaaagatgatcgacaaaggattccccgctagccaattcgcaccacgaccaggtacgtattagtcgaaatatcctcttgcgtcgcgatcaagatattcagccaccactttggcgatttgctgtgccaaaagagggggcacggcattaccaacctgttgatattgcgcagttctgttccccataaagtagtaatcgtccgggaatgtctgcaaacgggcaacttcacgcacagtcagactgcggcattgcgtgcaatctggatggataaagtaatgaccatctttgcaaatatgcgaagtaattgtcgtcgagcatcgatccggcatctgcacgcggaaacgatcagcaaagataactttttcccccttagcgacgccttttgcattatcgtgatccggcaacagcgatttgggaaaatcatacagtttagccggcttattatgtttcgcggcaaacgctgaacagaatagataacgctctagatcagccgccatatggttgcgggcatgatggttcaccaataccgtacgatgcttgagatgtccgcggtaccagccacggtaaacattaatgacgcccttttctacacgactcgcatcctgcgaaggagggagggctccacttagtactggttgcaatacgtccgatagatcacggccctcatcagtggcgagaattgcttttgcagcacgacgtacatattcatcccaatcgcaatcaggtttccccttagaagtgaatccactccgtaccttaggaataccggccaacgcatcagaaaccgatacgccctgcctcttctgcaaggtacggggcttgccacgttcctcatcattacgaacaccaagaagaattacgcgatgacgagcctgaggaatgccataacattcagcccttacgatgaaatccttgggggtctcaggctcatcaaccactagagagtgcaacgtgtaaccggcatcctgcatatcttgttcgatatgtgcaaatacgccctgatgacggtgctgagcagaaaggatacctttcacattctccataacgaagattgtaggatgtagttcctcgatgaatcggaggtaacacttgtaaagcgtctgcttaacatcattatccaaggcctctttgttccgcgttctccgtgcacgtcccacaagagaatatgcttgacaaggtggtccgccgataagtacaagtgggccattgtagttatcaccgcaacgagccttcaacttgtccttggccatattcacaaaggtgtcatcaccttccaccaaagtaccttgaacagcttcttcatcagccgcagcccacttatccggatattccagctgcatggcttggaaattgtaagctgatggattatcaagatagttcaggtagcttttcggcaactgcccatcagacttcatgattttacgtacgaacgagcgcaaccgtaaagtgtcatgtgcgttcttttccatttccaccgacatacaaatctggaaaattggattaccggccggatccttgagcgacgaaaaaccctcgccaagccctccggggcctgcgaacaggtcaataatcggtataacgctcacgtcatcctcattccttcaatgaatactctctgtcagcggatggtccaaaaaagagcgtaccaggaatattcagcacgtgatgactaccgctcacatgttcctgactatctgcagtgtccacggaccgcgtcctttcgtagaccaccgcaagcaaccacggcaacgacgctaatgggccaagcgctggcaacttgacgccgccaaaaggctctcagcggcgtttgccggccaaaacctggcaggttgacgacagtggggacaccgatttgagctggcccggctgaccatcagctccgcaatcggacggcggcggccattccaccgtcgccgtaggtggggtggagcatgaaggcttggctggcggtggtgtcaccgcacatcaacgattcccacatggttaagcggctcatggagatggcttcaacgccgaggatggcgtcggcgatgtgcgcggcgtagagatcgcggtgcttggcgatcaggaagcgcatgagatcgaggcgcttggtcatgctggtcacgtttgaggaggccggggccgtgcggtactcgatcagcggctcgggggcgatgccgatatgggccgcgtcttttgcgggattctctgtatcccaggcactcccaaaa

SEQ ID NO: 2293 - DNA, 29184 bp, Unknown
  R119_18m  MAG No. k141_18331
caggtaggccgggaagcggtgcaggtactggtcgtacggcagcacggcgtgggaagcaaccttgaagaagttgcggtaccagacgttcagcataccgagcagcaccacgacgttcttctcgaacggggtgttggcgaagtactcatcgatctcgtggaagccgtgcaggaactcctcgaagcgggccgggccgaagaccacggcgagggaggtgccgacggcggaatcgacggagtaacggccgccgacccagttccagaagccgaacgcgttgttcgggtcgatgccgaattcggcgaccttctccaggttggtggagacggcgacgaagtgcttcttgatggcttcggcgttcttctcgtcggagccgtcgatggcgcccttggccttgagctcttcgagcagccaggtgcgggcttcacgggcgttggtcagggtctccagggtggtgaaggtcttggagacgatgatgaacagggtggtctccgggtcgaggcccttggtcttctcggccaggtcgttcgggtcgatgttggagatgtagcgggcggagatgcccgcgtcggcgtacggcttgagggcctcgtacaccatgacggggcccaggtcggagccgccgatgccgatgttgaccacggtttcgatcttcttgccggtcacaccggtccactcgccggaacggaccttgtcggcgaaggcgtagatgcggtcgagcacctcgcgcacgtccttgacggtgtcctggccgtcgacgatgtacttgccttcatcctcgaccgggcgacgcagcgcggtgtgcagcacggcgcggtcttcggtgttgttgatgtgcacgccggtgtacatagccttggtgcgctcatcgagcttgacggccttggcaaggttggcgaacagctggagggtttccggcttgatcaggttcttggacagatcgaagtgcaggtcgccggcgtcgaaggacagcttgtcgacacgctcggcgtcttcagcgaaccacttcttgaggctcacgccttcggcctgaagctcgtcatagtgcttctgcagggcagcccactcaggggtctgggtggcgtcaacgggcggattgatggccataggattccattcctttcatcagtgactggagcgccttcgctcacggctcggatgcgctccgtatcaccaaacagaatactcacaaattcggacatgaacagaacaaaaatcagtcagcgatgtcggattgccatcgtttgcattatcgaacagttcgtggcgcggcacaaccgtcatcttcaaccgagcggtcacgacacaactgccaagccgccgattggacttttcgcggagatgtcttatacttaatttcttgtgcgcggctggcgaaatgccttccgcgaaccaagccactttagctcagtcggtagagcggctcactcgtaatgagcaggtcgtcagttcgattctgacaagtggctcggatgccctaggctggctggtctgtaatggctgtccggcctagggttttgtatatcttccacacctgtggaaacgcggatatgcacgcgcgagtggcggaattggtagacgcgcaggatttaggttcctgtgtctttgacgtgtgggttcaagtcccatctcgcgcaccggcttgagcctcctggaaacattggatcgccaacgattccgggaggctcttcgtatatgcgtgaggcaattgcaagcccttgcggacgcctctacatatggcaatgccaaggcggcaaatataatggtcacagcattgtgggtctgagcctgtgcgccgtgagcctgtgtgagtcaaggagagaagtgtatgtccgccattcttacgccggttggcctattgctgatcattctcgccggctatctgttcaagcggttcggcctgttcgggcagaaggattatcgcgtgttgcaaaccgcggaattcaacatcgtgctacccggtgccatcgtatactcgttcgccaccaatccgcatgacatctcgctgctgcttatttcggtattcgcattcctgtttgcttttatcccgatcgtgttcatctttctggccacccgcaagcgcaatgtgaccgaccgcgcctttctgatgctcaatggcgccggcttcaatctcggttgtttctctttcccggtcgtccagtcattctggggtgcgggcgcggtggtgccggctgcgatgttcgatatcggcaactgcgtgatggtggccgccggcaccaatgtgctcacccagcaactgctgcatattcggcccggcaaaacacttgccgaacaacacgccggttcggttcccaccttgccgtacgaaaagcccaaggatcgcgacgccaaacggcttgcccgccgcgcattgctgcgcaccatcggcaagagcttcttcggctcggtgccgttcgacacgtatctgctcatgatcgcgttgaccgtcgccaacgtgaagattcccgattggatcgcctctataacccagccgttgagcggtgccaacgcgctggtgtcgatgctgatggtgggcatgctcatggatttgccccagtccaagcatgatgtgaaggaagtcatggccgtcatcgcttggcgtataccgttcagcgtcgccttcgcgttgatctcgtggttcctgctgccgttctcggcttcgattcgcgccgtgatggtgatctgcgcgttggctccaatcgccattttctccacgctgttcaccgacaaagtactcggcaacgccaaactggccggcttctcgctggcaatcaccgcgatgatttcactggtgatgatggcatttgctcacgcgctgatgggcgtgtgagcaaatgcgcgagtaggcacacgacgggcacacgacgggcacacgacgggcacacggtcaggcgagacgcagcccacataggttcgtcccccggccgccagctgctaccggtgcagcagcttgtgcgccagattgctcacgccgaagcggaacttgtccaccggcaacgtgaatttgcctaccatctgctcgacgtagccgttgaagccctgcttgaattccagcacgccgcggccctcgtcgttcggatcgtcgaacacgccggaaatgccgtagaagttgtagcggctcacaccctgttccacacacaggtgcagcatcgcttcgtactgaatcagcgccgaggcgtagaacggcttgtactcctccaacgaaccggaatactgatagaccacctcattggggtgactgacgaacattgaagccgctgccggcagcacatcgcccttcttggcatatccctccacctcagccagacgcttgtcggcggccgcgagattgcgcgattcctcccccagctgacgttcgatgcgcgtggtcggacgttcatcgtatttcgtctgcagctgtgcgaccttggtctgcaaggcctcgcgcttggcggtcatatccgccacatattcggcgatgtggatttccgcgagcatgaaatgcgcatccgcgccatacgcctgcttgaactggcggaaatagtccgcgccgcgcgtcgcgaacccgcggcgttcaccggtccgccgttcgatatcggcgaacacgtcgaactcgtcggggccgatttcgcgaacgtgcacgcccatcgactgcgcccgcttgacgctccattgagcgcgtttgccgaatgatgccagcagttccttgccgttggtgatgccggtgagatccttgacgtacatccactggcagaccacgtcataaccggtatggaatccgccatgcgtccagccggcatcggtgaatccggtcagcagtgcatcgttcggctcgccgtcgggctgcccgtccgaggaatacagacggtaggcgacgttaggccagcatgccacggaaacagcatggtggcgacgggccgattcacgaatcgcctcggttacggcccgcagcagagccggatcatcgctaatgccgatggggccgaaatatacggagccatctgcaccgaaacgaccattgaggtacagaatcacgcagccggctaccagattgccggatgcgtcgcacacgccaacgcattcggcttcatgcccacgaatcttggcaagacggacctgcccggaccattgctgaaagctgccctggcttgtggcttcggaaagccggtcgaactcttcgggcgtaatcacgccaaacgtatacgtcgtatctgttcgattcgcagtcgcgctcatctcgtcgtcacctgtgccttatttctgtgtccgtgctcgccactgtttgtcagcgatgcagcagcttgtgtgcggcttcggatacaccgaagcgcagtccgtccaccggcagcgtgaacttgcccggaagctcttccacgaatccgccgaagcgagtcttgaactgccagacgccgtaggaaggatcgttggcgtcgaaaatgccggaaatgccatagaagttgaagcgctccacgccacgggcgatgcagtcaagcatcgcctcgaagtggattagggaagacgggtagtaatccatgaaacgatcgtcctcgccgctggacaggcagacgacctcgttcggatgccagaagtagacaccggcttccaccggaatgaccggaccgtccgaggcgatgatgccattgacttcgccgatggtcttttccagcgccgcaatcttcttgtctgcggtggcgatgcgcttttccagcgttgccgggtcggaagcacccttcttggccgtgccttccggctgctgttgcgcgcgctggagcaggcgttcgaggttgcgcttgtctttggaggccgcattcagcttggattgcagggtgtccagatattcgtcgaaatgggtttcgaccaccttgaactcgatcaggtcgccgaaggtatcgaacagacgctcatagtaggccagatcgcggctcttgaagccttgacgtgcggcgctcatatcgcacagcttgacgaaagtgctcagttcgccgcgttccagccggcgcacgcgcagaccggaatcctgggcgatgcggatgttcttacggcggtacttggagaacgaggccagcagttccttctcattatgaatgccgtcaagccccttgacgaagttccagcggttcaccacggattcgtagcccacggtgaagccgccatgtttccaaccgaagcgggccatgttgtccatcatcgtggtgtccgggtcgctggtcggcttgccgtccagatcatgcagacggtagactgcggccggccagcaggatacgctgatggcgtgatgggccttggccgaacgacgcaaggcttcggtcatcgcctcaaccacctgtggattgtcataatcgcacagcggtccgcaccagactgagccttccaaaccgaaacgggaccgcgtgtacaccacgtagcaggcggcaatcagcttgtcaccgcgcttgacacccacatagtccaccggaccgttgaacgcacccatggcggccatctgcgaggtctgctggaaactaccttgcacttgagctgcggagaacgcatccagctcggcaggagtgatcttggtaggggtgagcgaggcgacgcctgcatcggattgcgtcataatcgaaccttcttacttgtcgttactctgatcgttactctgggctctggaatggcctgtgtgctgcgtccgtttaccgcgacagcagcttgtgcgcaaattgcttcatggcataggcaaccggtttgaccggcagcacgaactcgcccggaagttcctcgacatatccgttgaagccctgcttgaactccagtacaccacgaccctcgtcatcgggatcatcaaagacgccgtcgatgccgtagaagttgtagcgagacagcccgtgttccacgcagaaatgcagcatcgcttcatgctgaatcagcgcggaggcgtagaagggcttgtactgctcgacgctaccggagaacaggtagatgacctcgcgcggatgctccacgaatagtgatgccgcagccggcagcacatccccgtctttggcgaactcggccgcctcgttcaggcgcttttcggctgccgccagattgcgggtctcctcccccagctgacgttcggttttggtggtggggtgttcggcgtttttggcggtcaatgccgccaccttggccgaaagtgcttcacgcttggccgtcatgtccgctacatattcgtcgatgtggatctcggcaaccataaaatgcgccttgttgccaaacgcttccttgaaacggtggaaatatgcttcgccacggtattcgaagctacgacgttcggcggtttgctgctcgattcgtgcgaatacccccaactcgtcgtccgacagctcacgcacatgcacacccatcgattgggcacgcttcacgctccactgggtgcgcttgtcataggacttcagcagacttttctcatcggtaatgccggtcagatccttgaggtagcgccaacgtggaaccgccgtgtagcccacggtgaaaccgccatgagtgaagccgatcgcctcgagccgttctatcagcttattgtcgggagcgccgttctggtcatccggcaaagaagctccattggtgtcgcgaaaccgatacggggattcaggggtgatttccagctgtgaagcaccctttgccttggcatggcgtttcagcgcatccatgaagaaggtcaatgcttcggtgtcgtgatagtcgcacatcgggccatcatggatggccgcaaatgtagagaatcgagagcggtgagtttcgaacagcgccgccgcgacgatcttctcgccctccttgagggccagatattcgacgtcgatcccctgcgcggcgcgaaggcgtcccatcgccgaggtctgttggaaattgccttgtggatgcctggcggagaaatcatcgaactcttcgtctgtcaacttcaccagcacaaaatcacgcatgcttccctctgcctccgagtcaatcaggctcaccatgctagcataacgcgcacacgacgaatggggtccgagcagatgaggtgtgcacatcgttcgcactattgcctccacaatggctcaaagaacaatggcccgaagatgctgaacgtccggcttgcgttgaatcaaacgcagtgctatattctctacttggctcttggagccacgccaccttagctcagtggtagagcatccccctcgttcgtgggaaggtcggtagttcgattctatcgggtggctcttgttcatcaagaaggccgacgcactaagcgccggccttctttcgtatcgcccttgctaggtcataggcgcttgctagacacttgcccgattcgggaggggctgagttgctgagccgcgactcaactgtggcttagtcgcggctcagtgcagttagacagcctagacgacttagtgcagcagcgcctcgatagcggggaccaaggctttcagcgccttgcctcggtgggaaatcgcattcttctcggccggagtcatttcggcgctggtcagcggctcgccttcatggtcaggctcagtgctgacgcgaccggcaggctggtcgtccgggacgaacagcggatcgtaaccgaaaccgtgttcgccacgagcctcgcggatgatacgacctggcatgtcgccgagttccactgtctccgacttgatggcgtaccgggcatgcaccggggcagggctcccatctgcagccgtggtgtaaacggtgatgccgtcggcagccactccaccggtcacgtcggcactggcctcggtgtccgggaccaccagcgcggcggcgcagcggaagcgcgcggtacgcttgtcatccggaatatcttcgatttgggcgagcagcagcgcattattggccttgtcgtggccgtgagcacccgcccagcgagcagacagaatgcccggagcgttacccatcacatcgacgatgagacctgaatcatccgctacagcgggcagaccggtacggatggccacggcgcgggccttgagcagcgcgttctcctggaaggtgacgccggtttccaccgggtccggcaggtgaaggctgccagcggacaccagttcgatgttttcggcatccgcgccaagatcctcttcgagaatgcggcggatttccacaagcttgccttcgttatgggttgcgacgacgatttgcatgggttctcctttaagaaggctccccttgtcaggggagctggacattgcagaccgtacggcttccagccgacaacctcccctaaaggaaggggagctggcttagtctagggacaaagcggcacgctgggcggcttgcagttccttgttgcccttttcggccaagtcaagcagggtgccgagttcggcacggttgaacggacggtgttctgcggtgccctgaatctcgatgaaggtgccggaaccggtcatggccacgttcatgtcggtcatggcctgactgtcttcaatgtatggcaggtcaagcatcggggtgccgttgatcacacccaccgatacggcggacacatagtccttaagcacgcggctggcggacttgatatggcggtgcttctccgcccaattgactgcgtcgaccaaagccacgtacgcaccggttacggaagccgtgcgagtgccgccatcggcctgaagcacatcgcagtcaagctgaatctgattttcgccgagcgccttcatatcgatgacgccacgcaggcagcggccaatcagtcggctgatttcgtgggtacggccaccgattttgccacgtacggattcacggtcggtgcgttcggcggtggcacgcggcagcatcgagtattcggcggtgacccagccgaggccggagtccttgcgccaacgcggcacaccaggggtaaaagtggcggtgcacatcacgcgcgtgttaccgcattcgatgagcacggagccttcgggggcgtcggtgaagtggcgggtgatgcgcacggggcgcagctcgtcgaccttgcggccgtcggcacgaattatttggtgattgccaagcatgtctttgatttcaaccatgcgccccagcatacgccatccgctctatgcctggatagcaactcgtcaaccatcatcaaaccccagcgcaatgtcattccctgcttacatatccattccatgacacttggctgcacgccactattttcttatgcaccactcgcttacagagtcaatgcctgcgtacctgatgaggattgggaaagatcgtccgctggaataagaatgccatattccatgaaatcttggttgaattgcttgcgctgcatagcgttgagttcgtaatcgattaacggcaaatatgtatagtccatgtcatgcaacggctcttcatatcgatgaagcacgtgcataattgccgcgctcggcagtggggaccaccatccatccaagccataccggtacggaggaaccaatgtcaagcgtctgttccttgggttgatatcccaacgcagaaaacggtataaaccagcgagaaacgcaatccagcacgcatcgttcacccgtgcaaccgctcggacgaacgatatacgttgatgttgaacattccgagcatgaatcagattgacgcagagcatcttcaacgtagaccaggtcgctccgctttctattgcatcgaaatcaggaggcctacgcagttgcgccaacaacatgtgcaattcgtcttccggaatcgtttgcgagggggccacggcttctaggtgaagaccaaaaccagcccgctcaagcccctcggccaaaacatcaaacaacatacctctttgcccacgcaatacgcgaccaattgcagaccgatccaaaccagtacgctgtgcaagctcataggcattccaaccagtctgcgacatcacttcattcagcacagccgcacacgaattaacagggcaaccagataccacaccgtgatgcacgacatcgcactgttctaacgctcgatgctctacagcgcgccgctctgatacgtcatcgttgcccgccgcgttctcatcattgagagtttcactcatcgaagtcaccttgcctcggccgatttcccggccatttcatcaaaccgcaatcatcatatcccacaatcccatgacgatacgattcgtcatatcccacaattcagagacggtatgattcgtatcgcatcagttcacacgattcttcaacgattgctccgcaaacgattgctctgcacgcatcacggcattctatcggcacactattcctcccaatcagcccaacgcaacatcacacgcaacatcacacgcaacacccctcacgcaacacccctcacgcaacacccctcacgcaacacccctcacgcaacactgcgccatctctgtaacatcaccgacaacacggcaatcccacaacgtctcggtgcaatatcctctgaaatggtttggtttttcactccacctcgtcggcatcctgaccaggataggaatatgtgtcgttccgcaccatgtacaaaacgttgtcaactgacaacgttcttcaaatcaattggataagacaaatggccatttcccgccaattcatctgaatcaagacgttgtcaactgacaacaaaatgtacattgcaacagcatgcacatatacatatttccccggtgaacagtaccccccccccaaaaaaaaacaggggggccaccctcagctggaaccacgtccggcgaaccgggacgcagttcagcccgaggggacgcggccaatacagccccgggacacagccacagggggtgcaaacacgggggtgcgaccggggttggatctccccgcctcgacggcgaccacaggagtgcggccaacacagacagaggggcacagacagaggggcacagacagagggaagagtagccaatgtaaccaaagggatgcggccagtgagatacggtcagagaacctgagtctccgtaggaatcactggctcgcccttcatgaggctctgcgcggtgatgggcagttcggacaacgccttggcgtggtagtcgtgagcggccatgatggcgtcatggccctgccactgagcgtcgatctgcccatgatccacaaagtcgaccagcaggttcttccacgtcggttcaggcgtgaaaccggccagcttctcctccgagccggaaatcacgtgttcggcttcggctaacgcgtattcgtaggagcggaatgccagtttgcgaccgggcactgtggccttgtccttggatttcttcatgaccggaaccatcgtgccgtcagcgccttcacgttcggtgagcttgtacaccatcgcacaagtgggagcgccggagccggtgaccagcgtggtgcccacaccataggagtcgaccggcgcggtctgcaatgcggcgagcgcgtactcatccaaatcgttggtcacggtaatggtggtgttcgtggcgcccagggcgtccagctggttgcgcacacgctgggccatggcggctaggtcgccggagtcgatgcgcacgccacccagttcgggaccggccacctcgacggcggttttcacggcttcctcgatgttgtaggtgtccaccagcagcgtggtgttcttgcccaatgcctcgatctgcgattcgaaggcgtcacgctcggaatcatgcaccaacgtgaagcaatgcgcggcggtgccaatggccttcagaccatacagctgggcggccagcagattggcggtacccttgaatccgcccactacggcggctcgagcggcggccacggcggcccactcgttagtgcggcgtccgcccatatccatgcaaggacgatccttggctgccgacgccatacgtgaggcggcggaggccactgcggaatcgtagttcagcacggatagaatcaacgtctccagtagcgtgcattcgccgaacgtgccttcgacctgcaaaatcggggagttcgggaagaacatctcaccttcgcggtaaccgcgaatcgtaccggagaagtggaagttctccagccacttgatggtctcggggcttaccacgtgacggtcggccaggaacttcaggtccgcttcgtccaagtggaaatgttccagcgcatccagaatgcggccggtgccggccaccacgccatagcgacggccttcgggcaggcgacgcgtgaacacctcgaacacgcatttgcggtcggcggtaccgtctttcagagcggcgtcgagcatcgtgtattcatacatgtcggtcatcagagccggcgaataatcgaccattgcaaggcctttcctacataagtggtgaagttgcacctaagtgtagtccgggcaaagccatacagcccactggcgaagcggtagactcgatgcatgagattcatcgtggcgttgtggcgctttgcgatcgccggtttctgcttcgtgggcacatatgaggcatggtccaaaccgcagttctgggtgtatttcacgttccagaccggtttcgtgctgggcatcgtgatgctgtgggccggcgcggccacactgctcaaaggtattcagccgcctgcatggcctaagggatgcctgactgtgtacgccatagtcaccgcactggtggcgttcttcctgatgcctccggacgacccggcatacgtgccacaggttattggcatcatgaccaatacgatgctgcacaaaatcgccccgattatggcggttatcgatttcgtgctattcgacccgcaccggcgtttccgctggcattacatgttctcgtggctggcgtacttccctgcatacttggtcttcgtgctggcccgtgcgacgatttggccggggtccggaccggcggccggcggcagtccgtatccgtacgacttcatcaacctcgacgcactcggctggcaagggttcggcattagctgcggcaagctggccatagcgttcttcgtgatatcgctcgttgtctggctgctcgaccgcgcactgccgagcaaggccttactcggatagacgcgcccacgatcgacgcacatcggtcttagtgcccagccggcatccagctcagcactcgatggcctcagcattcaatggaataggcgcggtttttgtactcgcgccaatccggccagtcttcaccggcgtagagggctgcatatggaactgcgtggccacctgacgaatggtgtaggacatcatgactccttactgcggcgacacgccgaagcgtcgcagccgtttgcattcaagttcacttgaactggaaccttagtatccaagaacacttacgaataccactcgatcggcgtcggtttgcccatcgcagaccagcattcgtaagaacaaaaatgacattgtaaggagactcaatgttcgagccaaccaccacctacgctcccaacccgcaccgttacgacacgatgacctacaaccacgccggcacctccggcctcaagctgccggccgtctcactcggcttctggcacaacttcggcgacatcacgccattcgaccagatgaagtccctggtcttcaccgccttcgacaacggcatcacccacttcgatctggccaacaactatggccccgaacccggccaggccgagaagaactgcggcctgctgctcgccaagtacttcaggcaccaccgcgacgaactcgtcatctccaccaaggccggctacgaaatgtgggccggcccctatggcgacctcggcagccgcaagtacctgctcgccagcctcgaccagtcgctcgaacgcctgggcctggattatgtggacatcttctaccatcaccacccggacccggaaaccccgcttgaggagacgatgggcgcgctggctcaggccgtgaactccggcaaggccctgtacgtgggtctgtccaactacgatggtccgacgatggagaaggccgccgcgattctcgccgacctgcacgtgccgttcatcatcaaccagaacaaatacaacatcctcgaccgcaccgtcgaggagaacggtctgaaggagaccgccttcaagctgggcaagggcctcatcaccttctgcccgctggcacagggcctgctgaccaaccgctatctcaacggcattccggccgacagccgcatggctcacgatccgcgattcctcaacgattccgccctgaccgagaaactgcacaagcaggtcgtggacctgaacaatctggccgccgaacgcggccagacgctggccgagatgagcctggcatggctgctgcacgatggtaaggtgacctccgtgctgaccggagcctccaagcctcagcagattctcgacaacatcggcgcgctgaagaacacccacttcagcgacgaggagctcaagctgatcgacgagatttcggctcggtgaccattttggcttccctcgctgaggggagccaagtaccacctttagcgcgtcatttcttcgtagatgcgcttgcaatcggggcaaaccgggtacttggacggatcgtgcttgggcacccagaccttgccgcacagggcgaccaccggacgaccggtcgcgcgtgattcggcgatacggtccttagaaacataatgtgcgaatcgatccgcgtcgccgccatcgtcacgaaccggagactccttggtttccgggcgttccagcaccgacgtgccggcaccttggtccgggttgcgcagcggttcggcatcatcaacgaacatctcggcaaaagtcatggtgcacttctttcctcgtattcaacgattcgactgcactccatcatagattcccgtcgttacccgcgaaacccattggcgcgtaatccgcacacctccacacacccatgtcgctcatcacgccaccccgccacatacaatgccgcacacgacgccacatacggcaccgcacacactgcctcatacgccgacgcgacaacaatgcacgctcggcagcacgaagcacaccattcgcggtaggctataaggcatgactatcgcagtatgccccggctcgtatgaccccgttaccgccggacacttggatgtaatcgagcgctcggcgcggtttttcgacgaggtgcatgtggtggtggccgtcaacgccgcgaaaacaccgatgttttccgaagccaccagagtcgacgtgatccgccgtgcccttgacaaagccggttgcaagaacgtcactgtttcttccaccgacggcctgatcaccgactactgcaagaaggtcggcgccaccgttatcgtcaagggtctgcgccagaacggcgactatgaagccgagctcggcatggcgctggtcaatcgcaagctcgccggcatcgaaaccctgtttttgccggccgatccgattcttgaacacatctccagttccatcgtcaaggacgtggcccgccatggaggcgacgtgaccggcatggtgcccgattgtgtcgtgccgatgctggccgatgccctggccgaggaacgtcagcggaaggactgatgcactaatgactatgagcgatgaccaccccactggatacgtcgatctgaccaaaccgaatgcggacgccgcatcgtccactccggagccgtccgccccggaaccgcccgcgtctacgcaagccgcgccggcacccaccgaagaggccgatgttctcgccggatcgccgcccgccgcgcctacccctactccggcacagatgcaggccaaagcgcaggcccaagcagctcagcagacccgggcacaagctcggaccgctcaggccgccggcactcgcccctcgttcatgaacgaaatgcccgacctgcgagaaaccacggacgacgacccggccacggtcaagagccgcgaggaattcaccacggtgtatgacatcatcgaccagctcgaggcggcactgggcgaagcgaagtccagcatattcgcccccggcatggtgaaggttgaccgcgacgaattcaccgaccagctttccgagttgaagaaaatgctgccggtgcagttggagcgcgcctccgccctcatgcgcgaggccgagcgccgtctggaatcggcacagacccagtccaacgccatcgtcgcctccgcacaaagccgcgcagccgacatgatcaaggacgccaacgaacaggcacagttcctggccggccaagagaacgtcaccgagcttgcacggcagaaagcgcgcgcgattcttgaccaggcacagaccagagccgaccatctgacccaaggcgcggaccagtactgcactacggtgatgaaagggctgtcccagcagctcggcaaactcagtcgggatgtgcaggccggtcttaacgtgctggaagagcgccagcgtgcggccggcgaacagatgccgcacctgacgctgaacgactatcccgaagcccagtaacgccagcagcaccagcaacatcagtaacgcgaataacgccagtaacgaataactccagccaacatacgaaaggcaccaagaacataccatggcacgagttgaagattccccgtgggccattccggtagcgcagattgcttcgcgcgccggtcaatccaagccgattgacgccgatttcccggccccttccggcattggcgacagcatcgtcggcatcaaggatggtgagcccgtacatgtgagcgggcagttcgattcgattgtggacggcctgatcttcaccggccgcctggtcgcgccattcgtcagcgagtgcacgcgctgcctgaagccgattgacgaggactggccggttgatgtgacggtgttcttcccgtatgagtcgggtcaggacaaggccaacggcaagggcggcaagaacaagaaggacgacgagatcgacatcatcgccggcgaggacgagtcggaagacacgtatccgctgctggagaacggcgcattcgcggacatcgaggcgatgattcgcgacacgctggtcgaatcgctgccgttgcagccactgtgccgaccggattgcaagggtctgtgctcgcagtgcggtgccgatctgaacgaggatcccgaccatcatcacgatgtgacggatatccgttttgccggattggcggggctcaaagcccagctcgaggccgagcagaacggcgagcaggccgagtgacgcgcgcctgaacggagtttgtacgagccgtgcgttaagataacggacgcttaagctcaattgttcgaacgaaatagaggatactcaaatggcactgcctaagtacaagacctcgcgcgccaacacgcactcgcgtcgcgcgaactggaaggccaccgctgctgcgaccgtgaactgcccgaactgtggcgctccggccctgccgcacatggcttgcccgagctgcggtaactaccgcggccgcacctaccgctccgccatccagccggctcacaccaagtgagtcctgcgataacggcttgaatgaaggccctgccatcgacgggtggcggggtcttcgcataagtgcaccattacgtacaccatcgcatcgcaaacaacacaacacacaacacatcaccatcgcgtgaaggaccatacaacaatcatgagcaatgaaaccccacagcagccgacgccggccaacgagcttcttgaagcgttgggcaccactctcagcccggatctgctcgtgcaggcactcacccaccgctccttctcgcatgagcaccccggcgtggccaattacgaacgcctcgaattcctgggagacgcggtgctcgaactggtctccactgaaacgctgttcaccattcacccggatatgaccgaggggcaactggccaagatgcgcgccaaggccgtctccgaagacgcgctgagcgccatcgccaaaaccaagctcaaggtgggcccctacattctgctgggtcacggggaaaccgagcagggcggcgcggagaagaactccattctgtgcgacatcgtggaatcgctcatcggcgcgaccttcctggaacacggcatcgacgaggcacgcaaggtgattcaccggcttattgacgacacgctcgccgaagtggccaccgagggcccggcacttgactggaagacctcgctgaccgtcaaggcgcacggcctcggcaaggatgagccggtctaccatatggaggtctccggcccggagtacgcgcagatcttcaccgcgcgcgtctcattgggcgagaacggcgacatcatcggcatcggtaagggctccagcaagcgtaaggcgcagctggcggccgccgaagcgggctggaagtcactggactcgctcaagacgcggactaagtaagcccgctgtcagatttgcgaatagactgataccaacatgagcgacgagtcgtgccggggccacaagtctcggggaagcgactggaatcagacacgcgggcacccggccccatcccaaggtcgggcaggttcgcggcaaaatctatgaggtgagaggaatcatggctttacccacgcctttgcaggcattcagcggcgtgccgaaaatcaacgcggcccccgataagcagaccatcgtcgatggcgagaagatgactggcgcccaagcgctggtgcgttcgctggaggatctcggcgtcgaggacgtcttcggcattcctggcggcgcgattctgcccgtctaccacgagatcaaagacaacacgaagttccgcttcgtgcttatgcgccacgagcaggccgccggccacgccgccgaaggctacgcactggccactggcaaggtgggcgtgtgcatcgtgacttccggaccgggtgccacgaacgtggtcacggccattgcggacgcgaatatggactccgtgcccatggtcgtgattaccggtcaggtgggcgtgcaggccatcggcactgacgccttccaggaggcggatatcgtgggcatcacctacccggtgtccaagcactccttcctcgtgacccgcgcgcaggacattcctcgcgtgctttccgaggcgtactacatcgccaacaccggccgccccggcccggtggtcgtggatctgaccaagaccgcacagaccggcgacatgtactactcatggccgcagcgcatgattctgcccggctacaaccccaccaccaaggcgcacggccgtgtgctgtccgacgcggcgaagctgttctctcagtcgtaccgcccggtgctgtatgtgggtggcggcgccgcccgctccaacgccggcgcacaggtcaaggctctggccgacctgaccggcgcccccgtggtcacgaccctgcccgcacgcggtatcattcccgactccgacccgaagaacctcggcatgctgggcatgcacggtacgattgccgcaaccggtgccgtgcagcgcgctgacctgcttgtggccatcggtgcacgtttcgacgaccgcgtgaccggcaagctcgacgccttcgcaccgaccgcccgcgtgattcatattgacatcgacccggctgaaatcggcaagaaccgtcagcccgacgtgccgatcgtgggcgatgcggctaccgtgctcgacgacttgattcccgaaatccagcgcacgcaggccattcagggcaagccgaatctggccccctggtggaaggcgatcgacggctggcgcgaggaatacccgatgacgtgggatgagccgaccgacggatcaatggccccgcagtgggtcatcaaaaagctctctgagatggccgatccgtccaccatctgggtgaccggtgtgggacagcaccagatgtgggcttcgcagttcatcgatttcgagaaccagcacgcttggatctcctccggaggcctcggcacgatgggctacggtctgccagccgccatcggcgcatccgtgggctcggcccgcgagttcgagggcaagaagccggtgtggctgatcgatggtgacggttccttccagatgacctctgaggagctggccgccgcgttcctggaccacgctccggtgaagatcgcgattctgaacaactccgtgtacggcatggtccgtcagtggcagacgctgttctacgagcaccactactcgcagaccaacctgctcgatggcgaggcgcacggtgccgatggtgcggcggcactggtcgacggcgatgcgccgctcgaagtgcctgatttcatcaagttggccgaggcatacggctgcgtgggtatccgcgcgttcaccgaggaagaggcgattgccgccatcgaaaaggcgaaccagatcaacgaccgcccggtactgattgatttccgcgtgtggaaggatgcgatggtgtggccgatggtagccgccggcgcttccaacgacgaggtgacgtacaagcccggcatcaagccgctgaccggcggcaccccggctccgggaaccggtccggacgagcatgcgaccggcgtgttcgagcacgagaccgccgctgccgctgcgagcgagcactgaggagaggagaacactcatggctaactatcctgcatcccagcctggttcccagcgtcatacgctgtccgtgctggtggagaaccgcccaggcgtgctggcgcgtatcgccggcctgttcgcccgtcgtgcgttcaacatcaactcactgtccgtctcccccaccgagcgtccggacatctcacgcgtcacggtgaccgccgacgtggaggccgtgccactggagcagatcatcaagcagctcaacaagctgctgcacgtgctgaagatcgtggagctcgacccgaactccaccgtggaacgcgaactggtgctcatcaaggtggccgccgacgaatccaaccgttccgacgtgctggagatcgtgcgcctcttccgcgtgcgtgtggtggacgtgaatccggaatcgctgaccattgaggccaccggtgccgaaggtaagatcgatgcgctgctggggcttttggagcattacggtgtgattgagctggtgcgctccggtgccgtagccgtgacccgcggcccgcgcgccctgagcgaaaaggtcgtcggttccgaggttaccgggcgctgattcggcgactgcggggagacccagtccaagctcaaagggcggatgtgcatgatgcatatccgcctttttcatgcgtgcatacctcatcacccgtgctgcaagcaaaatgacagcaccttatgctagcattatgacagcaacaaggaggtgcatcatggcaacattgaccatccgaaaaatacccgatgagcagattcaacagctcaaagaagtggctgagaaaaacaaccgctccatggaatctcaggtgcgatccattcttgaagaatggctgaccggcacggtggcgcatgaaatcacacgaaagaccaatttctacgacgagatccgcgaattcatgaagaacatggattttgagggactcgacaagggggaactcccactatccgagcgaaattccgccgattcccgaccgccagtatcttttgaataggaatcggccatgattattctggacaccaacgtcatcagcgaaatcatcaagaaacagccagacgaacacgttgccaattggctgaggaaccaagatacaagcaatctggcaaccaccgccatcaccgtcgccgagttgttggtcggaatatgtcgtatgcctgaaggcaaacgacgaaagtacacagatacgaccgtcaagctggcgcttatgacattagaggacaggacgttcgcatttgacacccaggcagctgcggattatgcccatatccttgtcgaacgcgaacgcaggggcacacctaccagtattcaagacgccatgattgcggcaattgcctgttcctgggatgcggccatagccacgcgcaatatcaaggacttcgaaggtaccgacgtggaattgattaatccgtgggagtttgcatagcggtaggccccggcaaactaccgaggccttgtgaacgttacggtttctcccgctactccaattgttcggagagttcgagccattcggcttcgagattatcgctttcagtattgacggcggtgagttgttcattgagcttgttgagaccctcgtagtcgctcgggtcatgggcggccatctgtgcctcaagttcggtcttccgctcttccagtttggcaagcttgcgctcgatggcattcacgcgcttggatgcctcgtggaaggccttgccggtgagcttcgaggtggagtcctcaccgttattggctccctctgacgagggagctgtccgcgaagtggactgagggagagatgcagcaacattgacggcggccgccttacccctaccagacttcgccgagctgctaccggtgcccgcgaagccaggcgtgtcagccggcaatcccttgccgttcttaatagcctcaaccatatcgaggtaatcctgcacaccaccgggcagatggcgtaccttgccgccaatcagcgcgaactgctgatcggtgacgcgctccagcaggtaccggtcgtgggatacgacgatcaacgtacccggccaagtatcgagcaaatcctccatgacggcgagcatatcagtgtccagatcgttgccgggctcgtccatgatgagcacgttcggctcgtcgagcaggatgagcagcaactgcatgcggcgcttctgtccgccggagaggtcgcgaatcggcgtcatcaactgggcggattcaaagccgagacgctccatcaactgtcccggcgttacttccttgccatccacaatgtagctcggcttatagcgggaaagcacttccttgatcttgtactggcccagtttctccagctcatcaagacgctgcgagagtacggcgaacttcacggttttgccgatgttcacatggcccacggtcggagtaatcgaaccgtcaatcaacttcagcaatgtggacttgccggcaccgttcgcaccgacgatgccgaaacgatcgccggggccaatcagccaagtcacatcgtcaagaatctcgcggccggaaaccgtcaccttgcgtgcagccgaggtgacaccggctgcagcagtgccatcatccgaatccgttgcagcagtgtcaccgccgatggtttcaccacccgtgttcatgcgacgaacctcgcgatcgtcagcaagctgcggattgccactctcagcctcggccttcttacgcgcttcctcagcggcctcgacggcttccggcacgccggcgtccaccaggcgcaggtcagtcatgtcggtgaccgccacctcaacggaaccgtgcagctgcggctcggcgtacatggcgttgaccacatccacgcgggaagcggacgcggagagcgccgccacatccgggtcgatatcggccatgccctgcggtttttcgaaaatctgcgtcacgtcgaccaaatcgaccacctgtttgccgaggcgtgaggtggccatttgcttcagttcaagtgtgttacgcatcggcggcacatcggcaatcaattcgcgtgcggccttgacgtggaacttctgcttggtggaacgggcacgggcaccgcgggaaagccatgcgagctccttgcgggccagattgcggcgcttcgtttcacgcacatcagcctggcggtcgcgttcgacgcgctgcagcatatatgcggaatagccgccctcgaacggctcgatcacgccatcgtggacttcccacatcgattcgcagacctcgtccaagaaccagcgatcgtgggtcacgagcaacagagcgccctggcctttggaccagcggttcttcagatgttcggcgagccagtggatggtgaccacatcaaggtggttagtgggctcgtcaagcgcgagaatatcccaatccttgagcagaagccgggccaaatcggcgcggcgacgctggccgccggacaaggagccgaccttggcatccagactcatgccgccgagcaatgcctcgacgacttcacgggaggtgttgtcggacgcccattcgtagtcggcgcggccctcaagtgcggcttcgcgaatggtggcgttgtcgtcgagcggatcgcgctggtcaagcatgccgaacgtgagtccgccgcgcttcgtcacgcggccggaatccggctcctgggtgccgcggaagaggtgcagcaacgtggatttgccgtcgccgttcttgccgacgatgccgatgcggtcgccctcgaaaacaccttgcgtcacatcggtgaagatggttttggtggcgaaggcaagcgaaacgtgttccagtccaatgtcataagtcggcatgactcaccaatgtagcgccacgcttgcccagcggcggcccacaaacgttatttgttcagcgtctgagcgtaggagttgcagcgggccgcaaaaccggagaacacttgctcggcgagcggatgcagtagctgatcgtattgggcgaactgctcgcgcaattgggacttggacccacccgcggccttgagatccttgaccatgctcggctcatccagccattcgtccagcagcgagccgcacacctcaagatggaactgcatgcccagcgcggatcccagtcggaacgcctgcaccttggtggaagacgaacgtgccagcagctggcctccctcgggcaagcccaccacgtcgttatgccagtgcagcaccgtcagctgcttatcccacatggagaagaagtcatgcttgtccacacgcttgatcggcgcgaacccaatctccggcgcatcgcccttacgcagctgcgcaccaagcgcagtggcgataatctgatgccccaggcatacaccgagaatcggcttgcctgaagccacggcggcacgcgccaacttggcttccgccttcagccccggatacttgtcgtaatcaagcgcgcccataggcccacccatgattaccacgccagccagttcgccgaaatcaggcaagtccggtttctttttgtcgacgatattcatcgtcaccgtctcaagaccgatgtcctcgaggttcgacaatatgcgtcccggacgttcccatgggacatgttgcaaaatgagcacttgtggtgtggccatgacttctattgtggcacgagcgttccccgtttgcgtaacgagcagggcaaatccatgaatctcgcagtttccgcagcggtcaaagacgtgttctcgcgagactgttgtcccgcttctcatccgtctgtcacctcgttcgggccccgcctgtgaagcgttcatcaagctctttgagtaacgattcagcatgtctggttcggaccctacgcttgagcgttatgggaaacagccaagaaccgcaggatttcaacatttccgtcatgccttcaagcctgacgccggtgcatgtcgccaaggccgcagaaggcctgaatctgtatgacaccgcctcgcaccaggtcagccatttcgtgccgctcaagccgggcgaggtcggcatttatgtgtgtggcgccaccgtgcagtcgtcaccgcatatcggccatatccgtgccgccgtggcgttcgacatcgtgcgccgctggtttttgaagctcggctacaaagtcacttttgtgcgtaatgtgaccgatatcgacgacaagattctcgataaggccgcggccgccggccagcgttggtgggcccgcgcctattattacgagcgcgaattcaccgaggcgtacaacacgctcggcgtgctgccgcccaccgtggaacctcgcgccaccggccacatgtcggacatgatcgacctgattcagcgcattctcgacaacggccacggctatgtggtcacggatgcggacggcaagcccaccggcaacgtgtacttcgatgtggcatcctggccgcattacggcgaactcacccaccagaagcagacttccgaagtcgatgaggccgctgccgtggccgaccgcatgggcccgtccgtggacgccaccggtgccgacaagtacaatccggtcgacccggccgacgtctcccccgacaagcacgacccgcgtgatttcgccctgtggaaggcccccaaggacaccgatcccgaggacgcccgttggtcgacgccgttcggcgtgggtcgccctggctggcacatcgaatgctccgccatgtcccaccggtatctgggcgatggcttcgacattcacggcggcggtttggatctgcgcttcccccaccacgaaaacgagatggcgcagacctgcgcggccggctacccctctgctgcgcgctggatgcattcggcatgggtgaccgccaagggcgagaagatgtcgaagtcgctgggcaccggcctgtccgtgccgagcgtgctggccgagcattccgcttgggtggtgcgttacgctttgggctccgtgcagtaccggtcgatgctcgaatggtccgatcaggcgttggtcgaggcgcaggccgcatacgaccgtatctcgaacttcatcgagcgcgccggtgtggcactgggcggtcagccttctcgcgaggaggttgctgccgtctccgccgacgatttgcccgccgatttcgtggccgccatgaatgacgacgtcaatgtgtctggtgcaaccgccgcgatcttcaccgccatccgttccggcaatacgttgctttcacagctggctgaccgcgccgattccgaaaccgccaaggccgaggtgcgtgaggcgctgctcgccgtgcgtgccatgctcgacaccttgggtctcgacccgctggccgagccgtgggtgtctgctggcggtgccactgatggcacggccgagtcgcccgaacatgcggcgctggaggcactgattgccgagcagctcaacgcccgcgccgaggcccgcaaggccaaggacttcgccaaggccgaccagattcgcgacgccctgaccgaggccggcatcgccatcgaagacggcccgcagggttccacttggagcctgaagtagccgcttcaaacccatcaatcagtcaaacacgaagtccacgtccacgatgtgcaggcgcttggtgagctccttctccagcgagcgcttgcattcgatgaggtcagctacatcaatggtttcgccgatgccgctcagatacacgtcaacggtgtagttcatgccggtcttgaagatcagcgtctgctcgtagtcggtgttggcaggcagatggcgctgtgcctcggcctccacgtaggcgttggtttcatcgtcgtcatgcacgccgccgaccaattccacgaacgcctctttgagcacgctgaacggctccttgatggtcaatgccaccaaagccacggtgatgaagaaatcgccggtgtagtgcaggaagtcaagcggaccgccggtcggtagcagcatcaggaagatggcaaccacgccgatgccgaacgacatcgatccgtcgaccaacgtgctcttgcactcggcggtgagcatggtgctggaatcgccgatggagcggttggaacgccggtaatacgtgtataggctgaagcacacgattacggtcaggatctcgtagatgaccaccgggccggtttcaatgcgttcgccggacccgaacacgaagtagtcgtacgctactcggcacacgtcaatcagcgaatacaccaacaacgacatggtgaaaatggccttgcagatcgcgtagatgggttccagtgcgaacatgccattggggaagcgctcggtggttcgcaccgtgcgcgacgagagatacaccgccaccattccggacaggacggaaatcgcggtgaaggagaagtcgaggaacatggccttgaggccggtcatgaagaacacggccatgccggctaagacctgcagcacgttgatgacgataccaacgatcagggctttgcgttcgagtagtttttgggtgggcatcagtgggccttccttattgcacggcatgtctgcgttggcccgaacgtcatggttcggagcgcacggcagtctgcgtataagcggtgtccagcgattttcaaaacagcgtaagcattccaaaaaacacaggattctttacggtttccatggtatcggaagcatccgattggcttcgccacgagcggacggcacggcatttgccgtctgaatgcccaacatccctgactactacgcgacgcattccccggaaagcgtcgtccccaacaccgcaatttcccgcgtggcggctagactgttgcccattatggcagctttttcatctttgacagacagactctcgaatgcgttcaagcatctcaagagcaagggcaagctttccgaggcggatatcgacggtacgatccgtgaaatccgccgcgcgctgctcgacgccgacgtggcgctcgacgtggtgcgttccttcaccggcaaggtgcgtgagcgcgcactgggaaccgaggtgtccgacgcgctcaaccccgcccagcaggtggtgaagatcgtcaacgaggagctcaccgacgtgctcggccaaggggtcgatcgtccgctgaacttcgcaaagaacccgccgacgatcatcatgctcgccggccttcagggtgccggtaagaccacgctggccggcaagctcggctactggctcaaggattccggccacacgccgctgctggtggcggccgatttgcagcgtccgaacgcggtgacgcagctgcaggtggtcggcgaacgcgccggcgtgcccgtctatgctcccgaaaagggcgtccaatccgatggcggcgaggccgtcgcagctccgggccagacctccggcgacccggtgaaggtggcccgcgattccatcgaactcgccaggcagaagctctacgacacggtgatcatcgataccgccggtcgtctgggcgtggacgaggagctgatgaagcaggctcgcgacattcgcgatgccgtgcaccccaacgaaatcctgttcgtcatcgacgcgatgatcggccaggacgccgtcaagaccgccaaggcctttgacgagggcgtggacttcaccggcgtggtgctctccaagctcgatggcgacgcccgcggtggtgccgcgctgtccgtggcgtccgtgaccggcaagccgatcctgttcgcctccaacggtgagggcctgaaggatttcgaggtcttccacccggaccgcatggcctcgcgcatcctcgacatgggcgacatcatgacgctcatcgagcaggcgcagaagcagttcgatgaggaagaggcccgcaaggccgccgagaaaatctccgaaggctccttcggcctggacgacttcctcgatcagctgcagcaggtacgcaagctgggctcgatgaagtcgctgctcggcatgattccgggcatggcccagcaccgcaaggaactcgagcagttcgatgagaaggaaatcgaccgcaccgaggcgatcattcgctcgatgaccccggccgagcgtcgcgatccgtcgattatcaatggttcccgccgcgcccgtatcgcctatggttccggcgtgacggtttctcaggtgaacgctttgctgcagcgtttcgagc

SEQ ID NO: 2294 - DNA, 72061 bp, Unknown
  R119_18m  MAG No. k141_18620
ccggagcgggggtcaccggagtagacggcgtaccgccctggttaccggtatccacccggttggcggcgtcctgctgttccttctggtactgacgattgtaggaatcgacctgggaagcgatcagtacggtctgggccgcctgcttggcggattgggaatccagactgtcgatcatggaagacagttcgtcacgccttgtttcgccctcctggcgtagcttgtccaaagcgtcacgttcgctttgcgcggtttcggcggcggtctgtgcggaagcggccttctcatcggactgggtcttgagcacagcgatctgcttttcgatggccgccagacgttcgccacggttcttcgacgtgctcagtgaggtcgcggcggaggaagccgcattcgcctcgttgcgggacaacgcgtcccgggactgcatggagttgacgaagtcctgtgtgctggtggcacccgtcaccacgctcatcacgtcggaagcattcgagccgtgcatctcgtcacgggccagctgggccacggcggcgtgcgcgtcatcgtagtccttgccggtctgcttgatccgctcctcgagcgtctccttgtctttctgcgcggcggaaagacgtttggatgcggcgtcggcctcgtcctgagcggtggcggcatcctcgttggcctgcgtgaccttggcctgcgcggcgacaatcttgttgttggtcagatcgtccagctcaagtaccttattcgccaggtcctggctggcaccggccagctgctgcttgagttcggcctcgcgctgtaccgacgcggcgtgctggttctgcgcattgatcaggtcggaataggtgtctgcctgggcaggctgtgccgagctgaacgccagacctcccacacaggctgcggcggccaccagtgccgccagtgcgggcttgatcacacgtacgttcgtcatatgtgaatagtcctttcgctcacttaagccaataccataacatgcgaacctgagaggcttgcacacgatgtcatcacatttctcgcgggtaagccggtcgcgttacgccctcaaataacgccgcaacgagatggttgaagcgatgatggacagcagtatcgcgcccacaaccaggaacggcgatatcaccagtaccgtgagctgattcacataaggaatccatgtaacggatttcgccagccagccggtgacgaacacgttgacgatagccgaaagcatcaggcacgagagcaccgagccgatcagcgaggcgatggtgccctccagaatgaacggcagacgaatcgtccagttcgaggcacccacgtacctcatgatttcggtttcggttcgtctggatgcggcggacatacgaatggtggttccggtcagcaggatggcgaccaccaccatcacgccggcgagcacggccgtaaccgccgtggctcggttgagcacggcgaacaccgggtcgaagatctggcgctgatcggtaacgtcttccacaccctccttgccagagagcacttcggagaccacctgatatttggtggggtccttgagcttgagccagagggagtcctgcatatcgtccgcggtcagcgtacggccttggaattcaccgttcgggtactgcttggtgaaggtgttgtcgtagaaatcctgcttgctgacatagtcgatgttggagaccacgtcgttgagttcatcgcgaatggttttctgcagtgccgtgatctcattggctgagggcgatttgccggaagcacagttcgcggactggctggtgccgtcgggacatagccacaccacgacctcgaccttgtcgtaccagtcgcccttggctttggtgatctgcgcctgagtaagcaccgaagcgccgatgaacaggaatgagatgaaggtgaccagcgtcagcgacagcagcatcgacaggttacgggtgaggttggcccacgtttcggacagaatgaatcgtgctcgcatgatgatcccccttactccttcgcgccctcagcgggttgatcgtcggatgtttggtctgcggcggactgctcgtcggcggactgctcgttggccggcggtgcgggcggttccggcggtgcgggcggctccggcggggccggcggctcggcggcggatgacacggacgtatcggcaaccgcggcggtcgcggcggactcgtccttgaacgggtcgaacgcctgggtgctttccagggcggcggcctgctcatccaacgaaatgcccttgccccaggtcagcgtgtcttccagcggcgcaaacgtctcgccatagcggccggtgcggccggaatgcacggaattggccaaacgggcgatgccttcagacggctcgtcactgccctcgatggccttggtcgccgccgccagcacatgatgggcggtgtcggacttggcttcgacttcggcatccgggaagaacagggcggaatcgtaggagccatgagcctcgtcacgcacgatcttgccgttgtgcagttcgaccacgcgcttgcgcatcgagttgacgatctcttcgttatgcgtggccatgacgatggtggtgccggtgcggttgatggcgtccagcacttccatgatgcccagcgaagtggtcgggtcgaggttgccggtgggctcgtcggccagcagaatctgcgggtgattcacgtaggcgcgggcgatggccacacgctgctgctcgccaccggagagctcatgcggatagttcttttccttgccggtgagtcccacggtattcagcaccttgggcaccaacgatttgatggtggaccgccgcgtgccgatcacctcaagggcgaacgccacgttctcccatacggttttgttattgagcagcttgtaatcctggaacacgaagcccagcgaacggcggtactgcggcacttgacggttggtgatgcgccgcagatcgttgccggccacgcgaatctcgccgctggtggcctcctcctcgcgcaacagcaggctcaagagcgtggtcttgccggagccggacgcacccacaaggaacacgaaatcaccgcgttcgatatcgaggttgatgtcgtcaagcgccggtcgggtgcctttgggatagatcttggacacattgtccagtgagatcagtgccataatgctgtttactcctcggtttcggcggcgcggcgctgttcatggcgccagcggatgccggcctcgatgaacgcgttgatgtcgccgtcgaacacggcctgagtctggctggtttcgtagccggtgcgcaggtccttgaccatctggtaggggtgcagcacgtaggagcgcatctgatcgccccagctggccttgatgtcgccggcgagctccttcttcttcttggcctcctcctcgtggcgcagcacgagcagtcgggactggagcacggccatggcggaggcacggttctgaatctgcgaacgctcatcctgcatggtcaccacgatgccggtgggaaggtgggtgatgcgcacggccgagtacgtggtgttcacgccctggccgccggggccggaggaacagtaggtgtccacgcggatgtccgtatccggaatgtcgatatggtcggtggcctcgaccagcggcaccacttccacggcggcgaagctggtctggcggcggccctggttgtcgaacggggagatacgtaccagacggtgggtgccgccctccacggacagacggccgtaagcgtagggggcgtccacctggaaggtggcggacttgatgccggcctcttcggcgtaggaggtgtccatgaccttggccttgaagccgttacgctcgcagtagcgcaggtacatgcgcaacagcatctgcgcgaagtcggccgcgtcgacgccgccggcaccggagcggatggtcaccacggcggaacgttcgtcgtattcgccatcgagcagggtctgaatctccatctggtcgagatccttctgaatctcgccgatttcgctttgcgcctcgtccagagagtcctggtcgccctcctcgtggccgagttcaacgagcgtttccacatcgtcgatgcgctgggaggcggagttcagacgcttcagctgcgattccgcggcggacagccggctggtgatcttctgggcgttttccggatcatcccacaggcccggggccgcggcctgcgtttcgagatccttgatatcggccttgagccggtcgacgtccagcgccttggcgatggattcgtatttggcgcgggcttcgccgatcgcctgggtaaagtcaaattctgccatcgtggtttaccttactgttgattctttgagattctttgggaagtcacgtccttgttgacagccttcgcacattcctctggcgttggcgggcattgccgcgccacacacgcatccgcctgcaatccatgctgccagaaggttccgggcctgccttgccgatagccggccgggcgacctcacaaatccctcgcatcagacgtgttcaactgcgggcacgaatatgcgaaggcaacgtcaaagccccgcgtaaatcgccgggatgatcagggagccgagcatggccacagctatgacgacacacaccacacgcacgatggtgcggcggcggttctcacgctgctgtcggccgtcctgatagttactcacgagaccaatagtgtactcaccgcttacgaccgcaggacttgccgccgacgccagccctgccggcgggcccccacggccctttcctttgcgctttcagcgccgccagatggtgtttcatggccaccagcatgatgtgcgaatcctcaaggcccaagtggcgttcgttgtgggcggaatcaagcgcgccctgacgtttggcgtaggcgtcgagcgtgttgtctccgtaaggatgctcgttggtgggtaccgcgccggggtcccactgccggctcatcggcagggtatcgatgatggtgatgcgcccggcacggtagctttccgcgtatccggcgacgttcagcatgaaccagctatgttcgaaggtggcgttatgcgccacgtacggctgctgggtaagccgcgcgagcaggccggcctgggcttggggccattcgtcgaagagtcggtacccggcctcgctgctgcggccgcgtacatcgatgccggtgagtttggcgatgagggcgttgccgagcgccgcgttttccggcggcacgccaaaagcgagacgggactggccgtaggcgtcgccggcggcgtaatagccctgctcataggcgtatgtctcaggttcgccggccgggcgcggactggccatgttcatgaactcgaagccgacgtcgatgatgtagtcacgcgccggatcgatgccggtggtttcgatgtcgatgcccatcaccgcgtccacgtcgcggccgggcagataggcgtcgcgccagtcgggcttgggatggtggccggtagcgttgccagacgaggcggcaccacccggcgaagtcgcgccggagagattggcgcgggccatcgccgcatcgcccgcacgcttctggaagcgctgggccttacgtcgttcggcgcgtgcgtcaagaatcgccgccgtacggtcttggatatcgtccaaggcgactgttgtggggaacttgacatcgctgttttcggcagcagtgtttccggcagatgcgtcaccggtttcaccgctcagattcagcatgccttggtcatcgttcgatgggcggctgccggagtacggcctgagcacggcaacggtagtcctcccccgccgttcgcgactgaccacccataggtgttgctgttcgcccagatgcaacagcgtgttgatgttgtcgttgagccgacgattggcgtaggcgagcgcgcgaggcagacgataggagccgatgaatcgatcgtaatcggtcatgaatgtgctgttgcattgggcgatgattgattccagatgctcgcgtgtggcgtaatcgatcttcaatgcgtcgtggatagcttgtggcgtcagttccggttggtccaacccgagctgaggctgtgctgcggtttcgccatattgctcaccatctgcagcaagcgccagcaatacgctgatgccatgcatcaggtccagcgaacgcacccagtcccagtcaatggtggtgccgtcggcgtctttgggcatggacgccgcccattggggaatgtctcccttggcggcgtccagccatgtgcggtcgatcatagtgcgaagccgagttcttcggcggcctcggtgggtaccgggtcgtcgcaccaataatcctcgaggttttcggtggtggtcagcgaacggatttcggcgcgatcgatatacagttcgccgctcaaatgatcggtctcgtgctggaagatgcgtgcgggccagccgtgcaacggctcgctgtggtgcttgccgtcttcatcatcccattcggcggtgatgtcgagccaacgcttgcgcacggcctggtatccgtcgaagctcaggcagccttcgtagaacgaggcggttttgtcgctggtgggtttgtagctcggattgatgatcacgtggaaggggaattccgcgatttcgcgcggatcatcctcgtcgtcgcgcacgtggtcttcgaccacggcgagcgcgagccccaagccgatctgggtggcggcgagccccacgccgggcgcctccagcatggtggtgtgcatcgtatcgatgagtttggcgagcgtacgcttggaaagctggccatggtaggccaccgtccgttggcgcaacaccggttcgccggcctgcacgatgggcaggagcttctccttgccgccggttttgatgagttgttcgacatcacggttgagttcgaggtcgactttggcgttctttccaaacattgcttttccttagggaagggtgctacagcgcgagttcttcggcgacgatcttggcgaggcgggtgcagacttcgtcggcgtaggcctgggtggcggcttcggccatcacgcgtacgagcggttcggtgccggaggggcgcagcaacacacggccggtgtctcccagcagttcctcctcgcgggccacggcatcctggatgcgcttgttggtggcggcggctttcttgtccacgttcggcacgttgatgagggtctgcggcagctgcgggaagtcggcggcgagctccttcaggctcttgccggacttgacgacctcgttgcacagggtcagtgcggtcagggtgccgtcgccggtggtggcgaattcgcggttgatcacgtggccggactgctcgccgccaagcgagtaatcgcccttgagcatttcctcaagcacgtaacgatcgcccacggcggtttccacggtcttgatgcccatgtctttcagggcgagcttcagaccgaggttgctcatcacggtgaccacgagggtgtcgtggttgagcttgccttcgcgctgcttggcacgggccagaatgcccatgatctggtcgccgttgatcatgttgccgtcttcgtccacggcgaggcaacggtcggcgtcgccgtcgaaggccacgcccatcacggcatcggtggccttgaccatggcctgcagctgctcggggtgggtggaaccggcgttcttgttgatgttgtagccgtccggcgaggcgttgatcacgattacatccgcaccggcacggcgcagggcttcgggagccaccacggaagtggcgccgttggcgcagtcggccacgatcttcaggcccttgagcggcttgggctgggttttgtcatcgttcagcggagcgatggtggccaccagatgatcgatgtacaggttggtggcggtggtctggtcgtggctcacgcggcccacgccggcaccggtcgggcggtcccagtcctggccgagcacggcctcgatgtcgtcttccttctggtcgggcagcttgaagccgccgcgtgcgaagaacttgatgccgttgtcgggcatcgggttgtgggaggcggagatcacggcacccatttcgacgttgagcacggaggtcaggtaggccacgccaggagtggggatgatgccggcatcgatcacgtcgaagccgccggcggccatgcccgcggacagggcggaagccagaaaatcaccggacacacgggtgtcacggcccacgagcgcgcggcggcgtccctcaggctgatcgtcttgggtgccggcgtcgccgagcacacgcacggcggcatcgcccaaatccaacgccagacgtgcggtcaaatccctattggccagtcctcgaacaccatcggttccaaacatcttcggcatatgaagttccactccttgtatcgcgttacccgcaccatcgtagtcgttgtgctccaccctaggacccgactcggcaaaaaacgccacggaatctgctctaggaccagacaatggcattcccgatacccgcaatgtgtgagagaatacaagaatacagtagacctttgggagtttattgagaagaggaagcaccctatggcatcgtcgcatcgccacacgcccgccggaccgtccatgatgccggcaccgccgcgcatagcaccacacgttccggcgccaacgcccgtaccttcgattgcgatgggagtgccagccaatcagccctcgccttccgcatcatccccgcgcgtggccatcactgtggtgtatggcaaacgctccgcgaaactcaatgttccgtcgacacttccggtagctgaactgctgcctgatatcgccaagaaactaggtgtgttcgatccgactctggtgtatgccggctaccgactgacccgtgacgacgaaaccgccatcaataatcccgcttcgctggccgatcaggccatccgagacggtgaacgtctcaaactcgaggtcaacgccttgggcgatcaggatatcgtctacgacgatgtggttgaggcggtggccgattcggtggagcgttctcatcgaccgtggaccagtgccaataccacagtgaccacaatggtggtcagttgtgtgctactgggtgtcggagcgatttgtctggcattggccccactatccatcatcaatgctggcgtagcgggcattaccgcagccgctttactggcgattgccacggtactggcttcgcgccatatgcatcggcaggcactggcactgtcgctagtcgcctcgcttttggccggcgtgaccggatatcatctcatgggttcactgttcaatccctcgttctacgggttcccggccgttggtatcggtgctggtttactgctggccggcggcatttcatgtttgctgcttacagtgaacagactgtacgcgttgattcctgtcattatcggcgcagcactggtgattctcggcattgtgtgtgtaacgatgccgcactggtccactcgcgtatggatcgtggcagtggctctgctcggtctggctgccaatgcgctgccgtggctcagcctgtcttccgcacgattgtctgtggacagccccaccagcgaatcggagattttcgcgctgcccaagaacatcgatatcagcgaagtgcgttataagtaccgtatcggctccacgctgctgttcgacctgcgcgctgccaccagcgcactgatcgtgttcggcacgcctctggctgtttccagtgcaagcccagcaggcgtggcacttaccttggttctgttcgcagccatgctgcttgattccaggcgcatctatgcacaatcggaaatgctgatcaccgttatcaccgcaggtgccggcatctgcctgtcttgtgccgcatgcacggtgtttcaccccacgtgggcttcggtggtggtgggcttgttctcactgggagcgttgctgtgcgtcatcggcacacagctgtctaagcacgattccatcgccatgacccgtctggctgacgcctcgaacgtaatctgtgtggtggccaccctgccgctcgcctacgtggcattgggattgtgaggaggggccatggcgaataagaaggacctgcaggacgcacaaaactattcgcgggccaggctcattactgccttcacttccggtatgccggatggcaaggagctgactcctaagaaaggcctgacgccggtgatggtcagtatcggcctgaccgccatcatggttctgatcagtgtgttctatggcatcatcagccctggcctgccttcagactggagcaataacaaactcattgtgggcaaagacaccgcatctcgattcatcagcgtcaacggtgtgctgcatccggtaatcaacaccaccagcgcacgtctgctcatcccctcagacgaataccgagttatcaccgtagacgacaacgaacttgaaggtattcccatcggctccagcgtaggcattgtgggcgcaccggatattctgcccaaccggtcgaggctcgtatcgaaattcctggtgagttgtcttgacaccgagcgcgcctcaaccaacaatctcatcaccaatgatgccgtgaccaccccggccagtcgtaatgaggcaatgctggtcaacgtagatggcattggatacctcattgtcaacggtctgcgacatcgtctgccgcaggaaggcctgattcgcgatgcggtgcttcgtattctcggcgtcggccaactcacgttggataacgctcccaaggctccggtgcaatggctggacttgtttgccggcggttccgatctcggagtgttggatgtcaggggcaaaggcacggaagtcgcggtgggcggtacatcatacaccgtcggttcgctgattgccgatccctccaacgacaacaccaaatatgtggtgcttgccgatggcacactctcgccattgaatggcatggccttggaaatgtatcagctgagcctcggtgccggtgcgcaaaccattaccatgaccgcacaggaacagcagcaggccgggttccgtaatgccaccgattccatcgttcccgatgattggcccgatggccagttaacgccgatgaattccggcaatggcacttgcgctgcgttggaaccgtccaaattccaaaccgataccacgcataatgccgctgccggcatcaccttggcgaccatcagtgacgacaagaaccgcccgcaacgtactgattccggtaccaccatcatcaatggcagcggtgcgctgctgcgcacggtagacagtgccggcggtaccaccggcgcattgtatgtggtcgatggcaccggtgtggcctacccggttccggacgataccgaagaaacattgaagcgactgggctttaccaaaaatgatgtcaccgcaataccccgctcctggatcaacgtattctccgccggagtggctttgagcagcaatagcgccggactacagatttcagcgcaggatcaggcagcggcaacatcgtcgtcaggacaatcctctgctactagcgcaggcaccgagggcacacccgacgcgaacagctcatccgactcttcggcatccagtcgaaagcaatgatgacgatgacaacacgcacctcacgaacccaccgtattcgcaccggcatcgcagctgccgcatgcactgctctggcatgtggcacgcttgcagccggggcactctcgcctacaccggcatgggccgatcagaacagctgtgaaatcggtaaaaccaactacatcaccagcacaccatggaccgaggatgcgctcggcatgaccacggtgcggtctctggcggatggcgaaggcatcattgtggccgtagtcgattccggcgtggacaccaacaacccgcatctggctggcgacgcagtgctgcctggggtcaatctggcgggagacaacgttcaggatggccgcactgataattatgggcatggcacggttgtggcgggcatcatcgccgccagaaaaatagaaggctcttctctgatgggcattgcccccaaggccacaatcctgccggtgcgcgtgtataactccatcgataattcctccagtcattcgcaaggcggtcccagcccggacgtgctggctgatggcatacggtatgccgccgatcatggtgcgcagatcatcaatatctcgcaaagcaccgtggctcccagtggcaccttgcaacttgccgtgcaatacgcacaagccaaaggttccctcatggtttccagcgcaggcaaccgcaacacctcgtcgtccacgcaggatgggcttcgctaccctgccgcatggaaggacgtgttgggcgtggcggctgcggacacgtccttccatgcgtcatccgattccatcagtggcgagcaggtagacattcttgcccccggggaatccgtgctgtccacgattccgagaggcgtggattgcgtcttttccgccgaatcagcatcttccagctacgccaccgcatatgccagtggtgtagcggctttggtggcgcagcgtcatcccgatgaaaacgccttgcaatggctgcagcgaatcgaagcttccggcaaccgcccggaccccgacgcacgcgacgataatcgcgggtgggggcaaatcaacccgtatggagccatcaccatcacgctggccaacggcatgcgcggtccaggcagcacacaatatgagccgtacacgcctcctcgcacccagcaggcacaacatcttaaggtcgaggccaccatgcattcggatggcacggtaagtgctgtcttggccgtagtaggtgcggccgcgattctggtgatcatcacgctgattgctttgcgcatcgccaaagacgcgaagcacagcgcagatgaatgacaatccctagacggtaatcaaacattcaggccaatcagttcattggtgccatgggcggcaggctggagggcgcgtaggcgagctgtgccaggaatgtgccgctatctcgactgaccacctgcacacgaccgggcaccaatggcttcggcttggttttgccaataagctgtccctcattcggatcgcccgagaacagcaaaccggtgacggccagatcctggaaggattgcagcaccggatcatacagggatcgactggcaccaccagtgcggcgcgtcaggaatacatgcaggccgatatcggaagcctgtgcaagcaaaggcacgattggttgaatcggattgcctcgtgaagtggagaccagatcgtagtcgtcaatcagcacgtaagcgtcggagccggtccaccacgagcgtcgacgcaactgttccgcggtgacgtccgagcccggaatacgtgtggccaggaaggcggcaagatcgttcatcgcctgactggtttcctcatgattggtcagatactggccaaggtacttgtcattcacctcatcaagcagagcgcggcgatagtcgaccaggaagatcttggccttgccgccggtcacgtcgtaaaagcgctcgatttcctgagcaatcagacgcaggaacgaggacttgccggagcgagagtcgccgaacgcatacatatgcggcgctcgcacggggttgaacaacacaggcttcaagtcggcttcgtccacgccgagtacgaaacgactgttacgagtctgttccggcacggtggtcaggaaggcgttgcgagacagcatggtgggcagaagacgcagctttggtggcttggggcccttccaagcggcattgaccttggcgatgagatccttgatgccgtccgccatggagtcggctttatgatcgccgtcgatgcgcggcaatgccaccagaatatgccgcttgctggaagccagaccacggccaggcatgcccttaggcacggtgatggccactctgcggtcgatttcggaatcagccggatcacctagtctcagttccagacgagtgcccataagatccttgatgttggctcgtagatccatccaacggctcgtggagatgaccacatgcacgccgaacgtcagaccgcgagagacgatatccaataccttggcctgtaggtcttcatattccgtgcggaagttctgccatccatcgatgaacaggaatacctcaccatagccgtcatccgcttggcccttggctcgcatctggcggtaagtgccaatcgaatcgatcttatggttcttgaagtaacgttcacgggcgttgatgatgctcaccacttcagcgagcatacggttgacgcgctcatcgtcaccacgaagagcaacaccagccacatgctgcaggtcttccataccggcgaacgtgccaccgcccagatccagcgcatagcactggacttcagtgggactatgcgccaacgcaagcgaagccaccatggtgcgcatgaacgtgctcttaccggtcaacgggccaccggcgatagccacatggccgcccgctccagacaggtcgaggctcagtacctcgcgtttctgttccttgggcttgtcttccaacgccactggcacggataagtaccccgccttgcgtcgggagggggaaatcagcccatactgcgcggtggcggtcaagtcggggaagaactcgtcgagcgtgttcggcacattcagcggcggcaaccatacctgatgtgcaggcttaccgccagcacgacgcatctgatccacagccacgtcgaagttcgagggattggtgtccggctcgcctttcggagctccggacacataggatgcacggaagcgaatcatggtgcttgggtctggcttgaggtaaccgacaccagggatgctgggcagggtgtaggcgtccggtacaccgagcaccacacgtgattccgaagcggagaacgtgcgcaggccgatacggtatgacaaatgcgaatccaagccacgcagcttgccctcctcaagccgctgggaggcgatgagcaggtggacttccagagaacggcccagtcggccgatgttcacgaaggaatcgacaatgtccggtttggcggccaacagttcagagaactcgtcgcataccacgaacagtgcaggcaacggttccaaatcggtacgcccgttgagacgggccttctcataatcggatacgttggcgaagttgccggccttgcgcagcagttcctgcctgcgtgtcatttcaccggtcaaagcgtcttgcatacgatcgaccaacgaggcttcctcaccaaggttggtgatgatagaggagatatgcggcatgccttccataccggcgaaggtggcaccacccttgaaatcgatgagcacaaagttcagctgatcagggctgtgcgtcaacgccaacgacaacaccagcgtgcgcaacacctccgacttaccggaaccggtggcgccgacaagcacaccgtgcgggcccatgccatactgggcggattccttgatgtcgaggtacgtgatggaggtgtccgcgttgaggccgatgggcacacgcagtcgttccttgccggttttgtatgcccacaggcggttcaagtcgatgtgatggatatccgcgatgcccagcagatcggccaattcggaggacttcttggcgtgggaggcttgttccttgttgtcgccgttctcctcttcgctgggcaactgttccagtctggaggccacggccttggcttcctgaatactcaggctgtccggggcacaggtgtccacgcgctccgatgatgtgatgatctcaatctggttcaccgtggaagtgcgtaccacgttcagacccatttcgatggaggattgggagaagatgacgcgcaacacgtgctcttcttcaagatcgccccactcttcaggaagatcgataagggtgacgccgtcaaatccgtcgcggcgcaccaagccatcatcatcgctgttgttcgcgtcaccctggggcactgaaccatcacgtaccaccagaatgtacggcagggtcgattgcccagtgccggtaaaccggctgcgatgcaaaatgtcttcgccaatcagtcggttcgcttcttccacgctgccagcgagcatcacttcgccatggccaagcgccggatctttggactcgtcgctccatgcgtggggcatctcgccgatccagcgccacgcgtgctgctgttcgggggccgccagcacgatgatcttcagatattcaggcccatgccagaccgccgcctgacatatcaaggtgcgggctaaagattgcgcctgatcagcgtcaccgaggatttcgatacgcttgtacttgggcaggtcgatggtgcaaggcatatcatgcagattttgatgggccatcatgaaccggtgcgccgctgaagcggagaccgggtccagttcggccagcggaggcagctccggcgcctccaaggtaatgcacaatggctcgtctttagaaccgatgcgcacattaagaaaatcatcatccgatgggatgcgctcccagcggcgtacatgttcctgcgcgatggccaccaaggaatccggtgtgggagaattccacagttctgcacgccgttgttttttggccgcggtacgaacggtttttctcagttcagccaaatatgccaagtattcacgccgggacgaagtgagattcgctttgcgctgcgaacgttgacgcacgccgttaaccagtacgaagcccacggaggagagcatgaacatgccgccggtcagaaaaccggtcagaccggaattggacatgaccatcatcacaatggcggagacactgcccaacagcggtaccagcatggtcaacagactgttgacaccgtcgctcggctccaattcaggcggggcctgcaacaccaccttgccgtgaggcactttgggctggtctatgcgggaggatacctgtggcgttatctcactcattattttttctccctgtttctcagcaggctcacacttatggcggtgcttcctaggaatatacgtgtgccaaacgctatttcggtacgcgcgcccgcctcaagatgtttcacggcaccgtcttcggtcagaatttccgtgccgttggtgctttccaagtcagtgacccacatccggccggacgcaatctccaacaatgcgtgtgtacgggatatggtgccggtggtgtctggtactctgaccagcacgtcgtttgggtcgctactggtggggtggcgacccagcagagcacggctgggaatatccagatgcacaccattgccgttttcgaaatacaataccgccacctgtttggcagctgccggttttgccggcacgggacgctggggcacagcctgaggaacggccttgggaacaggcagtggtccagtgggtattggtgccgccgaagatgatggcacgaccgggcttgttccgacggttggcaatgcaggcggcacagcatgcactcgcgctgaagtcgtgcccgccggcgtggggatggcaatcgttgcagcaccactgctgtgccgcggcatggcagtctgggacactgcaggaattacaggttttgctgtattggaagtaacagacggtacagggctgggcactgctggagagatggtgggggccgcaggcaccggttgaacagattcggtttgcacagactgcacctgtatggcggtagacgatgattgcaatgtcccggcatgcacctgggcaggccgtacggacgacggttctatggcagcaggtaccgcgcgcaaagccctgaatgaatccgaacggccggagggtgtgggcgcagtggctggcggaagaataccgccgaccatcgcctccaaatcttcatcctcatcatcaaaagtagagtcaaatctggtgctggtactggtaccggtattatcggtgatggcattacccgtatcagacattgccgtcacatactgcacacgcgtatcaattacggcagtgccggacagccgatcctgcaatccgcgatgacgtacctggtctagtgaagaggtccattccagcataaatgcggcgacaatcgccaccaaacagcccaatgatgtgatcaatacacgcgccaacgcacgccacggaccggcaggtagcagaccagcgccctgctgccccatatccgcagtgttgcgcaccacacataagcccagtattgccttgccgatggtacgaccgcggcaagcctcccacccccagttcagggcgacagcctgtattgcgcacaagacggccaatatggcgttgcggctgagcgccaaagtgacgccgcccaccactgttacaaatgctacgtcaatcagcagcgcgagcatacgtcgcccgaccgtagcataacggtatccctcccccaccatgggatgggtcacggacggaccgggacgtggtgcaggagcttgggaagcaatgggcatgggcgctgcagtcatgacataaacccccgaatcatatccatggcgtttgaggcgaggaacgccgctggtcccgtcaatgcaagactaccggtggtgacccagtcgccgacacgagacaacatcagcgacttgaagccgcccgatactgccaatgtggcggcggctatcactatgcccacggctatcagcccgaataccaaccatgtcacgagccaacgccaatcgtcatgattggtcagcgtgatcagggctgctgcaggcaataataccgcgcatgaacgcataagcatacgttccagcgcactgcccgcggtgcgcggccggagcaacagatagcagggcaataacaccgaatatgcgccgaagccgatagtggtgaagagatccggttcggcaggcacagtgaggcatagcacaacatatccggcagcaatatatagatgcccaaccacaagacccatggtgtattcggcagaaaaaatagtcatgtcttcgctgatgtcatgggtatagagcggacgtgaattttccggaaccgcgcctcgaaccgtccaacgctgggacatgtatcgacgccattcgatgaggtaccggtccggcacccgcaaaatcacattcgcttgggcatgcacataccatgcaccgcccacggagcaggccgctgcgattaccggtgcgggaatggcgaatattactactgcgataatgaatagcgcgataataacggctgcggtgatgagcagtcgggcaagggctactgtaatgcggcccgaagccgcgtattggatatatgccgccataacggccacaagggtcgcagagaggaagaccgccagtgccgcagaacgagtaaccgacataatctgcgcaatacgggcaagcgctgggcccgcagctatcgcggcggcaacgaccgtggccaaggagccggcataatcgacgcttcgatgccagtcggtcctcaccgtcacatgtgcggcgtagtaggacagtaatgccaacactgtggcggtgaacgcattaaatacaacggcgcttacggtcacggcatctttagcggaggcatccacaccgatgagtccactgactaaaccctggaacacggcagaatcggtggatgcggcacgaccacgcattacaccatcgaaaccgaataccgcgaatgcgacgcataacgaggcggccacagcccatgccacggcaacattcacccgttggcgctcataggcatcctgcgctgccatagccatgcccctctccccgttctcctcatctccgaaacccctcgaaacggctgctcctcctaagaatacgccataccgtttcgtgagggaatcatacggtcagcagcacggacagcccgccatcacacgtaccggcacaactcctgcgccaccggcagcatctgcgactccagttccggggtcatatattgccattccaaaagacgatgaacgctaatcggcgtccacaaatacgccagcccatccgccaccaacaaattgagacgggcaggagacgacgacaggatacggaacacctcaggagacaagccacccaccgtctgaggcctcggcttgcccttcaaatccgtagtggtgcaccacgcataccccgacatccgagaacgcaccggcaacaccactgtctgcaacgaccaagcggagtacatcgtccaccaactgagattgtccatcacattcaactggaacgtgacccaaggccccttggcgtaaaaccactgcgtattcgcagtacgcggcatcttcggcgcacgcatgccgatggcatcatgcaacaggaccttatcgaacgtccacggccaagacggaatcggcacccacccacaagcccgcatggaccgatcccaaacctcaacaacatccataccctcacctttatcgacgacaatggaatcagcgtgattgctgacgctcgcgaagctgccggagctgctgcgccgcgggatcgtcctccggaagctcgctgaccgcggtgcgcatggcatccaatgccttggccgcctgggcacgcacctcacgtgcctcggcagaagtatccaagcccatgatgatgtcgcgctcgcaggtctgccccatatcgatgcgctgctgcagcacctgccaagcacggccctgcttgcccgcacggcggtcctcggcgtactgcttccgacgctcctcacgttcctcggcattcttcttgcgcagctcatccagctccttctgcttggtatccaccaacgtgctcagctgccggacctgcgccatgaattgttcaaatccttgtgaagccatgtgtatatcctcctctgctccgtggctcaggtgcgttcaagactggtagcaaatgatttcgcctgctgggccaatggggaagccgccgccgtaaccgccttgaacgactgcgcggcatcatacaagccctgaacaatatcgtaaccattctgaatgagggaaatgacagatcctgcatgcttggccgccacgacggctagaccgacaccggtccacgcccattcaacaatgtccatgcacaggtcgatgagctcctcaatgacatccagcgcatagtcgaagcacttcttggccacatccaccaacgcatcaagaccatccgcgatctcacggcagatatcgggaccgccctcgaacatctgaccgatctggtcgttgcacaacgaataccggtcgaatgcctcgcccttccacgatgtccggatctgctgctgggcctgctgcaatcccgtatgcatcgtttccagattggtggcgatgccacgccaatcctgagcggactgggacaattcatcccaatcgccgccgaacggcttgcgcagaatctcatcgacggggttcgtgatatgcaagacattgcacaccgtgtcgatcacaccaatacccatacgagcccaagacaaaccactagaaaaatatcgagtgacatttctagcactcaccaaaccatggctcatgccatctcgaagatcctgcgttctaccagccgcgatactcaggggagatgtgctgttgtcccaccatcgatcaagagagctattcatactctgaatatttgtggcccccagaagatcgctaaccccgtcacgaatatcggcaatattgccggactggaacttctcaccggcctcagccaatttgtatccagaagatattaagtccccctcgttggcctgtatgccggtaccagtgttgtcattgtctccaatatcgatgacgtccggattgtaatcctggttctcgtacaggttaccgtgctcgacatcgccgccaccattcgccgccgcgacaatgaacaccacacgagccgaagcatgcctcagccattcgttcatgccgtcacccccttgctaccaccaaacgtaatcgtgatcgagccattcgccgaggcaccgccccagacgccatccgaaagcgaattcgtttccggcagctcgatctcttcgcgtctgttgaacagttccttgagctcgtcaacggatcggtgcaacgggtcggtctcggccagtgtccgccaagcctgttcctcgcccttgctcacctcggtccggtaactgtcctcggccgtcgtcccagtcgcggcggaagcaccgtccgatacccccgagcccgcatcacccgatgctgcggcaccgtcgcgcacggcatagctactctcatagacaccgtcgccatccgtatccacctgaacgtatcgcgtgccgctgccctcggcgccgggaacgacacgcacgctggcatcctgaccgtccttgagctccagatgaacatcatcggcgccatcgttgtcggtgtcgaaggagataccactggtctgcgcggaatcagcaccgaacgaaccaccgttcttgctcagcgtcacggttccgtcatcgttgaaacgcacaccggtggaatccaggtcggcattcaccgaataatcgaccacgccatcgccatccatatcgatatccacgctttccgtggtgtccacccgttccggcttgggaatcgtggtgccgtcatggctgggcggagtgggaatatccggaatatcggtggcattcgtatccgggtcgagactgccgccaatgtcacccgccatatcggaatccacatcaacgggagcatcattccggtaattcccagaagcatcctgctgataggccggccgactcggcatctgatagtccggcatcgagggagcgctcgccgcaccaccggagccaccggccgaatatccggagccaccgccggaaccgccaccggaatagcctccggtgccgccgcccgaatagccaccggtgccgccggatgtctggccctgctccagttcaccgaccttctcctccagttcaccgaccttgtcgctcaactgcctgttctgctgttcaaggttctcgatcttgttgagcaggtcctgaatggaatcggagttcttctggtcgccctcggtataggcggcaatggcatcggtgatgtcctgggacatggtgctcatcagcgaacccagactggacagataatccagcgtgttctccttggcactgtcgtaatcgcctttcaccagctgcagcaccaaaccaaagctggggtccagttgtctgctttgcaagccgaaccccattttggtgaaccccgaggccgcgtcattgtagcccttggccaaactggcaagcgcgcttttgctcacctgaatctgatcactcatgaacgctcctttcccctagccgatccgggcgtcagtcgccggccggcctggcacgatggccagccatggcacccacggacctgatcgcgatgtcatcatcctcgagcttgggagccatgtaccccaaaccctgacgcttgttcttcgactggttcgaaccggcggcacccggagcacccatcatgcccggacggccagcggaagccgccgccccggaagcggcaccagcggacttcagaccggccgccatgccggtggcgcccgagatgccacccggcaccacctgcgcatggaccggcgcgttcgtgaagaacgagccacccgacacacccgcgccgatgccgacgccggcaccgccaacgccaccaagggacgcaccagcacccagccccgcggaggaaccacccaaaccggaagcggacaccgtcggcctcggcacaaccggaaccggcgacagatccaaatcggaatcgacgtcaacgacgtcgttatcggtgggcttgcgcgacggaatcggaatcgacggatcgtacggatcattgggatcataagggtcgttgggatcgtacggaccattgggatcataagggtcgttgggatcatacggattgtacgggtccgggctcggaggcgcgggacgacgagaatcatcaggaaccacataccccggacgatcatcgacgtcctggccaccagagccattgccaccccgatcattgtcgtacggactggtccggcggttccggcctatctggtcaacagcctcggcatacttccggttctgggccacgtcattcggatcatacgtatcatagacatccggaatgccgtccccatcggaatccacccacacgtccggcacgccatccatgttgtaatcgtaataatccggcaaaccatcaccattgagatcatacgcaccatcacccaaatacgtaccaggaccaggaacacgaccaccaacaccagactgatcccaaatatcaacatccgtcgagccaatatcctgatgcttccctggtgtggagactactggttttaccggatcataatttcccgcattacgcaatctcttataaaaatcaagaagtagttcttgcgccttattctctctattcgagcataactgctcattgattttccctaccgggtcagtccaaccagtaagaatctgaatagttgctttaccagcagcaagcggaaaaggcaagagaacagtcgcacccacatctgctatacgtatcgcagcagatgaaacagcatcaagctggttccccggcaatgactccctttgcttcctcacatactcaagagcatcattggcgtgatcaatgatgcgctgcatcgcttcaatttgactggataggccatccgcataatttacggcaagcaaatcttctccatgctgttttgcactaagcgcagtttgaccagagaaaacatcagtatcggatacacgttcaaccacatatttcactgcttgttctgcttgttcagcattatcaacagacagaatatttccctgtaactcccagttcgggctcttggcaatctcattgagacgctgctcaatgggacctatattggaatcagaacttgttatcactgaatcaagcaattgctcgacaacattcttgtctttatccttgtcggacatcgatgtcccctttcccttcctaatactctctatggtttaccgtgcatgccggccctggccgggcttattccgaccatcggattgtggcggatactgttgtggggaataaccctgttcctgaccatagccgcctgcgacattgggaacctgactggcgggaggctgaggatagggttgggccggctgaaccggattctgcggaaccggattcgcctgctgctgaggctgagcataccgaggagataccggaccgacattccgccggtactgcgatggcacctgagccgggcccggagcctggtactgcggcacaggccgggacccgggaccgccatactgcggcgaatacggtcggttcggatacaccatacccggcacaggctgacgcggacccgcatacggcgacgggccagcggcagcggcatccggcaacggacgacgaccctgctttccgcgcttcgacaacaccaccgccaacacgatgccaccagccaccacggcgatacccacgccaccggcggccagccacacccacaccggcacaccggacgacttcacgccatccttcccgtcaccggtacccggcagcacggtcctgccgtcagacttgccatcagacttgccttcagtctcgtccgcggtcgcggtggcggaatacctcatgcaatccgaaccgccatcagacctgcactgctccaccttcttccacgcggctttctgacgctcatactccctgccaatctcaccggcctggcaaaaaacgggatacgagtcgagcaggctgcctacgccgtcagggttcgtggagcaatcctgcgtataccacttcgaacgatcatccgacagcttcgacgcagtggtcacctgcgcctccaaaatcggattcacatccggatactgcgtcggatccaccgtcaggagcctgcccggatcgacctggccataacccctcttatgctctgggtccagcttcgcctcacccgaatcattgcccttcgtgttacgcaccaacgactgcagaatctgattgcccgtcgcgtccggccacttctgcacagtcaacgccaaatacccagacaacacagccgaaccagtcgacgtacctcccgtacccaccgaaatgaatttcgaattaatgcgctgatgaagcacctgatcacccggggaaaggatgttcacgttcgcatcagccacatccgaaatgccggcgatctgcccgtcgggaccgacctcgttgttgcggatcacacctgggaaagaactccgctctctagggtcgccgatcatcacatccgtgctgctgccattgacaatagcgtcagtctccttgtcattcgaacggcccgcaacaatgatcacgccatggcgtagcgccttgagcatcccatcattaccataatctcctacgccaccgccatttgacatgttgatgatgcgtgcgccccagtcgaccgcggtactaacgtccttgtcgatatccgacatagcagccccatcacaaggagtgatcattttgatgccgtccgaagtatcttgtcctatcgtgagaaacagaacatcggacttcggcaccaagcccgtcaccccttggctggcatcccaactcttgccattgcccaccagccatgtgagcatgtaagtgccatgcgacgaatagagattcccctctttggaagtgactgtcttctgaagcggtacaccttttatcagacactcatccggttcgtcggtagtcgcattgacgaacgaccccaaccggtattcgatgttcgtcgcgtccgacaaccctggataatccgaaacaacacgagtgtccagcacaccgatcttcacacccgaaccatccagaccagcctcatgcgccgagacaaccgcactgtccttcaccggccacaagccacccatatcatccgcatacgcggacggcgacaacaccaacaacaaagaagccgccaacacccccgaacacacggagaagacaggtctatctgtggtcattactcctcttttcgcagcgctgcacaacgtcaagataacagcaactatttaaatctcatgtacttcaaatgactcaatctcattttgcttgttttgcaattgagtctgaaagctttcttcgaatctcgaggtatgggcagtagcatccgccaaacgcttaccatagtcagccatattctgcgaatagcgcgtccggtcttcacgaattactgcgacgctgcgggccaatacctcattgattcgcttggtgtgtggatctttccatcctccagtcaccttcacgccataagtctcactcgcggaatcgttgactgactccgatgctgtttccaagcgtgccgccagtcgattggcctcatcggcatcgtaacgaatctcttccgccatggttctcccccgtccactcacatcaacgcatccaccgcatatacacgcgtttgccgtcccacaccaacaccgcaatggaacggcaaacacagcacatcaaagaatcggctcaatcagccgaagaaaccggcggccttgcggtcgctggcggtgtagccactcgaaatctcagcagtggccgaagcgatctgcgcaagaatgttgcgcacatcgttcaaatcggcgttccacttgctctgcgcctgagcatacgcctgctgcgcggaaccatcccagttctgcttcagctggctgaccttggcgtccagatcatccagcttctgctgaatgccgttagcaccattacgaatgctctcggacagggcctgcacctgagccggattcacggcaaaagaaccaatagccataatatttccttgctttccttatctgcctgatacttgtttccccgaaccaatcagctcagcatgctggcgatcttcgaggtggactgctgggtctcctgctcgtaacgctcctgctcctgctccgtggaccgcagggactgctccagctggttcagctggttgttgatgctggaagtcttctcatcccaagcattcaccatgcgggtgaaagcggtcgccgcgtcaccggaccagtacgatcccatctgctcgatctcgccacgaaccctggtgatctcctgctggatgccctgcctggcctccgcaacggcctgctggcccttcgcaagcgcgccggcttcagcggaaatatgttctgccatggcccatctccttaactcttcccggctcacgccgtcattggtcaattacgccgaggagcttcaataaaagaaccccctacaagaaactaagcatactcccacattctgttcagccaaagcccctgtcattgtcaagaaagggaacaaggacgagcagcagatgcccaggcccggcaaaccagataccggaccggacatgacgaggcccccaacgatgccgtacagactgtacagatggcgtgcggcatactaaaccggcggcgtccagcccagctgctcgcgccagccatcaggcgggaacgggtccgtgttccacgcgccagtgcccggaacatcattgagcagtatcccccgatccgggccgaacagccaatccgcaagccccgcacggcaacgggccgcgcgaaacccgacataatccatcgcagacggatccaaccccgccacaccaccgcgcacccggtcgaacagcatatcgcgatgttcctgcaataacggcacatacttggggttcgcggcatcggacgcacggaacacggactggcagaacgtacgattgcgatccgatatgctggagctgatcatcgattcggcccacccatgcagaccgaccgtgaaccactggtccaacagccagaaagcacccagatcacgcgcgatcccatccaacggcgtggcacagggcaacttccgctcccacttcagcaatgacctgtacgtgcgccgggcacccaccggcatcaacagcgaatccggccgatcgtaacaataaatacgagacggaccatacttgaaaatatgacgcgtgggccctgacgacctctcaaagaacggcatgacaccaccatacgaccagcatcgccgcgtacgcaatacacatcacacgcggccggcaagaaaaccgcacaactcctgcgccaccggtagcatctgcgactccaaaccggggttcatgaaacggtcgtagatattccacctatcgcacagggacacccacagatacgcccgccccgaagcaacaatcacattggaatgcaacggatgagcggacaatacctgcaacacattctgcggcggccccaccaactgtggccgaaccgcatgccccaacaaatcgcttaccgagcaccacgcataccccctgcgaacgagccggcacaggcaacaccaccacctgcatataccgcatggcgtaattactcaaaaagccattattgtcatacacattcagcgtgaacgtcagccacggtcccttgctgtagaacctgttcacccgcatattacgcacggcttcgccacgaagcaccaccgtgcttccagcatcgacggtccgtttggcctgccaatcacgcgcatggaccgaatacgtgaccgaagaaactccgggagccggctcataacggatctcaaccagcacaggaaccccgaaaccacggaaaaagcccaacacatcatcgcaatgcaaacgcacgccaccacgaacgacgcgatgacgccgttgcgataccaataccgccacgtcggccacatgcgctgcctgacacggaccatagccagccgagcaacgaaccagccaccacgaacacgcaccagacaacaatgccgtaccggaaaaccctacccacccagaaaggaaaaccagatttatcagcattcagcagccacagcacgccgacgaacaccacggcctccagcatgtaccacggccaatccaactgccgacgaacaaccgcaccggcaacagcatccacacgatcccacatcatcaaccttctctcatcaaaaaccgcttcgtaaggcaaccatacagtcagcagtacggacaacaagccggctatcacacgtaccagcacagctcctgtgccacacaagcagcatctgcgactccagcgccaggggccatgtaccgcgaatcattgtcgcacacattgatcggcgtccacaggcaagccaggccattcgtcaccttcatgctgtcatgatttccgtggaaggccggagtgagcgctgcagaagcgcagacgatagccagtggggtctgttcgtccgtccgccatggacagtggccggccgaatacagcctcatgcctgtgggacggcacgcggatttggccggtttccgcgcggcgtcccgcaggaacgtgggatggtagagaaatcaatcgtttgacgttcgtggcgttccacactatcaaccgccagaaccgcgcaatcacgccaatccccgttacggaccataatcatcccccgggctctctgcgggacggcagacgaaaaaccgcgaaatccgcgcgtcgtcccgcacttcgcccggtccacgaacaggacaagcatcaccgatagaccgaacacacatctacagccgcgacaagaaccccaacagctagccgcccgccccggatatcgccgtccaatagtaaatcgagcccaaaacgcaaacccaaagcactgactcagataataaaactcggattttccaccacagacagcgagaaactctcccctataccaagtagcgtacgtgccaccttgctcgatagacgaacaatgagaagtatcggttaacgggcatgccgggcaggtcgatgggctctggcgcgggaacgaagacggcgtaccagcacgaatgggccggcaaacgtgatcgtatacaacacgacggcgaggaacacgctgagccatgcggtgaacatgcccaacggcatctcctctaccggagtggtctcggctatgcatgcaacgatctatcactccgatattgtggtcagtatgcgcggcagttgttcgtcacggttgaggaaagaacgcgtttggcaacgaagtagcgtacgccggccttcctcagtgcgggtgtataccatggtgcaatgcgtcaggcagcggtccaactgccagcgcagtatttcggcgtcctgctggcggcgggcaaatatggacgggcatgggaagcttacaccgtacgtgcgcacgccccattccttgccgatgatgacatatcgcggattgttgatggacgcgagtagctccttcataacgccggcgaacagcacctgctcgcgccgcgaaccaccaatcagcatggcacgcaacgccgtgaatctgcgacgtgtctggcggatcgaggaagtcactcacctctttgcctaccgcgttggtttctaggcgctcaggttccgcagtcgccaaatgccagacattggccaccttatcggggtctgcggccacgctgcggttggcggccatgctgtatgcttcactgcatcagtgtaaggcatgaatcaataggttttgagccccagatcgatggtgagaatgatgccggcgattacggcggcggcgcgcatgatgtttgcgggaatcttgcgggtgatgggcggggcgatgtacccgccgatgaagcagccgatgcacagcatgatggcggccggccaatcgaccgcgccttggatgatgaataccactgaggcgctgatgttcgcgcctgtgccgatcagggttttcaatgcattgatcttgtggaatgggccgattttggcggcatcaagcatggcgagagccagggtgccggcgcccgcgccgaagtagccggagtagatggcgactgccaccacgcccagccatacccaccaggaatcctggctcatgggctgcacgagttgttccggcgggcggtgaggtgcggtaggggtggttgcgcgcttggcggcatcagtggcatcggtggcttcagtggcttcgatgtgcttgagttgcgcggtggcatccgcggcggcctgcttggcctgcatgcggccgcgcggattgatggcgatgatcagcgagctcagcaaaatcagcactggtgcggcgaattcaaagacactcgggtcgagtttgagcaacagaaacgcaccggccaccccgccgaacgcgccaatgaccacatacgtaatggagcgtaccgcttggcctttgagttctttgcgcgcgcccatcacgccaccgatgcccgtgccgaccacgccaacggtgttagaagcgtttgccaatacaggcggaatgccgaacgcgagcaaggccgggtatgagaccagtgacgatgcgcctaccgcatagcccacgaatcctgcgccgattccggccaacagaatcagtagtaatgaagttatggaaaagcccgcaatcattccccgtatccttgtcgctcatcgaccggcacattgccggccttgagcgagaatacgctgttgaggattggttgcgggttttatgttggaatgtggacgtagctcctcgcggaagcgattccctcagtcgcctgaggcgacaactcccctcgcacccgaggggagccagaaggaaatcagagcgcttcgttgtattcgcgaaccttgagggtgcggtgggaggatgccacgttttcgacgatcagacgcttcagggcgttgtcggcggcaatgtgctcgtccagccaggcgtcaccgagcttgaccagcgtggcgggatcggcgtaacccgggtacaggccgttgagcaaagcctcggccatgtgataggtcttgttggcccagacccagtccacagtctcgaagtacttggcggcgaacggctcggccagatcggggcgcggggtggcggagaagccacgggccacggcttcgagctgggagttggtcagctcgtcgttgtggagtgcctgatcccaagcccattccttggcttgcgtcgtggccatggaggcgcgggcgccgtaggcgaactcgcggttttccgtggtctccttcttggcgagctgcgcgtccacgtcgtcgttggtcatctcgttgacggaggtgagcgcttggacgatggtccacgtgaagttgttgtcgatttcgaggccttcaagacgcacggtgccgtccagcagaccgtgtgcgttggcggcgaatgcggcatcgccctcctcgccatagcccaggtaggcggtggcgagctggaactgggtgtccgagccggcttcggcggcgttggccagggtccacagctcggcggccacgtggcgcagcacatcgtcgcggcgggctggcgccacgtagtggtgggcggtggtgctcatgcaggccagcgcgtaacggaaggtggtggattcggtttccgtggccagaagacgcagggtcatgtccacgaagcgttcggccgggaattcgccgtcacgggtcatatcccagaaggcgagccaggtcacggcgcgggccagggcatcgtcgaaacgatgcaggttggcttcggcgaatgcctgggattcggcgtcgaaacgaatcttagtgtaggtcaggtcatcgtcgttgaccagcacgaatgccgggcgcggcttgcctgccgcggcctcgacgatggtggtttcgccatccacgtcgagttcgaactgctcggtgcgcacgatcttgccggtttcggcgtcttcgttgtagaagccgacggccaggcgatgcggacgcagcaccgggtgttcggccggcgcgctctgggtgagcttcaattcggcgatggtgccgtccgcgtttacggtcaggccggtggcgatcgtgttgatgccggattcctccagccacttggcgctccaggccttgagatcgcggccggaggtcttctccagttcgctcagcaggtcggccagggtggcgttggagtaggcgtggcggttcaggtagttgtggataccttcgaagaactgcgtgcggcccacgtagaatgccagctgcttcagcacggaggcgcccttggcgtaggtgatgccgtcgaagttgacgtaggtgtcgttgaggtcgttgatcggggcgacgatcgggtgcgtggtgggcagctgatcctggcgcaacgcccagctcttctcaccggagcagaaggtggcccaggcgtcatgccattcggtggcttcggcagtggccagcgtggaggtgaattcggcgaaggactcgttgagccacaggtcgttccaccacctcatggtcacatagtcgccgaaccacatgtgggccagctcgtgcagcacggtcaccacgcggcgctcggccagcgcgtcggtcaccttggactcgaacacgtaggagtcacggatggtgaccatgccgatgttctccatagcgcccgcgttgtattcgggaacgtagatctggtcgaacttggcgtacgggtagggcacgccccaggtcttggcgtagaacgcgaagcccttcttggtgatgtcgaacaggtagtcgacgtccttcgcgaaggccttggccaacgactgtcggcagtactgggccatcggcacggtgcgaccgtcttcgttcaggtcttcggtgtgccattcggcgtacgggccggcgcagatggcggtcaggtaggagctcatcaccggggtcggctcgaagtcccacagacgggtgctttcgttcggcttgtcgccgagggtgccgtcgagggtttcgcgcggatcgtcctcgatggtggcaaccggcatgttggaggtgacgatccagctggcgggagcgagcaccttgaaatcgaaggtggccttcaggtcaggctggtcgaacacggcgtagacgcggcgcgcgtccggcacctcgaactgggagtacaggtagatgttgccatcggacgggtcgaccgagcggtgcaggccctcgccggtgttggagtaacggcacttggcttcgacggtgacctcgttcttctccttgaggtcggtcagttcgatgcggttgtcctggaaggccacggctgggtccagggacttgccgttgaggtcgatggatgtcacttcgtcggcaatcaggtcgaggaaggtcgacgaaccaggcttcgcgttgaagcagatgagcgacttggaaccgaagttcttcgcgccgaccgtcaggtcaaggtcgacgtgatagtgaatcggcgcttcgataacggccttacgttcttcggcttcaatacgagtgagattagaaccgggcatgacttcaattactccttacggtcgtccctggataatccggactacttggtttctacggtttcgacgtcctgggcgatgtcggccacgacgggcacgatcatcggcttgcggtgcagctggcgcgcaacccagctgccgagcgtgcggcgcatggtctgctgcagcttgtaggtgtcacgcgtgccctgcatcatctggtcgttgagctgttcgacgatctggtgacgcaccttgtcgaactcgctttcgtcctcggccacggcgttcaggtagatcttcgggccggtgacgacctcgtggttgtcggtgtcgaccaccacgaacgcggatacgaagccctcggtgccgagaatgcggcgcttttccagctcgtcatcggtcagctcgccgacggaatcgccatcgacgtacacgtaaccgcacggcacggagccgacgaccgcggccttgccgtgatacaggtcgaccacgtcgccgtcttcggccaagaccacgttctgcgggtccacgccggtcttgacggcgatcaggccgttggccaccaggtgacggttctcgccgtggatcggcatggcgcacttgggcttgacgatgttgtacatgtacagcagctcgccctcgttgcagtggccggacacatgcacggcggcgttgtcgcggttgacgaccttggcgccgagctgcacgagcttgttgatcaccttgtagacgccgtgctcattgcctggaatcagggagctggcgagaatcacggtgtcgaactcgttgatgtggatgtcgcggtggttgccgtcggcgatgcggccgagtgcggccatcggttcgccctgggaaccggtgcacatgaagacgagcttgtcgtcctgaatgtcgttggcctgcttcaggtccacgacggtgccttcggggatgtgcaggtagccgaggtcggcggcgatggacatgttgcgcaccatcgaacggccgacgaacacgaccttgcggccgtacttgtgggcggcgtccaccacctgctgcacacggtgcacgtgggaggagaagctggcgacgatgatcttgcgggtggcctgggcgaacgcttggtcaagggccgggccgatggaggtctcgggcttgacaaagccgggcacctcggcgttggtggagtccatcatcagcaggtccacgcccttttcgccaatcttgccgaattcgacgaggtcggtgatgcggtggtcgagcggcagctggtcgagcttgatatcgcccgtgtcgatcagggagccggccggggtcttgacgtagacggccagggcgtccgggatggagtgggtgacgttgacgaattcgaggtcgaaggggcccaccttgagcttctcacggccggcaacctcaaccttggtggggttctggtggtgttccttgcacttggcgtccacgaaggcgagggtcagcttggagccgatcagcgggatgtccggacgcagcttgagcaggtagggcacgccgccgatgtggtcctcgtggccgtgggtgagcaccagggcgtcgaccttgtcgagacggttcttgatgtagctgaaatcgggcaggatgagatccacgcccggctgctcctcctcggggaagagcacgccgcagtcgatgagcagcaggtgaccgttgtattcgatcacgttcatgttgcggccgatttcgcccaagccgccgagcggcgtgatgcgcatggagcccttgcggtacttcggcggggcgatcagcacggcatcctgctggggtgcggtggcctgccgggtggcgttgatcttacgggacggcgtacggctgttggatccgttggcgttgcggccgcgcgcggaaccgcgacggcgagaattcgtgttcttgcttgttttcttttgttcttgtgccataacctttttgggatttctgttgtggtgcctctgctctgtcatgcaggggcggcgggctggcaacccgtatgcagcgtttcgggcttacagcagtccggcagcgcgcatgccctcttcagccttgtcaagctgagtggcgtcgggaccgatgttcggcagacgcatggtggtggaggggataacgcccttgaccttgagcgcagccttggccatgacggcctgatagccgtcgccattcaacgcgtggacaaggggggcgagctggttggcgaggcgacgggcggtggtgatatcgccgcgatcgaatgcctggacaagctgctgcatggggttggaggcgacgtgggcaatcaccgaaatgatgccgacggcgccgatggagaggaacggcaggaacaggccgtcatcgccggaataccaggcgaggccggtgcgctgctgcttctccactgcggctgcaagatcgccggtggcgtccttgacagccttgacgtgttcaagttcggccagtcggtcgtaggtttcgaccttgaccttcaagccggtacggccgggaacatcgtagacgatgatcggcttttcggcggattcgtcgacggccttgtagtggccgacgataccgtcctgcgaggggcgggaatagtaaggcatgacgacgagcaccgcgtcggcgcccgcttcctgagtctgttcgaccatacgcacggtgtgtgcggtgtcgttggagccggcgccggaaatcaccggaacgtcgacgacctccttgacggccctgaccagctcgaccttctcatccatatgggtgacgggcgattcaccggtggtgccattgaccaccagaccatccgcgccatcggcgacgaggtatttggcgagcttctgcgcggcggcgaaatcgacgctgccgtcggatttcatcggggtgaccatagccggcagaatgcggccgaaaggtgctggctcaagaaggtgcatgtcatgctcgctcatagtgttcaccgtacttcccattgtggactcttatactacgtaccttgattgttgctgaatgcgtggcattatggccggagccggtggcaatgccgtgatgcgcgtcccggcgcgcttccctgcctgaaatgcgggggcgactactggtcgactgcgggtcgattacaggtcgaggaagtggtcgaggccgatggtcaggccagccggagcgtcgccggcgagcttgcgcacggcaagcaggacgccgggcatgaagctggtgcggtcgaagctgtcggcccgaatggtcagctgctcgccggcgttgccgaagagcacttcctcgtgggcgttgaggccgcgcagacgcacggcgtgcacgtggatgccgtcgaccacctggccgcgtgagccgccatcggtttcggtggcgtccggcacgggggcgagtcctgcggccttgcgcgcttcggcgatgccgtgggcggtgtgaatggcggtgccggagggggcgtccaccttggtggggtggtgcagttcgatgacttcggcggattcgaagtatttcgcggccttggttgcaaagtagtcggccagtacggcggagatcgcgaaattaggtgcgatgaagaccttctgggtttcgggcttcgggccgttggcgatggcggatttgacctgggcgagtttctcgtcggtccaaccggtggtgccgaccaccacgtccacgccttggccgatcagggtcagcacgttgttcaggctgacggacggcacggtgaattcgacgaccacatcggtgttgtcggtggtgacctgggtcaggtcgtcgccggcatccaatgcgagcgccagctgcgtatcctcggcgttgttcaccgcttcgaccacgtgcgagcccatgcggccctttgctccgaccaccgaaaccttgatcatgtcttcttccctgtctacccgtacctgcccggcaatgtacccggaacgttttccaatcggcaatcagcctatcaccgccaagccctcacgccaatatcccgtccacagaatcgagctccctctgacaagccgaaccgtgaagtcgagctccctctgatgagccgaaccgtgaagaaaacgccggaggcgtttttaggtgagggcgaacgacagtgagcaataattcagttggctgaaagccatcatttaattgcgttcgagctggccgcgaagcggactgagggagagacccccggcgaagccgccaaccatccatcaggcgtagcccgattccgtttcacccacgccgcttggccaaggcccatccggccaacgccaatggcacggacgccagcgtgaagatgaatggcagcatcatgcccacatgagggttggaggcgtcaagcacaatgccggccacggacgagccgatcgatgtgccgaccgtgcctgcggtggttacccagctcagtccttcggtcagggattccgccggcaccagatccttgacgatgaggttgccggtggcgaacgtcggcgagacggtcaggccggcgaggatttcgaagacgcccagcaggatgagattgtccattgacagccggaagaacacgtagccgacggtcagcagcgataggaacatcaccatatgcgcccaatgggagcctttgagtcggcaagagccgaacaccagcgcgccgatgcacgagccgaccgcgaacatcgccaattgcagaccgaggaagggctcaagtcccatggatttcatggtggcggtaatggacacgtcgaaggacgtgaagctcatattgaacacgatgaacacagcgagcaacggcagtacgccggcatagagcaatacgctcttgggcttggcgccgctgcgtttgagctggcgcagggtcagctggtcggcatcttcgcttgcagcagggctgccgtcatcgtgcgcggccacggtgacctgttccacgataaccggtggctgggtggatttcagcgagaagaatatggtgccgccgataccgcatgccacggtgggcacgaacagttgggataccggatgcacggaggtggccagccaagccgccagaatcggccccagaataaagacgatctcgtcaatggcggcttccatggcgtaggccgtgttgagcagctgttcaccatcttccacaccgcgcaacgcataggaccagcgtgttcggaccaatgcgccgaatgagaactgcgtcagacccatgatgatggccaggacgaacagcagcggaatcggcacgcgcaccaacgccgcgaaggcgaaggcgagcatggccacgatctgcacggcgagcgcaagccggcccacgcgggcttggccgaaacggtcgaaggcgcgggcgtagaacggggtgacgcagctcatggccagcacataggcggcgctcatggtgccggcgatggtccaattgtcgtagagatggttgagcgccagaacgatgccgagactcatcatggagatcggcaatcgtgccaccgcgccggacaggcagaacgccttggctccgggcagcatgaacaggcgctggtagggcgagtgggcagcggacgacttcgaaaccgcgcgagtcgtggacacaataactccttactggtgcgttgtccggcacgtgcgcccgcccacacgtgccatccgagggtagcggttccctagcaacgtcacgcggtgcgtttcaaccgcggaccggtacgtggccagtcgtcttcatcgtcggagatgccttgcgatgcataaggtctctccaccggtgaaggccgtccgatgctgtacaggtcatgagcctttgggctcagtcgttgtcagattgttcgggaatgccggagctcaactcggtaaggatttcctgtttggatttcgcgcgggcgtgaagctcgcgcaagccctcgtcgggctcactgacatagtagagagtggcgtcgatactgtccaattccacaccttcgaccgctgccagcagcagtcggtacatgtcgagctgggcaagtttgcgggtgatgtcgtctggcttggtgggccgacgaccggttttccagtcgaccacggtaaagcgtgcggtggtgctggacgggtcaagtccaccgatgaataccgcatcgagtttgccattgaccaggcccacgcccggcacgtccacgacgatggcacgctccgtccacgccgggatgcgcttggcccacgatgattcggccagtctgcgctgccacgccaccagcttggactcggtggcattgtcgctgcttatggaagtggcggaggcgacggatgcgacggaggcgacggatgcgacggatgcgacggatgcgacggatgcggattgttgagccgtgggctgtgggacagcaggctgccgtgtggacggcttgcggcattgccgctcccgttcggccaaatcggccaacatggcttcccgggaaacgaatcccgcatcctgacctgtatgcggcatacttggttcggcttcatatgccagtaccgcttcatccggcttaccggcattgatgaattgctcggcccacgcatggaactgcgtgccggcctcggccgccggagacgatatgcgcggaatcgggcggataatgctacgccagtagaggcgctcctcccgttcgctcatgccacctacgcgggcttgcaggcttgtcacgttctggcgtcctgcggccagaacgcgttgcgccttggctttgactgcctcatcaagcgactggccgctggcggcatcggccatcaaatcggcgtcgtccaccagcaattgtgcccgttgcaggagtgggccggtgtcttggtgctgctcaagtggcgaggaatctgcggctatgacatcgatgccacgtgacagctgttcatgcactgcgtcgctgagggtagccggccacggcaattcggcggcggcattcgtctgcgtaatcggcgtttgccacgcctcccccaccacggcgtcaccgtatgccgcggcatgctctccgataaagaacccttcgggagtggcaatcgcttcgccttgcgccgagatcagcatgggcttcccggcattggcggcttgcagccgttccacacagtcctgagccgatatcgcatgttcacgggcttggagcgcgtcatgcacttcaagccagaaattggatggctgagcggcgtgagagcctttgggcaccactgacgggtcccgcccggattcacccgtataggcgcaataggtcatcagggcatcttcccgtgcacgggtaagcgccacatacatcaatcgacgttcgtcggcatgcagccggcgcccatattcctccgcctgcgtcaaataccagccggatgcatccacttcttccacgccatcgccgaattcgcgcatggagccgaacacttcatcatcgataagctccacatcatccaaagccgccaacgatgcgatggggtcggcttccacatcggcatcatgggggaatcgcggcaaaatgccggcatcggcgcgcataggcacgggcacggcggtggggttggtgagccaggagtcggcggtctcgtgatattcgggtgcggtccagtgaccttgctcggtgcctcccgtatggtgttcgtccagcacgatcttgagatggtcgccctgattgctggggaatccgccggcggtaagccccactaccgcaacggcatcccattccaaccctttggactggtgtacggtcatcagttccacatccaccggagcgtcggggagactggcggcttcatcctccaccgaagccagatgatccacccatgtgatgaacccatgcaacgagggagtttgctcagcggcaatctcttgcgtgtacgtatccaccaaatccacaatcgcatccataggcatatgcgccaaagcgggattggcgcggtgctgcggattatgcagcacaccggccaatacggtgtcgatgtcaagatccaacgcttctatgccggcgcgaatcacgtcgcccagtggccgcccgacggcatcatgcacctgacggagcatcaccgcggcccgggttatggcgttgcgcccgtgtgcgctcaaccgttcaagcagttttaccaggtcgccgcgtagcaatacgtctggcaggaataccgcattggccacctgatcgcggtactcacgcaccacagccgcccattcattcgctggtgtatccggttgggcaaggccggcctgcaccaatgcttggaagcgttgttccatgttctgttcttcagcaaaacgggccaacatggtcaaatccgctgcggacatggtgaatcgtggcgtggccagcaagcgcatcagcgatcccgtatcggtgtggtcggcggccacgtgcagcaacgccatcagatcgcggatttccggacgttccagcagcgcggaatagccgaccacgaatgtggtcaatccggcctgttccaatgccgcctgatattcgggcatatgtgatttggaccgaaacagcacggcgaccggcgctttctgttcgcccggcatctgttcctgttgttcggctgcggaacggtgccgtgcgatggccgtcttgcagaaacgcactacggcgtcgatctcctgcccggccgtggcgaagcccagtactcccaatgttccttcgggggcatcaggcatggggtcgagcgatgagacatcgacctcacgcatcaatgagctggagggacgcgacggattggagcgcaacggcagcgtgagattattggcggcttcgagcactatacggctgttgcgcctggtgacggacaacgggaatggcttgtatccggcaggcaggtggaaatcttgctggaacatacggaatgcaccagggctggcaccacgccatgcgtaaatcgactggaacggatcacccaccgcgttgacggcggacctccgtgacgcatccacatggaacagtgctgccagcagagcggcctgcgtggtggaggtgtcctgatattcgtcgagcagcacatggctgtacctgcggcgcgtgcgctctccgatggaggggaagcgctcgataagctgatacgcggcaatggtgaagtcggagaattcggccatattgcgttcccgcttggcttgggcataggcctccaccagctggagcagaatatcgcgtttgcgtgtggtctccagcagcgcaccgcaatgataggcgcagcgggcgtgcaaatgttcggcacggtcatcgagcttggcttgccagctggcgtcggtatctttcttcagtcgtttgatcttggggattttcggctcgtcctcgggcatgggttcgtctacgacggcttgctgcaatcgattgatgaatgccgaatcccattgccgtacttgattgatcgcatcatcgaagctggtgcagccggcaccgatcatggcactgccaatggcatccgacaacgccagaacacggttcgccaaactggagaaggcgccaaaatcctcactgaacgccagatccatgtgactgtcgatgacttcggtggccagttgaagcgctccggctgcgctcaatggttgcgtgttctgatcgaatccgacaagcagtccatattggcgcacgatggtctggaagaaggcgtcatacgtgaaaatggccggcttgaggaatgcccgatcagacaccgtggcggtcgtagagcccgccatatcaccggccactgcggcggagacgcgttccagcagttcgcctgcggccttgcgtgtgaaggtcaggccaaggatgcgttcaggtgccacacctcgattgataagcgcgatgatgcgttgggtcatcgtaaaggttttgccggaaccggcaccggcaaccaccagtacgtcagcatcgactggcgcatcgatgatggcggcctgttccgcactgggagtgaacgtgctcatgcttgcctcgtttcgaaaatcgtgtcgatctggcccgcacaggcagggcagacgttcttcatacggcagaatccgatatgggtgtcttgcggatgggcctcgatgatggccgacctgctggccgccgcggcatagaatacgcgggcgatcatggtcagcgaccataacgtctgcgtaccggcgagcgcggcgaattgcgcccacgcttcggcactcacaccttcgggaggagtagccggatctatggcgggtatgtcgaagaaacggttggggtctttataccagtatcgtggcgtgaacggttcggcattcaacgaaccatcagtgaacagcggcggctggaaggcaccttccggggcgtagcttctggctggtgccgcattctgcccgacatggaacagcgcgctttggctgatatgcggcattgcggcaagtgccttggcaccgcgcggcccgtcttcggggaacacgaggccaagctgatagcacacgagctgcagatcattgaaaatctgtttgaccgtgggcgttctgcctgttttgtagtcaatgaggcgaatgcattcgccgccgtctgcgagtacgcgggtttccatacggtcgatgcgcccggacagtctcacggtcagatgctcgtccatgccttccggccaccctccgaccagtgctcccatcagacggaccagcatgttccgatcgatcgggtgcatgccgggcacggcattgtatgcgtcgagtatgtcacgcacatcgaatcgtgcggcaaactcccgttcgcattcggcaccggccaatgcgccaatgctgaagttgctggagttcttgccaagatacgtttccggatcggcgtcgctgcgcacaaagtaatcggcgatgttgcgcagggcatctgccgcggactcgtccttacgggtggcctcatagcggttccgggtgtcggctatggcattcggatcggggcgtttgctctgatagatggcattaagccgtgccgtgacagcctcgatgcggcgttccgtgccggccgtggagtccaagcccagtgtggccaacgtctgggcattgtgggaaagatggtccagcccttcctcgctgccttgctgtgcaaccgcatggatgagggttccgaagctggtggccacggagctggggcgaggaccggcgaaccggttctccagcatccagcacaccggacatgcccataggctgtcgaccgccgatggagacagggtgaccatgggtgcggcctgcgcatccgtcttgcctttccccgtttggataccgtcagactgtacaccgccagatgacgcgctgtcggatgaggcactgtcggatgaggcaccgccagatgacgcaccgccagatgacgcgctatccgattgggccggcgattccacgaacgcccagctctgcggatttgcggcgcgcacaccatgctccgacaggagtgtcaacgcaaccgcggcgtcctttgcggcagcctgctgcggttgagcagtggccagaaccgcgcgggcggcgctgaccaacccacgtgggtcggcgtccaatccggccagatcatattcggcggatcctgtatgcgcccccactgtggtgaaaggcgcctgttgccggttgcgcggatagtattccggcagatacccgaaaagaaagtccgaggggctcatgctgtcgttccataccgcgctgatcatgattcgccgtgcacgggtcagcgcgaccaggaaacccttcttctcgcccgacagcacagccgcgaaccgcggatcatgcccggttttgtcactttcttcaagcgctcccctcagcacgagctcggcaaggtcttcaccaccgaacatggtgttgcgcccggcgaggttcggccacacgtcttgctggaccaccggtatccacgcatatccccagtggcgtccggccgcgcctgccggcgtggtcaatgtcacagcgtcttccaccggccctatgtgggccaaggaatcggcctgcacttccatgccccgaacctgtgccatgaatgacgtgatgtctcggctggcggtggaatcatcggcgaactggaacaggcgcattgccgcgtccagccggtcattggccgtgcgcccctctgccgtgttgaataatgccgcacgctgccagaccggtgccagaccggtggcgttccaggcaacagacagtgcataacgcggctgtacgcgctggcttgccggcagccgctccaagccggaagcaacgctgcccaccagatgccacaggttcgcaaaagcgcgggcctgagggtcgttgccaagcaccgcatggatggatgcgagcgcagcctgcgccggcgcggcggcatcatcaacggcaagcatcacgtacagcgcgtcaacgccaaaggccaagtcatcgtcggacggttcaccgagtatttcgacagacactggcgacggaaccactgatgaggatgtttcacgacctgtttcacgccgtgtttcatggtatgtttcacgcaatgtctcccatgccgtcgtcagagaggtcagcatggcatcatccgtggcgagatgcgccagcgactccagcgcgctcatggccgattcgatcggagcgagccttgcaggacgcccttgaccgggtctgcccccggcactcaccaacgggccgttcatcaacgtggccactctagtccttatatatgccgcgcaggaagccaacgtcatctggcattccgccattccctcggcacgcaatcgggcaagctccacaagcgcgaacaatccctgcacgaaagtctcgtccttcaaaggacgggtgaccgacgaataccgcaccggcacgccatctcggcgcagtcgttcgccgaacagccgcacggcggcattgtcgtgggtgatgaccgccatgtcgttccaccgaatatgccggtcgagatgcgcccgcttgatgcgccagaccacatcatccagctcctcacgtgaggatcggtacaggccggcggtcaccgtgccgtccgactgataattcgctgcatcgactccgcccagcatggcggtcagcttgccgggacgctcggccggaggcagcggctcgtcttccggcgagggaatcgacagcgaaatacgagacgcgatcacatcagccatcgtcatgtgcgactgatcagcgccggtactgccgccaaccagctgttcttccttggctttcagccacccttccacggcacggcgcatcagatattccggatacgatccacggaaggtctgcaccgattcatccgggttgccgaccagcaccaacttgacgccggcattccccaactcctccaagaagcgcatgccggccagcgtggtgtcttgaacatcatccacaaccagcagccggggcaagcccaacgcctccatacgcataggccggtcggaatcatccgcgtgatcggcggcgaatgcctcatgcaccacacgagctcctgccaccagcaaatacgaggcatccaaacggtattgccccggatatgccgcgctttgggctgcaatatattcacggcgcaacgcgaaagccaaacgccattgcaccgacaatcgcgcgtcctccgtcacggcgtccaagagacgtggctcttcgtgaacgcctacaccgagctcgtccaatcgggccagcatatcgcgcaactggccgataaacgcatctgaaataccgcaagtgaacctatccgcgctggtcgagccgcctgccgacgtcggagacagcgaatccgacccttgttgcgagaggcttgattgtgcggaagcggccgagccgggcatctcgccggcaccggcatcgcgtatgagtttcgcccagtcatcctgggcaaagtagacgcgtagcaaatcacaggtgccgcaatcatctcccgctacggcatggcgcagatgcacggccatgacttgacgcagcaaagcatcctgttccgcaccgttcaacaatcgaggcgacggcaatccagttccctcgcgcgaagctgatatggcccggaatgccacggcacccagcgtggtgaccggcctggcctgcacggaaaacccgagctcacgaatcacccgattgcccaatgcgtcggcggccacacggccggatacggccatcaccgcctgcgtgccaccatagcggcgcagccccgccatcaacaccgataaggcgaattcggttttgccgcttccaggcgtgccgacaatcagcctcgccgctccatcacggtcgatgccgtccagcactgttccaggttcaagtctcgtcatcatggctccagcctaaacccgaccgtcacagagggaaaaattttaccgaacccgacgaagaatcgtacccttgacggtatcctgtagaacgaatgcagggagagcgcattttccaaggagggagggaacagatggccaatattccgatgaggccgccgaagctgcccggatatgatttcgtccagatgttgggaagcggtgccaccgccacggtgtacctatataaccagcgtatgcccgcacgcccggtggcggtaaaggtcagcgccaaaacccttgacccacgggccgctgccctgttcaaccgcgaggccaacttcatggccaagctgtcatcccacccgtacattctgccggtatatggtgccggcgtcacctccgatggccatggctacattgtcatcgaatatgcgccgggcggcacctacaacagcatcatgaaggcccggtccatgacctgcgagcaggtactcgacctcggcatcaagctgtcaagcgcgctgttcaccgcgcatcgcagcaatatcatccatcacgacatcaagcccagcaacattctcatcacctcgcagggtttgcctgttctgggtgatttcggtatctccaccgatgtgtatgaccgtaccgaaaccggattctcgccgccgtgggcaccgcctgaagtgcttcagcatctgaccaatggttcggaagccgccgacatctattcactggcggccaccctgtacgccatgttcgtcggctgctcgccattccagcacgaatatcatccacgttcgcaatcggaactgatttcgctgatcgtcaatcagccattgcctcgcctcaaccgccccgacgtaccggccgatgtggaagcggtgctgcgccgggccctgaacaaggaccccgaccagcggtactactccgcgttggagttcgcacgcgccatgcagcgtgtgcaattcgcatatttcgggcatgccactcccgttaccgtggaagggatgccggcctaccccaaagacatcgagcgtcggcgccgggccacggaccagcgagatcagaccacccgttcgtcacggcgatgggtcaaaccggtgggtattaccgtcggtatacttgcggcgatcaccgcagcggcactgatattcgccttcgtggtcgttccccgcatggacagcgccaccggatcagataccaaacaggtggcgacgcccggcaccaaggatgatgacaacaaccgcaataatcaggatgacgtgatcaccgataccgcgaacgcccagattccttccccggagaatctgaacggcacctatgcggcggatgggtcatccgtgacgttcacctggacgaatccagacccgcaaagcggtgatacctatgcgtgggccatagtgcagggcagcaataccgaccagagcgcgcaaaccgtcacaacgtcagatcccacggtgaccgtcaacgcgcaggaaggctcgcagacctgcattcaggtgtccattgtgcgcaagaaccgccagatgtccgtcagccccgccatcgcctgtgcggccaagccgcaagagtgatccgctcgccactgccgggcataccaccttggcattgcgtatcgcatcaggcatgcgcccggcagtggcgaattcaccaaatggacaacaggaacggcaggtattggaaccgtaaagcgttgtcattacactagcaaccagagaaaccagggttcagggagttcagatggccacatcgtcccagtcatacgatcgtcgccgacgcatcagcgcggctttgcgccgccttatgccctccggagggcatacgtggacggttcccgtaatcacgctcctgctgcttctgggacttgttgccggcgcggtgatcatgagcaccgtcacgcgccgccatgtgcaactggacgatggcaccgtgtgggtcacttcgctgaagaaccagaaggccgcacgattcaacgtaaagaacaaggaggccgacgccggcgtctcctcctccgccccacgattcgacatcgcgcagcataatggcgacaccatcctgaccgaaacgaccaaagcctccaccatcaaggcatccacggtcagcaccggtgtcaagactgacatcaaagccaacaccaccactgtggtcggcggggataccgtagccctgatcaacgagaagaccggcaatgtgtggaccggcttgtcggaaaaccttgattccgtggcccccaccacttccgatccgaaaatgaagctgggcgagggcgggcgcatcgtagtaacccacgatggcaaggtctacggataccgtccatccgacggtatggtgctgcgtcttgacaatcccagcagcgccaaggccaaaaccctcgaatcgctgaccgacggcaagcagcagaccgttgaaagctttaccgtcatcgggagcacgccggtaatcgcaaccggcaaaaccgtcatattcaagggcggccgcgtcgatgtcgacacgaccggcaccctcacccttcaggagcctcccaccgatgacgtacagtccgattgggcggccgcggcatcaccgagaggccttacgcttatcccgttgaagtccaatgccaaggcgaatttcatagccaacgggggcaaggcgaatccggcacgaccggtatcgtccaagggctgcgtgtactcggcttggagccagaaggccagcaactacattcgcgcctgctcccccgcggataccagcgtcaagccgcaaaccctcgaatccgtcaatactacttccgaattggtgttccgcaccaaccatcgccttgtggtgctcaacgacacggttaacggcaatgtgtggaaccctgaggattccaccaaagtcatcaaaatacagtggaacaaaatacaggccgagcagaccgagaaagaacagcagaacaacgactcggccaacaaccaccacgacttctccaagacctgttccgcacaatccggccaaatcaaagccgaggatgatgaaatcggcgcacgagccggttcggaacagattctcgacgtgctgcgcaatgacgagcagaccgattgttccgtgcttaaaatcaccaaggttggcgcaccaaacaacaaagacgtcaccatttcgccgatttacgacggccggtatctgcaactcgatgcctccgccacatccgcaggcaccgttacctttacttacgatatttccgatggccgcggccagacctcttccgccacggtgaccgtaaccctgaatgatggaggcaaccacgctcccgtacagttcgacactcctcccgagatcgatgtggagcagggagccagttataccgccaatgcgctgagcagcttcaacgatccggatggagacccgctcactctggtctccgctgtggcccagaacaccgacccggtgcaggtgtccacccgagccgacggccagcttacgttcaacaccggtgcgctggcgtcgggacgcgtgggcgtcgaggtcaccgtctccgacggcacggcgaccggcaccggcatggtgtatttctcggtcaagcccgcgaacaccttggccgcggtcatcgacccggtagcgaaaaccaccgttcccaacacggataccgtcgtcaagctgtcctcttacgtgcatggcacttccttgcagccggcacagctgactcaggtggatacgcccaacggcgcttcgacgaccaccaatgcggcggatatgtcgttgacgttcaaggccaccaatcccggcacctattatgtgccctacaccattactcaaggctcgattccggccaccggattggctcgcgtcgaggtacagcccgccaccggcgaggccgccaaaccggttgccgccaacgatgtcgccctgcttggcgcggataataccgccattgtggagccgctcaccaatgacgtcgatccgatgggcggcgtgctgtccgtcaccacggtgagcgcaccggccgactccggcatcaaggttggtctcgtcagccataagcgcgtgtatatcactgcgcgtcaggtgcccacgaaacccgtcgcccttacctacaccgtggccaacgcctccggaaccgccaagggcaccatcgtgttgcagccaccggctctgaccacctcgaattcagtgcccaaggccagcaatatcaatgcccaggtgcgcaccggcggcatcgtgtccgtggatgtgcttgaccatgtggcctactcggatggcaccacggtcaagctcaagaacaacctgcaatacgacaaggagacgttcaagggtctggccttcgtctctggagacacggtccgctaccaagcatccagcgagaccggcaacttccccatcacctatacggttgaagacaatctgggtaatgtggcttccgccaatatcaccattaccgtgcataagagcgacgcagcgagcaaggccgcgccaaccccgcatgacgccgaagcgcaggttgccgccggacagaaggtccgcatccccatcacactgaccggcatagacacggatggcgacgacgatcagctgttgggtctgggcaacaaggcacccacgctgggccgcatatccgaagtcggttccgactacttggtctatgaagcgtatccggattcgtccggcaccgacaccttctcctatgccgtggaggattggaccggtcagcgcgcacaggcgcagatccgcgtgggcgtattccaaggatcgtccgactccggcgtatacgccagggatgacgaaatcacgttgaggcccaatacggccgcaaccgtgccggtcgcgcagaacgacatctccggcgacaacaccaatctgaccgtcgacaagcatgtcgaggtccaaggtctcgacggggtgagcgcgaaagacaacatgatctccttcaccacgcccggcagcgccaccaccgcctatatcgcctacacggtcaaagacaaggccggcttgtccgatacggccaccctcacggtaaacgtggatccgaatgccgccatcgagccgcctaccgcctacgactatcgtgtgccgtccgccgccaccatcgataagaagtccgtggatgtggatgtttcccagtggatcgccaatccttccggcacagccaatgagctcaaggtcggcgtgcatccctccgccagcgctcacgctcacgtcaagggcggtgagcattcgaccaccatcaccgtcgacctgacgtcacaggcgcgagccgtgccttacacggtgaccaatacgaaatacaacatcacctccaccgcgttcatccaggtaccggcctatggtgtctttccgcccacgttgcgtcccaaggcaccggaattgaaggtcaattcgcgtgagaccattgaaatcaacatcaatgactatgttcgcgtcggtgccggcaaggaaccgtatatcgaaagcgctgattccgtcagcgccaccaaggcttccaactccgatttctacgtgaacgacaagaccctgaagttcactgcggcaaaagactacgcaggccccgcctccattacctttaccgctgtggacggcaagcagggatcggataagaccaagatcatcaattccgcagtgatcactctccagatcacggtgataggccgcgatgtgccgccgcccacgttctcgtcctccactattgatgtcgaggcgggcgcggaccccaagaccgttgatctgacggcgctcacccatgcaccgtccggcgtgtatgacgacgagaagcaatacacgtattccggcggaagctcatcgtccgggcgaatcaccgctaacctgtcccgttccggcagcttgcaggtttccgccaccaaggatgccgctcctggcaccaccgcgtccattcccgtgcaaatcgcatacggcgcgggcaccgtgaatgccggtgtgaccgtgcgcgtagtgtcttccacccgtccgctggcacgcgtcggcgacaagacgctgaagatcaaggccggtgccagcgatgccgtgaacgtgcttaccggcgcgtacaatccgttccccgattcctcgctgaccgtcatcagctgcaaggcggatgacgccgccaaactcactatcgccggatgcgatgcctccggaaacgtcaccatcgccgtcgcatccgatccgggtgcttccacgaacaccgtgctcgtcaccgtgcaagacggcagcaagtccaaggatcgtgaagtcaccgcatcgattaccgtgtccgtgatcgacaagcccgagccgccactgctctcccccgtagccggggaaccgcaggacagcgcggtcagcctcacatggacgcccggtgccgccaatggcagcccgatcaccaactacaaggtcagttggaccggcgccgccaccggagagaaggattgcggtgccgtcacctcatgccaggtcacgggtctgaagaacggcaaaacctattccttcaccgtcgccgcgcgaaatgacgtcggttggtccaaaccgtccaccaccgtcgaagccacaccggacaaggtgccgtccgctcccaccgatgtcacggtcacaggtggcaataaaaccgccaaagtgacgtggaaagcgccgagcggtgatttcagcgccgtcgacaactattcggtgaccgtcaccggtgcaggtgctccgcagaccaaggaaaccggcaatacggccaccgagctgtcgtttacgttcaacaacaacgacatttccgatggcaccgccattacggcgaccgtcaaagcccataacaaaatcaattggagtgccgagtccgcctcatcacagccaaaggacatctggggagacccggatgcgccgaccattgcgctgtcgaacgacgacaccacaggaacggcgaaagtcactctcggcaacaaccgcaatgccggctgccggcgaatttccttgggaggagacgtcaaggacaccatcgattgcagtgacggtggcgctacgttcgatatcaatgagaacgatttgaacacccgggaaatcaccgtaacggccaccgtggtgccgcagcgcgatgcttccgccggcacaggcaagagcaggtttgtcccgcagtacaatgtccagccgcccactgacgtctacaccaccggatccggcagtacatgcaccgtgcattggaccaagcaggggcatgcgcagtcctacaacgtgactgccgatggcatcgattccggtacagctactaaccggaactcactcgacttccgaatgagtccttgggccaaatgcaataccgcatcggtgcaacaggtgttcaacggcgctaccagcgatgccgccaccggaggcccgtacaatggcgctccttacacctatgagaagaaggctgtaatcaacaaaccgcaggagctgcgctggtcagacaacgctcacgtcattaacgtcaccggcggttcggttgaggtctatggcaagcaggccaccgtacaaatcatcatcaatggccaaccgttcacgtggaaccccggccagccattggacgtcaccgacttggccgtggccgccgatggcaactacacgtggagcgtcaaagtcaccggcgggccgggatactccggtctcgacaatacggcggacggcagcagcgtcgcgggcacacgcccctctgattcctcggaggggaccgagtcgctcaaatccggtaccgatgtcaccactttggccaagaacccttggattcttggtttcggtaataccccaatatcgtcaaccaccattcacaagcagtaggagaacatccatgagcgagaacatcgacgacgcgacgcagctgtctgacagcacgcagctatccgacgccacgcacttgtccgatgccacacatctggcatcggaaccgcacactggcaccaccccgaacaccgagacggcacagcaacccgttgcgttgcctaacctgccgcagcggccgtcacaagcgtcgtcagaaaagccgtctcctactactgatgccgcctccattcctgcgggcgatgacagcaccgtgctcaagccgcgcaaggacgcgacgccagccatcccgcagcaggtcggcatgccggcaaagaccagcacgcccaaagtcgcgcttccgcacttcggacgtaaatccggcaagcaggccgctactgcgaatgctgcccccgccacccagacctcccgtcaatggacgaccacaaccgccggcaagaccgcagcatccaacgccgaaaccgtggctggtcgcgggccggtagccaatcagcaggccgccgcgcaatcccagccgcaatcccagccgcagcgtcagtcgagcaaagccgcgcaagcagccgcatcggcactgcccgccagcatcaattccggactactgccccagcccacggctcaggtccgggatttccagcagtccttcaatgcgctggtcgagaatgtctccaaggtggttatcggcaagaccattcccatcaagcaatgcgtcaccgcactgatggtcggtggccatattctgcttgaagacaaccccggcaccggtaagacccagttggcccgaggcttggccaactccatttccaccggtttcaagcgtattcagttcacgcctgatctgctgccttcggatgtggtgggtgtgactttctacgatcagaagcgcggagaattcgagttccgcgagggcccgattttcgcctccatcgtgctggccgatgaaatcaaccgtgcatcgccgaagacgcagtccgcacttctggaggttatggaagagcagaaagtcaccgttgacggcgtcacccatgatgtaccgcagccgttcatcgtgatcgcaacccagaaccccatcgagcagctcggtacctataagctgcctgaggcgcagatggaccgcttccttatcaagacgtcgattggctacccgggccatgatgtgtccgtcgatatcctcaagcaggtcgatatcaccgaccgtgcgcagaccatttccccggtgctgagcggtgacgatgtcatgcggctgcgtcaggtggccaccgaaatctatgtggatgatgcgattcgtgaatacatcgtcaggctcgtcgaggcgacccgccacaacgagaagatcacagtcggctcctccatgcgtggcgctttggcgctgacccgatgcgcccgtatctgggccgcggccgatggccgtgcctacgtggtgccggatgacgtcaaggaccttgcagtggccgtgctcgcacaccgtatcacgctgactccggaagccaccttcgatggcgcgactccggaaagcctgatcgcacaggtgctcgaagacgttccctcccccaccatcggttcctgatagggcctggaaaggtatccgaccatggcatctacatccgccgcattacgccgtcgccggcgcgctgaacgcatgttcaagcgcgcggtaagacgcatcagacggttcttcgcatcctacgtctcgcccttgggctgggcggtaacgggcgcaggcatcgcatgtcttattgcgttcctgcctctgggctggtatgagctgctcgtattcggcatcgtggcgatggtgatgatgctcgcggcaatcgcgctttccctcggcaacacacgcttccacgcgtccatcgccgtatccgatcatcgcgtgaccgtgggagacaccatatccgttatcgtcggcatcgacaacaccggcagaacgccgacaaccacggcacgcggatatctgccaatcggcgatgcgcatgaacgattcaacatccccatgctggctcccgggcaatccaagcaaaccgatgtggagttccgtacggtatcgcgcgcaatactgcccatcggaccattgcgcatccgcaagggagacccgttcggcctggtgcgtcacgaaaaggagctggccgaccgcatcatcgtattcatccaccctcgtaccgtgcgtctcgataccttgaatgccggcgtgccccgcgatctggaaggccaaccatccggccagatcgtggatgatgatctcgacttctacggattgcgcgaatacgagccgggcgacgacgtgcgtaacgtccactggctgagctccgcgaaaaccggcacgttgatgattcgccaatatgaagccacgcgccgcaccgacacctcggtgaccatcagcgtgaacccggatgagtacgtcaacggcgaggaattcgagatggcggtgtccatccactcctccatcggcgtcaaatgcctgctgcagaatcgcccgctgttctgtcacgcgggcaacgcgcacggccagccgcgcaacgccatggagttcctcgacaacgccagtgccatagagcctgatcgtgaggacaatccgaatctcgccgagggcacgctgaagcacagtcctgatgcttcgttctattttttcactgttggatcgctgaaagacatcgagcaaatcaagcgcatgaccttggccttgccccgatcggccagctgcgtggtattgcaggccagcgccggcgccaatcgcggcatcagaagattcgccaacttcacattggccaccatcggcgaactcgatgatctcccactgatcatgggggtgctcgcatgaccttcgaccagtccagtatcaccaataccaataccgctgcgtacgccggatcgagcggcacatacaccggcacttcctccggcacgtacaccggaacctccaccaccaccggctcctgggccgactccacacattcggttatctggatgaccagaggcaatgtgcttcgcggcatgggcctcagtcgccagccgtggggcaaacgaatcaccagcctcgtactcatagcggcgatgatgttgctggcgcaagccaatctcatcgacgtgtacggcggcgtggccacttgggcgatcgccgccgtaccggccaccttgctgggcgcgatcatcgctctggcgggcatgttgccggcgttgcgactgtggtggcaaatcgtgtttctggcgtttgcccaattcatcatcggtccggtggtaacgctgagttccaccacgtcccattacgtgattcccaccttgaagaccttgagttcaggttgggaaatgacgtttggctcgttcaagtacattatttccgtcgatccgcctctgggcacgcaagacggcgtgctgctggcggtatggaccatcggcctgtggcttacgttcctcaccggcgtgtttgccattaatgccaacgcatggttgtctctggtgggagtgccgccccttgcggcggccgtggccgtatgtgctctgctgggtacggacagcggctggcaacgtgccatctgcggcattgcctttgccttgctgctgattatctggctgtcttggcgtcttgaactgctggaatgggggcgctggatatccgcgctgatcatcgtcgtgctcgctgccggccttgctttcggaggcacgttgctggtgccgcaggaccgtttcgtgctgcgtgaccgctacgatccgccgttaagcccctacgattacaccagcccgctcagcggcatgcgatcctatatcaaggaccacaaaaaagacgtgttgctgaccgtccataatctgccggccggaacaccagtcaaacttgcggtgatggaccgattcgacggcacagtatggaacctgtccgattcttccgaagccacggactcctcgaattatcatcgcgtgggcaccacgatcaaggcggatgagcagggcgaatccttcactgcgaccttcaccgtcgatcagggattgaccgacacctggctgccgctggcgggagcggccactggcgtgagcttcgccaacgatgccgacaacggcaatgacacgttctactacaacacggataccgattccgccattattcccgccggcacgcgtaaaagcctcacctataccgaatccggcattatcgcccgcaagcccaccgataagcagatcagcagtgcggccgcggcccgcatcacccaaccggaagcccaggatgttcccgattcggccagcaaactggccacgtccattgccggcggacagtcctcgggcggtgccgcagccacggcgttggccgacacattgaaagactccggatggttctctcatggactcgaaggcgattatccctccgatgccggccatggcaactaccgtatcaacaagctgctggcaggcacggccatggtgggcgactccgagcaatatgcctccgccatggcactgatggctcgtgagctgggactgccctcccgtgtggtcctgggcttcctgccgaaaaacaaggatggcgaaatcaccgatgcccgcacggagaagacctcgggcaatggcaccaaaatcgaattcaccggcaacgatgtcaccgcttgggtggaaatcaaattgcagggcctgggatgggtggcgttctatccgacgcccaaggagaccaaggtgcctgatgaaaaccagaacctgacgccgccgaatccgcagacgctggtccggcaaccaccggtgccgttgaccgatccgctgcgcgatcagacgcaagccaggggccaaagctcattggcaggcgccgacgccgatgattcgccgaccaacctgttctgggtgcggttctggcgagtgacccgcaaggtggccctgtacggcagcccattgtggaccctactcatcgtctgcggtctgattctgatgttcaaggccatgctgctggcgcgagcgcggcggcatggcagtccgaaagcccgtgtggcagcaggttggaatgccatacgcatgcttgccgagcaaagcggcatcacagccaagggcactcgtcgagatcaggccggtgccatcgcccgtcaactcggcacagatgaccaggctttgatccagcttggccgggaagccgactacgccacgttctcggggcaagacattgaatcgggccaagccaccacatattggacaggagtcgaccaattgcgcaaggcaatgctcgcttctttgccgcgtttcaggaggatacgtacacgactttccctgaaaagcgtggctatactgtcaaatagacacgcagccaagtcgcacacgacgcatgtcaagcgcgcgcgtaagaaggggaagacgtcatgaccacaggctccatccgtatcgcgatgaccagtgacgtgggtcttaggcgcaagaacaaccaagacaccggattcgcccaacagggcgtgttcatggtctgcgacggcatgggcggcggcaaaggcggcgagcaagcaagccagttggctgcccagcatttcgcgcagctggcttccatgccctcgcgcacccgccatgacatcgacgacaccctggcacaggctcagcacgacattctcgatttgggtgaccgtctcggcggcgtggccggtacgacctgctccggcctggttttgccccagccttacgcagatgccatcaatgcccacagcgcagctccgtttgacgatgccgactccccggatttctcggaccagacctatgtggtcaatgtcggcgattcccgaacctaccatctcagcccgctgccggatgccgatgcccccgccacggatatcatccccgtgtgggacgcctcctcgctgacccgcatcacgcgggatcattcccaacgccaggaggctatcgattccggtcagatgctgccggaagaggcggaggcgaccattccacgcaacatcatcacccaatgcctgggcgatccggacggcatagtgcccgacgtatatgttgccgatctgaccggccgtttcatcatctgttcggatggattgcacggtgaagtgtcagacgaacagattgcggccatcgccgcagcgcattccagtccgcaggaagccgtggacgccttggtggcggccgcgctcgatgcgggcggaaccgacaatatcactgtgattgtggccgatatgccactgaccgaacccgaacatcacgcgttcagcgcttttaaactggacgagggcgaggacattggcgccattgaagacgcaacactacaaacactacggaccatacgttcggcataaccgagcgaacataaggaggtaatcccatggttgattatgatgctgcggtcgctgccgtacaggatccgaacgcggacccgattctgttggcaaaaatcgcctacgagaatccggaattcggcgcaaacgtcgccgtaaatccgcgttgctaccccggcttgaagcgttggatcgccgagttcggcgatgagcgcgcccgcgagaccctggcgcaatacgggttcaccgccgaggcattcggcggcccggtccaggatcaggaagccccgtcacaggcggccctgcaggctgccgagcagcagcctgcagacgcttacgccgccgaccagtacgccgcagctcagcccgctgccgaccagtacgcagcccagcagcccgcaactgaccagtatgctgccgctgcccagcccgctgccgaccagtacgcagcccagcagcccgcggctcaggcggcattcgaggagcctgtggccaccaatccttatggcttcaccgccgaacaggccctgaccaccaccgaccagatgcaaatcgcccagattgcccaatacgcgcctgaactacgcgcctgcatcgcacgtaaccccaacacctatccggcactgatcgaatggctgggccagctcggcgacccggcgatcaacgccgctctggcttcccgtcagtgaaaggacggcatcatcatggccaaacttccctaccctccagcacctgaactgggttggtattctgacgatccggtggaaggtgccctggcctccgcggccggcaccgctgagccgcagcacaatgattatgggcagccggataccggcaccgcgcaggccagtggcacttttgccgccaagcccgccgcagccacctctgcgccggcggataccacgcctcatgccgccgaaggtgacatcgaagactgggacagcaccgtgctctcctcgtcgttcacttccaaggcaccgaagaaaacgtatctgctgcataacgatgtcaccggccagaccatcgtgatcgacaagagcacactgttgggccgcaagccatccatggatgtgccgcagggtgccaaggccgagcgtatcgaagacccgacccgcaccacgtcccgtaatcacgccgccatcagcatcgataccgatggcgcgttgtggatcgaggactatggctcgttgaacggcacctacatcatcgccgacggccaggagacccaagtcaccaagggcacaccgctcaagctcagcgcgcctgccacggtgcgtatcggagaccagttcttccagttctccgaacagcagtgacctctggactgtacaggccagcgatacccccccccagatatcaataaaccgcaggtaacgtaccaagcaagctgtgagaacaacttgtacccgtacggtacctgcggtttattgttgccgttggcgggcggtcagtgacggttgctcggctatgcctataccgggctgggcggtcactgaccgctgaacgcagtagttacttcttcgagtctgacttgttatcgctggatgagctcgacgaacttgacgagtccgactccgagtccgacgaatccgaatcactctcgctttgcgacgaactgttgctcagatccggtgcggggtcgcccggggcctgaccgatggtcacaatcacgtctccgctggattccgggctccacgccatccattccatagcggcatggtcgcacaccgtggaatcatcatccaatggcaattgcgtgtacttgcccacggacttgccttgcgcatcaacgatgatctgctcatccgtggtcttcacgtatatggtcttggtcagatagttgatgcccttgaaactgccgtcggtcagcaacagacgaccccactgcggcccatccaacacttccgtgggcttcagatcggacgacagcaggaacacgcgtttgctttcgttgccgttaccatccgtctgcacgtagagggtgccgtcggagaattggtcaatggccttgacgtcctcatccttgctcagtcccagcacgtcttccaacgattgccgtttgccggtcgtgctatcgatgacaaacttgccgctatacgaatcatcggtcacatacatgttcttgccgagataccgcattcggctcaaatcacaacttgagtagtccgtatcgcagtaattcaacgggaaactcatgatttccttgttgtcttcgaccgaatacaggtggtacgaattgtctcgcaccatatatgcgtcgtacaagctcacgccgctcgcggaggcattgacctgtttcgcatactggtacccgccagaatcagtggtaagcacgattttgtcctggaaggtctgcaataccttggcagcatcgctgtcgtgagtcacacccatcacctgcgtatggttgatggtagccgactgctcactcttgttggcggtgtatttctcatcactatgccaggtctttttgatggccaccatattgcgggattcagcaagcagcgaatattcgtacccctgctcataatcgatgagattgtcttcctcggtccgcaaatcgatgcggtcggacaattcgccggtttcaagatcgacttcgtgagcgaacagatgcacgctttccggcgtggtgtccaccgccttggtcttcaccgcgtagaacacgaatacggctggattatcgccgtatgtggcggcgacttgcggctcggagtactccttctcccccgattcgagcatggatacgtggatttccttcgattcatccagcgccggcgtccagacgccgaaggcatactcgccgctgccgtccagggaatcacttgaggatttggacgacgaatccgaatcgaccgaggaatccccatcccagcagtggatgacgttcgagaccatcgcgccgccagtccacttccagtcactggcggagttgccgtcgcatgagaaatcggtcatcgtcacttcggtggctgccggcttggcgggctcggacttggtcttctgctggtctttggttgttgtcttagtctttgtcttaggtttcgatttggtggtgctggaggtagttgttggcttggcctcggccttctgatgcgcgttacgccagaatataaagcccgtgatgccgccggctatcagcgccactaccacaataatcgctatgatgattggcacgattttacggggctttttgccgttgttgccggcaccattgccgttgttgggcacgcctgcaccagttggcatgccattgttcgaggtcgggattcctgccggaggaacggcaccggcggcaccggcatacgctccgggtaccgggctgcccggcacctggccgccgggcattggaccgttcggactggaaatgcccggttgcggaatattcgtttgaggcgcattcggccgaggtacgctcggctgcggctgcggcacacccggctgcggaatcccgcgcgatgccactaccgtagcgtccgccggtaccggggctccgcaccgcgtgcagaacatcatattgtcaggaaccgcattgccgcattgtgcacatcgtttcatagttcttctcccccgctatcagcgtcatcgcttcggttcttctctgccttctattgtaggagagagatcacgaatgtgtcgtcggccagcgtgaaatcgccgccagatgccgcatattcgcatccgccgcttgccagttcgcggccacctaccgcagtgccgttggccgaatgattgtcggtgatgcaaaaacgtccgtcatccagcatgtcaatcaccgcatggatacggctgacgttggtattgccgcccatgtgaatgtccgcggttttcgatcgcccgatggtggctcgtgtggcgtgcaccgttattgctttaccgtcgcgcaatcgtgtgacggtaaagcctctggacttgtccgtgtagaggcgcagcatcgtctcgccttcgctgtcgttctcatcggcgcgcagtgctgtgctgacggcgctgacagggaggatagggcgaacgacgttgctagtggcgggaacgcgagcagcatcaacgttgttgacggtgtgagcaacgtgagcggcggcagcagcgttacccgtgttagtctcggccacggcagcagtagcggtatcacccgcggcagcggcagccgccacattggatgccacaccgcgggcggaatcttcacggatatattgttcgcgaacgagattctcacgagcgggctgcgtttcctgcttgcggggaagatttacggcaatcggcattgcaggagccggctgtgtcacgggcgaggccgacgttacaggagtcggctgtgccggtgccgcgtgtgctgccggcattgcaggagccgccggcgttgcatgcgttgacggtgccgcggaagtcgtcggcattgcggcctgttgcggcgtcgtctgaagtttaggcttggagctcaatactgtggcgccaaatcgcgtggcaccgaccatggtgccgtcagacactacggtcgcgccgaattgcgtctccgaaccattatcttcatgagtcgactgcgctgactgcgcttgacgcggctgaacagtgccgggcagcaaatacgccataaaatcatgcagagcatctgcattaaccagtgaattgcgccccaggaactcggcgagcgcacgctgatagccttgcacaacggcatcctcaagccgggtccggcgtgcatcggccaatgtctgcagcaaagtggtggcggtgttgcgatcgggttccagtcccagcgccggcaccaccacgaacagcggatacccctgtgcggagatatacacgcttttggggtcccactgcacgtacgacagcggcacgcgatgctcctcgcattgctccataacggacaataccgccacgagtatgcccacatattggccgccaggcactaccgacctcaacacgccatgcatggtctcgcaatgagtcacgtcgtaatagaagaggatttccgcgccattactttcaaaccggaacggcagcatataccaatggccttcagcaagccattgtgcctgcccaagatccaacgactcgcctcgcgtggtatgtatggtcagcgtctgagcccccgtacgccgatccttaacagtcttcgctctcatagcacttaagtctagtcctgtaccaaggccaacgctttgcggagacgcaaaactcgtcaacacagtaacacaactccggctaagtaactttaccaaaaaactaaaaattggtaagataaggttaccagttttcctcaatattggtaaggtagcattaccgttttcttgaaaggcacattatggcaaatccgatcatcgccgaaaagctgcgcgattttagaatcgaagatttccacccgattgtgccgcgcgacttggatctaggtaagccactgaccccgagagtgggcaatctggtgaaggtcatcgtaggcatgcgccgcagcgggaaaagctaccgcctattccaagagatagaggccctacatacatccggtgtcagctggaaccaaatctgctatatcaattttgaagatgacaggctcggcgacatcactccaagtgtgggcgatgaagtaatcgaaaccttttgctccatgcatcccgaaagcctagacaccggcttgtacctgttttttgacgaattacaggaaatgcagaactggggcgcttggctacgtcgcatcgtagacaccacaaaagcaacgatctatgtcaccggctcttcctcgaaaatgctctcaaaagaaatttccaccgaatttcgaggccgagcattggacttcgagcttttgcctttctcattccgtgagtttgtccgcgcgcgcggtatcgccgaatcagaattgctcagccggaacgaagcagctggatattccaccaaagaacgattaatgctgtcggccgcattgatctcctacctggaagagggcggattcccagcaatcgagggactgccaacgcctcaacgtgtgaccctgctccagtcatatgtgcagcgtgtcgtatcccgcgatgtagtggaacgttatgacatcgcgcgtccaagagttgcctccgcattggcacgacgcttgcttggcagcaacggcaagccattgtctattcgcaagatagaaaacgaattgcgttcagccggactagccaccagccgtgtgctactgggagatttattggaatattttgaagacgcctatctggtgtttcgaatgaaagacttctctatgtcgctcaaagagagcaccacttccacatcaaaaatatacgccatagatcccgggctggccgcagcctcaagcatggcaagcgccagagatgatggccaacgattggaaaacgccgtttatctcgaactacgccgccgaaccgcaggttatcgtcgcgacggcatatcgtcatgccataccaaggaacatggctatgaagttgattttgtgatgggcgatgcactcgaacatgaacaatatgagctatatcaggtcacggcacgcatggatgataatcggaccatcgagagagaaacccgcgcgctctgggaactcatggccgaacaaaagctccatgaaggaaccatcatcgtcggcgatggaatcgagcgcgaataccgcaacagcaattatgtcatcaaacaagtgcccgcttggaaatggttcgttgcgcatgagccccggtaagcttcaccggccatgtcagattcctgagatggcaaccatgatggcaaggaatatgaacagagtctcgacccagatgagttcggcggaataccacatccagaacggttcgacccgcttgctggcgcattgacgggcaatcgccacttcgcttggcagcaccgcccaagccataaacagggcgaccaacaacagcacaaaagaaatgggcacccaaccgcattccaccagcactatcgaaaagcccacccaataagccacacctgccacttgctcttagccctccattgacctgacgcccatctccgcggaaccattcaagaactggtcggcgagacgcacgtatccgggcatatcaccactgagcaacgccaatcccatgttgcgagccgccttcacgtccgcgatccatgtcaacgccaccaccgcagccgccgcactcatatccagcgcctccggcgacgaaccatcgtcacgccggccaccacgacgagccgtcatatcctgccccatgccggccagcatgatgggcaacgccggaaccccgtacccacgcacgcaatcccgacaatccgacaacacccccaacgcctcatgcagcgcctccccatcacgctcgtccaccgcacgcatcaacaacgacgccaaacgcgcgccaacaagcccacgcgccttggaatccacgaaattcctatccagccacggaccggccacaacgttagaacacgcatccccggattccacaccagccagaaccccgcacgccgcttccacatgctcgctatcgaacacatactggcgggacgcacgcaccactccggcatctaatccgatcgccgcatccgacagagcggcatcccatgcagcatcagcaacatccgcatccacagaatccgtggaaacaccaacagcatcggcaaccgaaacagaagaacccgatgacgagccaagaccagcaccggattcacggaaggccagcacctccttcatccgctccacaccccgcgaatcgaacgacaccgacacatacggcatcatgccatccaacacctccagataccgcccctgcaacaacaaatccgcccacacccgcgtcacatcatcatcaagagaccaacgcaacaacacccacgcacccatacggcacaccgcatcaacatacccctccaactcgtcagcactctcctcacccggcaacggcatccgcccctcggcaacacgaccatacgcatccaacaacgaaccatccgcccgccacaacacacgaaacagccaaccgaccattccgcttttccccacgacggatatcaccccatcaagaaaacgcatcgcctccgcacgcgctgcgcccgcccctggcgagaccgtacaggataacgcgaccatatccccgaacgccccctgcccgaacacgtcatagccacgcgccacaaccccatgagccgcacgactcgacggcaacaagccaaccacaataggcaaaccagccaacgcatccctcaaaccacggacacacccgacaaaaccctcaccgtcaacaaccgcagcaacaccctccataccaacatccgaacagcaaacacgccgcacccacatcacacacccgtggcggccgcgtaggcaagcagcatcaacatgacgaaatcaagcaccaggaaaccagcagccacaggctgccacgaggcatcacgcccctccaagacacaacgccggatcgcacgaagctcaccgggaatccagaacaacaccatgccgaccgccatcacggaattcacccagaacaactgattcgcatcggccgggccgacccacaacatgcccattaatcccaaaccggcaaccacattgccacccacacgcacacgcggggaaacacccaccccacgcaacaccacaagcaccacggcaaccaccacggcaaccccagccacaaccaaaccaggcaccaccacagcaggagaactgtcgtaatacagtctgtccggacgtccagtcgtggagtcaatcaaactttcgacatggggaccatacatcgcatacataacggtctttccaatctccgcgcccacggcaccggcgacacactgaacaatcagaacgtccccggcaacagcaatccacggcttgcgcataacatgagcagccagccacagcaatagtcccggaacaacacccacgtcgaaaaagaccgccacaggccaccaatcgctcgacaacgagataccggccatctgcaggaaccacacaccacctctagcggaatcacgttcgaagaacgcataccgggcttgcaaacctacctgcgcaagaaacagcacaaaccacacgatagtccacaaggcaacccccaaacgagtgaacacacgcctgccacccacaggaatgcacatgtcgatgaactcgcccaacgcgccattcgccagaacacgattctcaccgccgacatcagaaccgccagcctcggcatcaccgcccacaccagcggctccacgctcccacggtggccgaccaccacttctcaccatatcaatcacctctccaccataaaggaacgaatcgcggaacccgcataaacaaatccttcaccggcattgttcaccgcatccgccgcatcattcaactgggcaagccccggaatgaacattttcgccacatcccatggacccgatgtctgccgcccgtacttgacctgatcaagtacgaaatcatgcgcatggccagccagatcgtcctcgaagccatccggcaacggaaccagcggattcttccacatccggaaatccgcaaccagccacttcaactcctcgacataccgtcgctcatccaaccgaatggacatccccactcaccctcctttgcac
